United States Patent Application Publication US 2004/0166490 A1 - sequence listing, part 2

SEQ ID NO: 67 - DNA, 154504 bp, Mus musculus
  misc_feature (1)...(154504): n = A,T,C or G
gttgacttttagaagagaatctaaaaggttatttggaaagaacattagcccaataagaaaaggattgatctataaagaaagattaaaggactgtaagattagagcctagctaatactctgcttaaatttgagattaaaaacaaaataaaaacagctcttactattcttctgatcatgttcctttcatgtgaacttaaaccatgcatttctgaaaggaaaactgctaataagccttctctccgaggctttctccctttccctgtcactgggtcattaaagcagtaagttaccaaatctaaactctaaagagacctaaagtgttcaggggggaattctgaacagaacatgcagctcagattcgtgtttacccactttctggcactttggattcaggaccacatgtcaggtcccacccacagatgatctgggctcatagggcatttgcctagcttgcaaggccctgagttctatacctagcactgttttggatcattgattttgtatcctgaagatttgctaaactctcttattcatcctaaaggttccgtagtctgtgtcttcaagtttcttcgtggcagtctgtctctgcaaacggatctggttttcttttttttccttccatgcgagaaagtggtgagacagtaaattgctcccaatccctgaaaatcccagtctctgagtcagacaccatgctggtcacagctttttgtggataaccttcattacgttaatgcattcccattctatttcccatttgtggagtgtttctctcttgggtatactttctgcttctgtggagaaaattgtgtgggatttgtccttcagtatattgatgctacattttaaacattgtcctgacaagtattgacaacactgtcctgtggagcaatattgcttggtacctccccattaagcctgatcagaaaggctcagatcttgtagaagctttgctctaagaaaaacaaacaaacacaaaaactctttcaactgtgacaagagagataattcagcattggctgccctcgcagttttatgaaacttgagttccactgccagcttccaaatggtggctcgggaccctctgcaacgccaggaaatgcaaaatcctactctggtccctgaagttaccaggcatgcatgtggtgcatatatacgcgtatgtatgtatatatagtatacatgcatatatgtatctataaacatataagcacatgtatgtgtgtgtacatatatataaacacatatgtaggcaaaacattcatatacatgaaataaatcttttttaaaaaataaaaactcattcaaactcttcagaaatgtggctgtaacatcatcttccattgcttcctggagacttcactatctatgaaattgttcactttattgcactacaaatgtttttctccatctcatgcagtgtgactctcagtggactatcatgttactctttccattaactctttgtagtgtttcttctgttggactccagtactaaccatgttacagttgctttcatggcaaagtaggatttggaaaagtcatcacatctggtattttgttattcttgagtctatccttactgaactccgccagtgctggggatcttataggacagatggatactatcactgcccaagggtctcccaacttggtttagcaccagacagccagagcagatagagactgagtcatgtctttgaggaatgatgggtaattgagtgtcacagcaatgagactgttggcttcttgtcatgggccagttcatcatagtttggatgaaaagccaacactctgcttccaaaagatgcttccacaatccaggtcctatgtttaaagactactctgcatcctcttccaagtgtccacttccaaggtgtagtgcaggttttataaagaagtaaaaggcccgacttcatctgcaggaccttacaggtagttctggactacataacaacatctgaatccatgggagctggaacaatgcctcctagcctaagatctcttatcctactgctcttaaagaagaccagagtttggtttccagcatccatgccggggagcttgcaactgcccatagcttcagtttcaggaatccagcacctacttctggcctcctgacactgcactcatacacgaactcacactcacacacacacatataagcataattaaaaattaaagtctagtccttaaaaaaataatacaaaacacacctcggaatccatgggcttccgagatagttcacttgtaaagtgtctgtcttacatgcacgaagaattgaatcagaccctcaacatctacatcatccacaacaaaaaaagtcaggcctggtgacacgtgcctgcagtgtcacctgcattcccagcagtggggaagcagagacaatgggttcctggagctcacaggcttgccagtctagcctaaccagtgagttccaggccacatcaagaccctgtctcaaaaaccaaggtatgagcacctgaggaatgacaccaaggtcaccctggctgctacatgcactacttaatgctaagcatctccctccacacacaccaaaacaaaatctgaactctctttgtaatgtgctgtgtttctccaacaaatttttgacttgctatattagttttccctaactgatccctgttacctcatggagtaaaaaatactttgtaaattccagcttggggtttcttcccgccatttgtgttttccagatgaaagaggcacacagccttatatttttaatataccttaagcagcacaattgtgggcagctgcctaccctccatgctgttagaatccacctcctatccatagtccaagttattaattactatgtttatataggctgcttttagccctttgggcccatggcagctctggcagctctcctcgattctctatctcatggcggctcccttttaccctcccatgatggcttttttctctttcttatttattcttccatgtatacttaaaaacacttattaggtttcccaggctagagaccacaagaaaggagcaggaagagaaaaaatcctgctgtgtgtttcatccgggaacataaatggcccaaggcaggaagaaattctgcaccagaatttataaaatgttttttactataaccttgtttctctaaggtgggtcgatgtgtctatttaaaaatctctcaaactgggtgtggtggtgcaggacattaatctcagcacaaaaggtaggaagagacctatgagtttgaggctagcatggtgagttcctagccaaccacagtgagaacctgcctaaaataagtgttctctccctctcccctctccctctccctctccctctccctnnnnnnnnnnnnnnnnnnnngttagcttgctttctattgctgcgataaacaatcaaaagcaacttcaggaggaaagggtttatttggcctagataactggggtctcagtccactgagggaagccaagacaggcactgggaggcaagaactgaagcagaaaccctggtcactacatctctccagggcttgcttttgtttgtttgtttgtttgtttgttttttcaagatagggtttctctgtgtatctttggctgtcctggatctcgctccatagaccaggctgacgtcaactttagacatccacctgtctgtgccttccaagtgctgggactaaaaggtgtatgttgctatgccagtccagcttgcttttttttttttttcgagacagtgtttctctgtatagccctggctgtcctggaactcactttgtagaccaggtgacctcaaacccagaaatctaccggtctctgcctcccaagtactgggattaaaggcatgcgccactaccacccggctcagcttgctttttaaatacagctcaggactacctgtatcaagtaggtaagatggaccccagcacagaccctcagcagagatggaatggacagatgatatgcagcataggtacaaatgtgtgatcagttatctcatgaggtctagcatactgttgccttcattcttgtgtgcatatgtgggtccccatatgaactagacaccttagcacagtgttccttctgaataaggtttccttgagtccatagtagagcctcaaacacagaaggcagagttggttggcccttccctccgacagcccttctcagtaacttgcatttatccccttgccctacacacaaggtaccagcgaggtaaatcattgttccaactgtgcatatcaggacaccgagctttgtttgatttgctgaggtgtttgtttgtctggtttggtttggttgttgctgttgttgttttgcacacctgaagaatatcccataaagtagagcaactcatttaacccatttgcctggcccccagccttgctccacccacagacttcctattctgaagaatccccatagaactccctggggggaaacacccactttagctggcacagaccaaataatgggatcattagtaagtcagagtcttcttaaaattggaaggatttccaaatagctatttgtttccctggtaaattattggatcctatgggtatcttgggatagacacacatttgaaatatgtttccataatttataacttagcttttccaacttcttgggtgttttcactgtctgtaaggaagaattttctgctgtgggatccaagaccaaacatttcctggagactttgttctgttttctgaccttcatcttctttcttctaaagactgaagaagaaatttctgaccagtgcaggctgtcagcagcagcctgtggcccaaggttcaggtaaggaacacagggccatgaggccctggttatttctgggcagtaaggccagaatgtgttaaccctttgttttatggggttttattgtgttgttggtttgtttgttgtttttgactgcctctctatgtcaccctagctggctcagaactcaccatgtaggccagactgccagactgccctcaaactcagagacccatctttattcctgagagctgagactaaaggtgtgcaccatcacagtggccttgactgagattttatttattcatttattttatgtatatacactgtagctgtcttcagacacaccaaaagaggacatcagattccattacaggtagttgtgaaccaccatgtgggtgctgggaattgaactcagaaagagcagttaatgattttaactgctgagcgatctctccagccccatggctgagacctggagctctttatagaaatagatcttgcagaataggtcttgtagatgacatttgtttgtattctaagatttgaaactagttagttctgattttctctgatggtttgttaaaatctggatgggggtgtattggcttagcaattgggtgatagaattagggttgttgctgctttgttttgtttgttttgttttgttttgttttgttttgtttcgagacagggtttttctgtatagccctggctgtcctggaactcactctgtagaccaggctggcctcaaactcaagaaatttgcctgcctctgcctcccaagtgctgggattaaaggggtgcgtcaccactgcccggcttgttgtttttttatttaaaagatttattttatttatgagcgctctatctgcatgtacatatgcatgccagaagagagcatcagatcctattgtaaatggttgtgagctaccaagtggttggtggggactgaaatcaggacctctgaagagcagccagtgctcttaagccctgagctatctctccagccccagaattaggnnnnnnnnnnnnnnnnnnnnatctctgagttcgaggccagcctggtctacaaagtgagttccaggacagccagggctatacggagaaaccctgtctcgaaaaaccaaaaataaataaataaataaataaataaataaataaataaataaataaataaataaaataaatcttgaaaaacatccatattgagcccttcataagtttaaggcctatgtgaaattactgcccccacccccacccccagtcccaaataaaccttttgttagcttgctttctattgctgtgataaacaatcaatcaaaagcaacttcaggaggaaagggtttatttggcctagataactggggtctcagtccactgagggaagccaagacaggcactgggaggcaagaactgaagcagaaaccctggtcactacatctctccagggcttgcttttgtttgtttgtttgtttgttttttcaagatagggtttctctgtatatctttggctgtcctggatctcgctccatagaccaggctgacgtcaactttagacatccacctatttgtgccttccaagtgctgggactaaaaggtgtatgttgctatgccagtccagcttgctttttttttttttttttttttttccaagacagggtttctctgtatagccctggctgtcctggaactcactttgtagaccaggctgacctcaaactcagaaatcagaggtctctgcctcccaagtactgggattaaaagcatgcgccactaccacccagctcagcttgctttttttttttttaaagatttatttatttattatatgtaagtacactgtagctgtcttcagacactccagaagagggagtcagatctcgttacggatggttgtgagccaccatgtggttgctgggatttgaactctggaccttcggaagagcagtcgggtgctctaacccactgagccatctcaccagcccctcagcttgctttttaaatacagctcaggactacctgtatcaagtaggtaagatggaccccagcacagaccctcagcagagatagaatggacagctgatatgcagcataggtacaaatgtgtgatcagttatctcatgaggtctagcatactgttgccttcattcttgtgtgcgtatgtgggtccccatatgaactagacaccttagcccagtgttccttctgaataaggtttccttgagtccatagtagagcctcaaacacagaaggcagagttggttggcccttccctctgacagcccttctcagtaacttgcatttatccccttgccctgcacacaaagtaccagcaaggtaaatcattgttccaactgtgcatatcaggacaccgagctttgtttgatttgctgaggtgtttgtttgtctggtttggtttggtttggttgttgctgttgttgttttgcatacctgaagaatatcccataaagtagaacaactcatttaacccatttgcctggcccccagccttgctccacccacagacttcctattctgaagaatccccatagaactccctggggggaaacacccactttagctggcacagacctaataatgggatcattagtaagtcagagtcttcttaaaattggaaggatttccaaatagctattgcttccttggtaaattattggatcctatgggtatcttgggatagacacacatttgaaatatgtttccataacttataacttagcttttccaactccttggggattttcattgtctgtaaggaaggattttctgctgtgggatccaagaccaaacatttcctggagactttgttctgttttctgacctccatcttctttcttctaaagactgaagaagaaatttctgaccagtgcaggttgtcagcagcagcctgtggcccaaggttcaggtaaggaacacagggccatgaggccctggttatttctgggcagtaaggccagaatgtgttaaccctttgttttatggggttttattgagttgttggtttgtttgttgtttttgactgcctctccatgtcaccctagctggctcagaactcaccatgtaggccagactgccagactgccctcaaactcagagacccatctttattcctgagagctgagactaaaggtgtgcaccatcacagtggccttgactgagattttatttattcatttattttatgtatatacactgtagctgtcttcagacacaccaaaagaggacatcagattccattacaggtagttgtgaaccaccatgtgggtgnnnnnnnnnnnnnnnnnnnnnnnnnnnnnnnnnnnnnnnnnnnnnnnnnnnnnnnnngtcagcagtttagagcaccaactgctcttcctagaggttctgagttcaattcccagctaccaagtggttggtggggactgaaatcaggacctctgaagagcagccagtgctcttaagccctgagctatctctccagccccagaattagggtttttattaggagatagatgtctggtctgctgtagcatcctgccatcccagattggtaatcccagagtctgggagttagctcggttccctgctactgatcagtcctgttttctctctgtctctcctaggatggccactatctcaggtaatgtttcctctcttaaggaagttatagaaatcctcccttctgggctggaaagatgactcagcagttaagagcaccgactgctcttctggagatcctgggttcaaatcccagcacccacatggtggttcacaaccatccgtaatgacatctgacgctcctctgctgtgtctgaagacagctacagtgtacttatatatagtaataaataaatgcttaaaaaaagaaatcttgccttctataattttttattagatattttcttcatttacatttcaaatgctatccccaaagccccctataccctcctcctgccctgctccccaacccacccactcctgcttcctggtcctggcattcccctgtactggggcatatgatcttcgcaatactaagggcctctcctcccattgatggccgactaggccatcctctgctacatatgcaactagagacacagctctggggagtactggttagttcatattgttgttcctcctataggattatagacccctttagctccttgggtactttctctagctccttcattaggagccctgtgatctatccaatagatgacggtgggcatccacttctgtatgtgccaggcattggcatagactcacacaagagagctatgtcagggtcctgtcagcaaaatctgtctggcatatgcaatagtgtctgggtttggtggttgtatataggatggatccccgggtgggtcagtttctggatggtctttccttctgtcttagctccgaactttgtctctgtaactcctgtctctgtaacacaatggagtactactcagcaattaaaaacaatgaattcatgaaattcttaggcaaatggacgcatctggagggtgtcatcctgagtgaggtaacccaatcacaaaagaacacacatggtatgcactcactgataagcggatattagccccaaaacttagaatatacaagatacaatttgcaaaacacatgaaactcaagaaggaagaccaaagtgtggatactttgttccttcatagaatggggaacaaagtacccatggaaagatttaagtttttgagtctgatctgaactagcatcttaatggcctttcccatcccagtggctggtccagggccagtggatactagtaatatgaattggcgctggtggggctgtcctagactgccaagacaacttctggctgtgtcatcagtcatcttaagtctcaccacttctttcttcatcatcgtgctccatggatgcctcccgaagaaaatgattctcaattcatgttatatgactccagctgtgtctcctgttaccaggaaaccctcaccccacttcactcccgccccagacccacacgctccctaaagtctccagttactccaacctctggagatccattcattccacagggactagggatgcaccaggagtctgagggtggcagcaggcaaggagagcgtctttggccccgagctgggggctgcctgtagcgtggggcagctctgactgctgcctctccccgccttccccgtccccaaagaggacacccctccttccgcccgcccgcttccaacccttgtacggcaccgcctcctcgcgccgccctttcagggagcctcccaggcagccagcaagcgcggagagcgcactgggatgggacttgaaggcggcttctcaggacacggcgctggcgcgggattcttgttcgcgtccggggatcggtgcccaaggagctctgcggtcctctgcggggcgaggcggcggaccacggagactgacactcacagctgctcccctgtctctcttcccgggtgtcggcggcggtggctgcaggtgagcgcggcgcgctgacccgggagcagatgacccactgaccgacagacgcaaaatctgtccctctcctgggggacccgctgtctccctgtggagagtgggagagaaaggcggcgctgcaggtcccctcggccgggagaagtcccgccacgccgggccaggcgcgggacacatggggcggcagtagtacccgagggccccgcgggggcgctgtgcttcgctgcagggacactcagaacccctccacactgaccagggaatagggacttgttgagtgggtttgcagtgacaatcctatctaccaggtagaaaataacttggttcctcctgtaggctggtacctcaagaccagtgtcatctagatttcctttgctttctgtgtccagctctggcttccttgtatttcggaagagggataagaagagggcattttgtgttgctggaaaactggacgacagtttggggagaggacagaaaaatatggggacaaacccttgtaaggtctcccggagttggtgttctggagatactgtacagtaatcactgtggcgctcccacagtgcatctacaggatgcaattcccattagcctttgaggaatggacaacgaagctgtaagggtaaaggacagaggtttgggaatcagcaggcctcgttcaaaccccagcggccaagtttacaggctggagtacttggagacaaccagcaacacaatgcctcaattttctcatgcatctagaggggattataatgcctacaggattaaatgagatttcatggaagtacagagaatagttctaaaagtctcttactgctagtgagctctgctacccacctttctagaaaaggaaggaatctgtgtgaacactgaattcaccccctccctaattctaggacaaaaccttttgagggatgctcgaagatggcagataatgtatatgtgttagtggaatttttgtgcaaacgtccatttgagaacattctctctgcctgcctgcttgcttgcttgctttctttctttctttctttctttctttctttctttctttctttcttccttccttccttccttccttctttttttctttctttctttcttttctctctctttctttctttctttctttctttctttctttctttctttctttctttctttctttctttcttttcaagacagggtttctctgtatagccctggctgtcctggaactcactttgtagaccaggctggcctcgaactcagaaatccgcctgcctctgcctcctgagtgctgggattaaaggcatgcaccactacgccctgccctgccttctttcaaagtgataatttcacaaagccagccaagataccaaggtgagtttgtagccaggaaggtttcctctaagcctcctgtttattctgtttagaaggtttcctctaatgtttgttctcttataaactccattgaagaaggaaaggctgcaggttttcatcttctatctcccttctgttcctgctttcatttcagttgacagacttcagcttcagacccccacataaccagccagatctcttctataaacccaggttttggaggttctggcttccagagtccagacccaggtggtcaagaggcatggggcctgaagttcatcgctgaggatatcatagcataattgaaacctgagacagccttggataacaggcaggtcaaactcctattagctaagaccacgcatgtctgacagcaaaaggctaggtgaaagctgggcatggtggtgcatgtctataacccaacacttgaaatgcagagaggcaggagggtccgaagttcaaaatcatccttgattacatagtaactctaaaacaaacctggactacatgaaaccctttctccaaaaaccaaaaggggaaaaaaaaaagacaattggaatgaggctcaagattttaagaaaggcaaagagatgttgctccttgaaagacaaggaagaaaaatgagccactggagagtctgaaaaacaatttccagtttgcctagaagcagttcttattggtaactgagagaaggcactgagatatgggagtgtgaaggaaagagggggagaaagcttggtctcaggggaagctgagtgagtgagcagtgaccaaggagatgctgggatagatagagctcaatggagaggtaacaccagccccgccagcaagggcctttccagaagttgctctggcatttgcttgctggttctatcccatgcacaatctcctttcccgggagtcccagttctctgggggaagctaagcgggatttccttccctgtctaagggaacaaacacgggggatgacatacacagctctagggatggctgataccccagagagtggtgtacatcgtgttgctaggaaacagtgccaggatgctcttccaagagctctcagaactccagctcattttagcagtgcctcagagagtctgggtgtgtaaggcctagactgcaaaattggctgcagccatggaagaggttaggagacaggaaggaagccgagaggaaaaagtgaagtgtgtgcattcctgaatgtggtcaggatgcagagggcagatggaaactggtctaggtgtagacagctactaagccaaggagtcactctgaccatgaaaggacttgaggaagagaagatgagctccttgctggactagctgagtcagcagcccatcttcacctctagttggaagtcacagacaacatgtcaggttaacccagtaataaccagggtgtgaagtgtcgagctgcctatgggtagtctttatgttctagcatgcattggcttccggtttgctggccatgcaggagatggcagttctgataataggtggaaggaagataggaaaggcccagctctgagatttagtctcagcatggcctgattatatgtgaatacttagagtgaaggacacagttgccgaactgatgtcatctctctgattgcctgagaggtttcggggggccggggggggggtttcttcattgttttaccagtcaactagctctgaagccttggagggtctctagctataaactttagcgttctgttctcaaaagtaagatcttatctgctttggtggggatcaagcaaaaatacttggttccctgcctaacctgtcataggcactaagctaacattaatgttctttctacttttttcttttttttttttttaagatttatttatttattatatgtaagtacactgtagctgtcttcagacacaccagaagagggagtcagatctcattacggatggttgtgagccaccatgtggttgctgggatttgaactcaggacctttggaagggcagtcgggtgctcttatctgctgagccatctcaccagcccctactttttttcttaattatctacatttttattgtatgtattttgtgtatgtatctgtgttagcacacacatagaggtcagaagacaacctgtggaagttcgttccctgctaccacatgggtcagtttacccactgaaccatccccccagcctgccacttccttttcttatgtgaatggggcttagcattggctatagacttttttaggagagcagggttctgtgggtcatgcttaggtagagataccactttgttgtcatgcctcttactgatggttcattacataccagagagttgtgacacacaagtgaggtcccttgaatatagacagccagatctctcaagacccacagctcatttgttcttgactctggagggaccctacttttctggtgactcagatagtgatgcttagaaggtccccagctgttagagcagcctcctttctctgtcccaacctcttggtaaagcttcctaaaagaacccattgtctcatggaaaggagacaattggctaaaacaaaagtcaaagccttgcattatttcaaaacattctttctgtgccccctgctgcttcactggaggcagtttctcacacaaaagctctcatttgctcagagttgaaaggactgtccttaaaagtcttttaattttcctcttagggatgttacatatttttgagatgccaagagctataaatgccaaaccaagaaagtaccattgacttgaggacatgcatcaacttattattatgtgaaaaatccatattgtctgattataattatattacataatattgccattattatgtatttatatagtatcttttctatttttattaccataaattagtgaatatagtaatgggtttcattacaactcttcagacacatacccaatgcatttagaccatatttgcccccattatcctttcttgttcccttcctgatcccactgtgtggtgcatgacccaaccctaaccctcttttctctctctgtctctctctccctctccccccttctctctctctctgggtttgtgtgtgtgtgttttaagattggttacagaaatatggggtaagttacaatggctacaccactgaataaaatgtctctctctctcccaacaaccattagctacttagagatccttggggaggggcagggtctggaagcttgtctcccctgcacggggtcggagggggtggggcggatattaacaggcccacccaaccctgtgcaggtcttgtataggtaaccagaactgctgagagttcgcccatactatagccaggccatgcccagaagacaccattccacaatatttcaacccttcctcctgctcttcttcaatgccatttctttattttataaatagcttttttgaagtttaccatacagtggaattcattaattttaaagggtatgattggtaaatttcaacaaatatgtcactccatcataaccataacgtaaatgttcccatagcctcctagctctttccctttggctgctctatggctggttcccctttcttacccacaagcccattggtttgtttcctactcttgttatgtagttctgcctttattgaatttcctctagtcagagaattcagagcatagtccttttgtgtctgctgctttcatttggtgtcgtgctggggttcggctagcagagcacccctagttgctcagtaggagtccagtgtgtagatgctctgtaatctgtttcccactcatcagcggaccatctattgggtcactcccatgctcagtgttggaaagcacgacctctgcaagcatccgggaaagagttattgtgtggatggatgctcttgtcttctgactaagtgtgtagggtcaggactcagagaggacaacgcttctgttttcctggggtttgaagggtttcttaaggtgtggcctttggtgctaaaagtgtgggtgaatagagacagtgagttaccttttcccgtgttatttagctataactttatgaagagctgtcaactgtgctccagaatgacacaccgctttgcatgcttaccaacaaatcatgaaggttccaatgtccttgcatcttctcaacatggcaggcattgtgttatggtggctacctagcaggtttgtcatggtgcctcatggtgccactgtctgtgttttttttttaaacaataaacatttgaacgtcttttcatgttcttcccctagttatcctcttggtagtggtttgaataggaattgcctccacagactcatcctgtatttgaatgcttggccataaggactggtactattaggaagtgtagcattgtgtggagaacctctgtttgtaggaggatgtatattaattactgtggaggtgggctgtgaggtcatttatagtcttaagctatgtccagcgatacagtctcctgctgtctgctgactcttagctccttctccagcaccatgtctgcctagacactgcggtgattctcaccatgacaataatggactgaacctctgaaactgtaagccagccccaatgaaatgttttcctttataagagttgccatggtcatgccatgggtgtcttcccacatcaatagaaacacaaactaaaacattcttcaaacctttgcatattttaaagtggtccgtttttttattgaaaagagaatacatttttatattaactatacaaatacttcatcatatatatattcataaatatgttctaccagtttgtagcttaccatgtcatttccttttgaaatgagaaaactttaaatactttcagatatttatatatatttaaaaattgtgaattggaggctgatgagatggttcagtgaataaagttgcccattgccaatcctgacaacctaactttgattcctggaattgacatggtagaaggaaagaatcaaattttgcaagttgtcctctgagtttcatgtgcatactgtagcacacatgtatcatacatgtgtatacacatacataaaataaataaatgtaaaaagcttttaaaaattatgaacttcaatattgttttgtaagtaaacatattagctggttttatgctaatgaaatggctcaccatgacaaaatttgtcatgtatcattctgtactgaatggcttgtgtgcagaatgataagactagcagccagggctctgtagagcagcctggactcaaacagagctttgcctgtctctgcctcctgagtgttaggattaaaggtatttgacaccaccaggggctaagaagtttctttgataagaggtatgaactaaacttaactgtataaggataaatatttagagtatggttagaaactgtactggtttagtaaagttgtgtttaacccatttttaacattacattggaacttggcatggtggtggggagacaagagacaggaggatgtccttgtgagctggaggccagccagagttagatagggagaccctatctcaaaaaataaactccaacatcatagatcaacatgcacacataattggctggcatgcagaatgcagaatgataagaataacaacaaatatggctggagggatgactcagtggatgaaggtgcttgtcccccaccctgatagtgagttgagttcataatatatttttgtatggaacaaagcagattgaactggacaatattctactacacaaaacaaatcagaaacagaaaaataaatttcattaactcacagtgatgataccacaccatctatgtcgtagcaagttgtgtgattaatattgagtcattatgaaaacaagtaatagcttttaagatgatacaaaggaccaatggctggagagatggctcaattgttatagaaagtatctaatcccaatccaggatttctaccctgcctgtaaccatttagttcctgaataaaagacacatgcaatctctatgtttacaagaagtctaatcaacacaagagctgagcagatatctaccctgtatgctattaaaaatctatttcctatagctaaccttgaatttgttaactccaattggccatccctcaggtccatgttttcatgaactaacccatggcagctcctcctttctcctttctccttgtcctagtggttctctctcaacccccaaccccaggcctgggaaccctaaaacctgcctatgtctcttctgcccagctattggctgtcagcatctttatttaccaatcagaaataatctggaggcaagcatcacttgggtctacatgcagactctccctcaggggcaaccaggtcttagagacccacatttagcatcacaatacacagccagagacctttactgaggagcattgactgctcttgcaaaagactgaggttgagttcccagcactcacttgatgatgcccagttgtctgtaactacagttccatgggctctgttgtcctcttctggactacagaggtagtgcatgcatggggtattgcattcatgtactgcatagtactcataaatgcaggcaaaacacctatgcacataaaataaaataatttttaaaaatgaaaagaaaaatagcaagatagtctacattatcttcctttttcttttccgaaggaatctcagagttaaaggaataaaaagtagccagtctaactagaggactctaaactatttagatgaggaaagataggagttacccaaaatgaataaatttaggcaaattacttgttagagttagacactaaataaagagtgcctatctttaatacaatcttggtacttagtaaaaagtttcgggagttgacgggcttgagttcctcagcaggtcagcttctaaaagcaattcgctgaacagtggtgggggttgtttgtttaaattctggaaagtggtatttgccttacgcctgctcccttccttcctctatcagttaaacagcagtggcctttcatgaatggacacttgtggattttacattgggtcagtttcgttttctgctggattaatgttatacatgaccttggcaacaagatagttgatttcactgagcctctgggaatgtaggaagaatgctagcttaatgaatgagttaatccaagtaaagcatttagatgtgactggcagaggaacagaattccagccttagtcactgtgctgtgctccctcgtaataaatgtatacacgtttggtgtggtgttacatgataagctgaggcaggaggatgatgggttcaagattaacttgggctacatagcaatactctattaaaatagaaaggatgtaggaggctgggggctgggggcttgggactgaaggttgggtctggggtctggaggctggacgttgggtctggtggctggaggttggggctggggtctgggatctggaggttggggctgggggctgggggaacacaactggcactgtcatactacccatgtcagctgcacattgatttctagggacattaataattaattaataatttgtataatttgctattgataggcagaaagaccattattacctgaattctaggacctcttttccttttttcacatctaagatgtagaatgtgcctatgattaataaatagtaccttgaagtcaaaaaaaccgtcaagatagatttgtgatccaaggtgatgatagacttcccatggcccctgccagctcaagagaactccggaggacctggccaacgtgtggccccctcacgtttggaaggggcaaagtcagacaattagcatgtttgggacctgaaaaatcagggcaatggggcagcagcaccctaacatcagggacacccagaaatctaacttgcctttctcatgttgtattatagctgcagccctgctcctcttgaagatggagaagatgttggtggggtgcttgctgatgcttgggcagctcttccttgtcctcccagttgacggcagagagcgtccccaagccaggttcccttccagaggccgtcatgtccggatgtatccgcagactgcactgctgggtgagtgagaggtcctgcagttacaggcagtgtgtgtggtgtgtgtgtgtgtggggggggggnnnnnnnnnnnnnnnnnnnnnnnnnnnnnnnnnnnnnnnnnnnnnnnnnnnnnnnnnnnnnnnnnnnnnnnnnnnnnnnnnnnnnnnnnnnnnnnnnnnnnnnnnnnnnnnnnnnnnnnnnnnnnnnnnnnnnnnnnnnnnnnnnnnnnnnnnnnnnnnnnnnnnnnnnnnnnnnnnnnnnnnnnnnnnnnnnnnnnnnnnnnnnnnnnnnnnnnnnnnnnnnnnnnnnnnnnnnnnnnnnnnnnnnnnnnnnnnnnnnnnnnnnnnnnnnnnnnnnnnnnnnnnnnnnnnnnnnnnnnnnnnnnnnnnnnnnnnnnnnnnnnnnnnnnnnnnnnnnnnnnnnnnnnnnnnnnnnnnnnnnnnnnnnnnnnnnnnnnnnnnnnnnnnnnnnnnnnnnnnnnnnnnnnnnnnnnnnnnnnnngctatgaaggtgaagtggtttcagagaccgttcagggttgtgctaaagccaatgtttactagatatttagaatttatagaaaccacttcatttacttccctgaaaatgctccaaagccaactctctgcttccatttcacaaatgagggaatggagcctcagagaggttacccagtgagaaacagcagcaggacttgaatccagacccattccaaaatatgttctcactgcgtttaacagctagactgtatgtcagacctgacaatctgttggtattctgtatgtcttgtggcattttctttctggagaaaacatgtttattaaatggaaatcactgaaacctgccatttccattccctgtgtctggatgcaggctctgcctgtctgcattgcctgcttctccctataacaccatatgctggaatatggatggcattatccagacaagtttcatatattttctattctcataacacccctatcaaggcaagttcagtaaggatattttcagaagaaaactctttgcccttgtgtattagagcaaaattataagcccacattaaactcaaggctttaaaatagaagcttaattttaatttaaaaccttgaataccatttgcatcctcaatgcaagtgtcaattgccagtgggattcctccagtccacagcacagccaccagagtgctcagaggcaggagcctccccagcccaggcactctggttcagggacacacacacacaccacacacacatacacccccacacacacacacacaaaccacactgatggattgaagaaccctgctgatagggcagaacctgttctaactgaccaaatactaagcctgtctttattctcctgagagtccctgatttgtagcaccataaatgcatgccttctacatactttgaaaagaactggaaaatgtttagcatattaaaaattaaagatatttatatgataaacaccataaatatttaagtatatataaataactgaacatatcttgatatcctgtatcaccatctatgactgcatagttgggcttattttattttattttattttattttatatttcttatgatgttagaacggaaccaggggctttcacatactggggaagcacagcatcaccaagccatgtctacagcctcataatgagtttttgacttttggggatgagccatccctggtttaattggaaaagcatatgccttctctttcttctcttggctccaagtctgtctttctgtctttcacacacacactcacacacacacacacacacacacacacacacacacacacacacacacacacatctctaaattgataactctcaaccttctgagacaagaggtggacacttatctttccaaaggcatcaaaccccatgtagcaatagaaggagagtggccctgagtaacaatagaaggagagtggccctgggtaacaatagaaggagagtggcctccttgaaatcgtacagttgcaggcttagtccccagttggtgaattgtttgagaaggattaggaggtgtgtccttgtagtagaaagtgtgtcactggaggtgggattttcctttttattcattcattctttttgtttttgtttttttggtgggttgtgggggtggggatgaggaggtttgagatagagtatcagtgagaaacagccctgggtatcccagaacttgctttgcagaccaggctggccttgaactcacaaagacctgcctgcctctctgcctcctaaatgctgggattaaaggcatgtgccaccatacctggtggggatgggttttatgctattgccagttcactaactttctctgcctctcatttgtggatcagatatgagctctcatctgctgccccagggatatcttgtctgttccatgctccccagatggtgaccatggactgagcctctgaaactgcaaggaatcccgagttaaatacttttatttataagtttccttggttaggatgtctcttcacagcagtagatcatttactaagacaccccacaaacagcatcatcctctcttcctcgttttactgggaaatgggacagggacaaaggggtgggacaggctgtgtctgtagcctggggttggaagtggcatgctgtacgcagttgcctttctgctcactgagccttgcatactgaggttcccgaacatggagaaaagcacatttgctcacagaggatgctgaaagatagccatgaacctggaaggcaaaccctgctgctctggccagggttctggatcacagtctcttttggatggcactctgaagagaaccaggtggaaaagccaacagctgaccttagccagatcatgtgaccttctcttcatccttgttggggtccaggagtcactccaccaaccacacaaacactggtctcagtcagacatggatgggttattgaatgtacaccctaagactggtcaattaggctgtagctcaggattcgggggctgtaacaacctgtaacatttctcaaggcctgcttataaaggaaaaaccacaatgaactcgtgcaggtgcaggaagtgctgcctggtggtttgctctgactcaagatattttggatagctagacagaacagttctagatgacctttattgtaattggtcctaagtggagcttatgcttattgaaattcttaagattaacaaacctcagaatataaagaacataacaggatatgtgataaacatgaccttgctctgagtcaagttatttatctatgtcattgagtggcaggcatattacaatgacaatatgaaatagctggcaggcatggaacaaaatgtctacaggtatgctgggggagggagcaggcctcaacaatcctaaccgtagggaatcttctgtcttatgtgtatttgtttttctttctatgttcagaacgctatccagggcacactttccttagctctttcctttttattgccttcttttatcgactcttatcttgccttcttttgttgcctttctcaattcccacaagctgtatccccaatgggtcttgtacctgaagtgtgtggatgccatgtagagaaaaagtgggttgggggtccccttcatgggtgacaaagccactgttttctagtctcctatttccctcaagggtcagtcatgtgcctggtctttataactgatagtaatgacgacaatgacaacaatgatggctgccatgggggctttttgtttgttttacctgattttgttatttctcctgtgcatttcctgtctacctggcactgtgctagggcgattcacatttcactcagctcagtgccgttattcccacattgcaggtggtgattagtctttgagaagttgggtgttccgttcaaattcttaagaactactcagtggccagaggtagaatttggtatttcttctgcccagacccttacctatgaccttagacatcccctctgttccatctacctggactgggctcaccaattaggtctctatggaagcagccctaatctgggtccagattacaaaccatgactacattgccacagtcttgtcactaggctttgctggcaaagtggatccctgctttgaatccttgtgtggctcattgctgtttcagcagttcagcaatgagtctggtgtgccaaaggcacttggtgcatccctagaaagaggtaaatggcctctcagatgggcaaagagtgcctaaagagggaccactgggcccgtgaaggtttccatagtcagggaatacaggaaaaagctgacagaactggagcttgggaactcgatgggggtgctctgtgaaagctgcacattcttttcaatccatgagtgtgtgcatatgtgtgcctgtgtctgtgcatgaatatgtgtgtgcatgcctgtgtgtacgtgtgtgtgtgtgtgtgtgtgtgtgcttgtgtgtgtgcatgcatgtgcatgtgtgcttgtgtgtgtatgcaagtgaaagccagagatcaatgttgggtggctttctcaatcactttacacctctcttttttgaggcagggtctgttttagtgataaaataccatgatcagaaacaacttggggaggaaagggttgatttcagctcgcatttccacatcacagtttgtcctccaaagcggtcagggcaggaccgaaaagcacctaagaccacctgccctgggcgggtactacccacaataggctgggccctcccacaccaatcactaagaagaggcttgcctacagcctgatctaattaatggaggcacaatctcaactgaggctccctgagatggctctagcctgcatcaagttgacaaacggagccagcacagggtctctgtgtgaaacagagctcactcatttagctgtactggttactgtggtctctcacagcagttacagatgtgtgtgccgccatgcgtgccgccatacttgactgtttcattggtgttggggcccaaactcaggtcctcctgattgcacagcaaaagctcttacctacctcgcatctccacagtcctttgtctcctgctgctttttgagacaaggtttcactgttcatctcagcctctccaatgctgacatcaggagtgcaccacctcactcagatctagttgtatttgtgtttgttcaaattcaacattattttttctttttccctttctttttctttctttcatttatttttcttcttttcctccttgtcatcgttgtcgtcgtcctcctcctcttcctcctcctcctcttactcctcttcctcttcctcctcctcctcttagctttttaactccttggtacagcaagctagggttacatgcaaatttggcaagatgccttcagtatcttcaagtcacattgaaaatattaaaataaaatttgttaaaatttgtttaatctttaatgaatttttagttttgattacagtaggtcttactgtggcattgctgcatacctgtagcattctgtttcttctaactcatcccagtgactcacctccattcgtgttgctctcctttctctcccaatttagtccctcctgctctcacagaactctatttcattactctctcccaggtcccctgtgtgtgttacagctcagataggaaaggtatcccagcagtcaggagccaaggaacaccacagagcacctctcagcaagcctcacaggagagaaaaacccaggaaggtggctgcctctgtcagtgagaagcaccagagaaccgaacagaagacagggtttatacagggtttctggtgagaggtgggggttgagagagtgcaggtatatgagctggatatgaggagggggacttgggaaggaggtagggatgggatggaggtggtactggtatagcttttcaaagtggcctggattggagggattatgtgacctcatcttcgtgtaagctcagggattggttggattcttttctgtatgacctggtcactctctgatcccatggagctggaaatagctattatggcccttagagaagctggggtgcagagaaggaggtagggccttgtctttggagcccctgggagtaggaatgggtgggggctggccattcaagtgtctctagggggtcaggtctagtaccagagcattttgggggtggagcctgtccactggaggtcttcagggatgaggcctccaaaaggaatctctgtatgccccactgcctgcccacaccaccagagtaggtgtgaatagccacagtccccccttctgccctccctctccacttctttctctctccccctttactctcatgttctacacacattcatgcacacaacacatacatatacataaatttaaatcgagattttgcatgcaagagaaagtgtggtattgatctgtcatttctctttttaaaattccatttctatctctttttctgtgaatgtcctaagtttaatgttttcaaatgttttattcacttttttgatatatcacccccattcctctcttaatttcttctagatggctccccactttccactcttcctaattttgtgctctgtctttttaaatagtttattgaagagacacttcaacttatgctgcccgtataccatgatatcttaaaataaatactttatattctttttaaatgtttatataaagaatgtcatttacttttaaagatcacatctaaatacttaatgaatattactgaaaaatgcaaaagagcttgttttaaacattacacaatatttactgttttcttgaacagaaatagtacagacttgagtgatatgccagtttgttgaagcctccagaagagaggaccatagatggggggatttacaacagcacaaatatattgcctcataatactgaaggttgaaggtctgacgtcacagtgttggtagtctggcttcctctgaggtctctgacctggccgtgtagatatttgtgttgctcctgtctgtgtctttacacaggttcttttcatgtgcctttatgcatctcaatttcttcctttaaaaacattaacagtcatattaggttaccctctttgtgacctcattttaaacaagtctcaatttgtgtcccaggctagcctgggtctcactcactccataatctagactgccttcagattatttatgatagtcctcctgcctcagcctcagagtacatgtgggagccatcatacctgactctttataactttttgttttgtttattttgttttctgaggtagggtttcatgcatcgcaggctgacttcaaactcactatgtagctcaggatggccttgaatttttaacccttccccttctattctagtgctggggttatagtgtgactcctgactcctatacctagctcttaatgtaagagcttattttcaaacatggctaccttctgaagtatggttcaaatttcaatatgtaaattctcagagggttctgttaatctcctagaaagtcaatacacttctcactcttctggtttgtctcttaaatagcttgcttcctatttctgactcacctgatgtgacatatgacttctgacatccccaggcacactcagacttcagtagagtggtacttattaatttccagttgcatctttgagtcactaaattgagcctaaccttctaccatacccagctataatcctgaggccacagatgggaactgggcataatgtaaccaggtggtgaaaaccatggtttgagggatatttttttcaaaatccaaaaatgagaacctcaaatgagaaagtattgcttctatacatgcaagtggacagggaaatatgaaagagaggcagtgtgtgtattttggctgctcagagtttggtggggccaggaagggagaatagagatgttctcataaatcccagagccagcaagtaagtccaagcttcaaaggaagatctgggtgaccaaatgcacaaagagctgaagcttgggaagggctgtgggaaacaaaacaaatgttggcgttggatggtttgagctcagagccaggaggggcctatggaaaggcatgatgggttatatgtaatgtgggcattgggccatgggaactagtccagaggctcttcaaatcaggttgaaccatgagggctgcattcaagggggctggatctggcaaaggcagtgggaacctgccatccatgtccagatcttcattccccagtactgactccagggacggtgcctctctatttgacttacctagtaaagaactatattttccaggaccccttagtcccaggactgagtttggagcagtgagaaatggaaaatccttgcatcttagagaccggtgggggtgtgctgctcacctgagtgcatctagaatcaggtgtactctccgtttgtcactgtatcatgatacactctccagagttcaggcttgagaactacacaattgactctctctctctctctctctctctctctctctctctctctctctctctctctctctctctctccctctttcctcctctcctttatataggcaactcttgctatttttcattgagctgcactcataagttatccttgacatgtaagccatgtgttggagatgtctggtggaccctggtgttctgtgactgtcccagcttctaaatgaagcagtatttccactcttctaatcagctttttgtcttcaagatgaggaaatccatttatcttacatagcatattaggcatactataaatcacctaggtctcatacactttgcttgtttctttcattgatttgcctggcttttcattcattcaacaaaaatactgggaccctatactgtgcaagcattgttctggatgtcaagaatgctgcaggtcatgccaaggtcacaaccaactcgctgtgttttgctttacaatttggtcaaattctaaagcctcaagtgctaagagttaagaatttggggaatttcacaggatcagtaaaagacattttgggttgtattttgtttttgtttttgtttttgttttgtttgtttgttttaagacagggtttctccatgtatccctggctgtcctgaaactcactctgtagatcaggctggcctcaaattcagagatctgcctgcctctgctttccgaggactgggattattggtgtgcaccaccactgcctagtgggaatagatgtcttgattaggatttctactgctgccatgaaacaccttgccccaaaagcaagttggcgaggaaggggtttatttagtttatacttcttcattgttgttcatcaccaaaggaagtcaggacagaaacccaaagatcctggaggcaggggctgatgcagaggccatggaggggtgctgtttactggtttgctccccatggcttgttcagcttgctttcttgtagatcttagcaccaccaacctaagaatgccaccacccaccacccagagaggctttttcctctctgatgactttagcttatgtcaagttgacacacaataccagccaggacagagattttcttgacaacttattgaatttccttgaaagctattcattaatttggcttttgttacttattttttggtctcctctggtaattggtttccttaaaagctgctccacttatctacatggtcaagtttattggtgtaaattgcacttcccaacattgagccacagtttaagaagtgacacagtgtcctttaacaaaacatgcccattttttttgttttcagagatcataaaacttttagcagaaaattctggagaaacattgagacctcaggataggcttgtgttttatatatatatatatatatatatatatatatatatatatatatatatatatatatatatatatgagccttggtttccctgtaagatttggccttgatgacagagcttcaacaaacacaatttcttatcttacaactctcttgaccctttggcccacctaatgactccagcttctcagaagtgccacagctgggccactgctgagcccatagtgtgagcctacaccccagagaggtggaggatcatctgccttcttggaacagtaggctttcagtgatggagggtccagtgtacttggggccagatatgggggctgcctataggattgtctgtagttgttagctaactcacaccaaggaactctgagtttcctgggatgctacagaccctgtgggatgcgggagtccctagccctgtgagaccttgatttaggttggtccatccttctggaaaaggaggggccacatgtgtgctgtctaggcagaaggcatgttcaggcattttctgacaatctcagtttatcgctctaagctatattttaataggtgccacaacaaagaaaggatccagtgttttctttccatggatcataaagcttttcataaaatctgaagaaacattgtgacctgggccatgggtgtgactctgggaagagaagctgctgttgactcttttgttcttatcactcctgtcatttatgggagagctttacaatttagagtacttattgttttgtcttgtttctcttgatctcatcaagtccttgagagttagattttatcatgatgcctaatttatagataagaaaatcatgacctgagatatcatcttcattgcttttctattgctgtgacaaaacactattacctacactgttagacaatcaagcttttaattgggctagagttcatgatggtggatcaaaagcatagtggcaggaagagctgggggtttatttatccccaggtaggagacatagagatctaactgggaatgtgggagtctttgaaatctcaaagcccacccccagtgatacacctcctccaacaaggccacacctcctaatacttcccaaacagttccaccaactggggaccaagtatttaaatatcaaggcctttctcattcaaaacaccatagatgtttaagcactcaagatggtcagatgaaaccagaaaccactccttgatgatgtcattttatttagaagaaacagtattctacattaagaattttttaaaagatttatttattatatgtaaatatactatagctgttttcagacacaccagaagagggcatcagatctcaatatggatggttgtgagccaccatgtggttgctgggatctgaactcaggaccttcggaagaacagtcagtgctcttaaccgctgagccatctcttcagccctacgttaagaatttttaaagagatttatttatttatgtacatgagcacactattgctgacatactaccagaagaaggcatcagatctaattacagatggttgtgagccatcatgtggttactgagaattgaattcatgacctctggaagagcagccagtgctcttaactgctgagtcatctttccagcttcttaacccaagttcctcctgtggaatggaccttaaattcaatctgcatccctgacagccatgtcattattccaccagcaggcacatttcccttacatgttgatatggcagcacgtatttttcataatcaagcaggacttatgactctctcccctcagcctacaggcactacaaaagctactcaacaatagaggatttcaagctcagttctagttttatttttttatgtcctacagccaaagtaggtacggtttttggcaacaagtagggtcttaacatctagttctagcttataaccaacagcagctgctatagaccttatggtttatgaagaccttggaccttcctgccaataactcacagagagctaacccaccttggcactgggatattcaataaaattatagcttctggactttattttttttttcctatccatagaaaatctgtttaagtcttttgactgctgttcttgttgttcttctacatgcctttaaccatctgtaaaatgctcaagggttaacattatattatatataagtatataatatgtaattaaagataaatattatatagttatataattatagataacattgtacaatatataaaagcctttctaccacagtgggcaggacctctgaggggccttcacaacccatcccaaataagtgccaaatggtttggggatttcatggctaggaggatactacaaaatgttaacaaggatcccgtccctcacctcaattgtctcctcagaagagcagtgttgggcacagggctgcagatccagcacaccctcatctaactctgtaacactcagccattctccatgagctgccctatgcccgtgtcttggcattgctgaagagctgccacacaccacccaacttgaccggctagacagtgtgggtatgtgcttttggttctccttaggggcaagagggagaggggctgtgctcttgcctgttattcccatggcttgagctaacctctccagtcttacatgctggagccagaacatttctgctgtctttccatcagccacatctggatgctaaaagggcccagagttgagtgaacaatctcagtgtactttttgcagggaaaaagtgtacacagttatcctggaggataccacctgggacaagctttgtcttttctacctgtactgttttatcctttaagacttccactgaagttttacgtaggttttaaacccttccagaagcccacaaacactggtcatttcctctatcccaggacttctggatccatatagatcttgccacatttgcttttgaccaacctactacttaaccctacttttggtgataggagggaggcactttttgttgttgttgggtattttttgctctctctctctctctctctctctctctctctctctctctctgttttttgagacagggtttctctgtgtagccttggctatcctgaaacacccctgtacactaggctggccttgaactcacagaatctgccttcttttgcctctgcctcccgagggctgggatcaaaggcatatgccatcactgcccagctgccccactcattcctgggatggattgtattagcactttaagaatctgatttacatgacagcctgagacatttgggtctagagaacctttctaactcataaacatgatgtttcatatttctgcaaagccacaaaagccccattatagtcccatgatcccttctaggttatatcctttccaaatgctcccgtgaataaagttctgccaggtccagtgaactgggcataacatatccagcctctaggttttatgtgtcccttctctatcctgatgcctaatactcattgagggcctagtgttcctaatggcataaacccattcattagtgacgaagttcccatgttttgcatcaagttatggagcctttgtcataagaagggatgagtagttcaaaggaatgacagactttcacttggcttttaaaggatcagcctagctgtgtgatcaaggttaggatgaagaggacacaggcaagctctgcccaggggggtaaatatgcagtccaggtgagggctaatggtagaggtggaaaatctctgcagcgtaatgggggaactcagcattgttttatttttttggcaatcccaaagttttctttgaacattactaggttgttgaacgacctatatctcaggatacactctgcagttacaactgggcaacatggacgtatataaggttcaacagataatgttcttgtacagttgtgtgtgtgtgtgtgtgtgtgtgtgtgtgtgtgtgtatgtatgtttgtgtgtgtgtttgtgtgtgtgcgtgtttgcttttccagtacaatcataggaactcaagtcagatacatttgagttctcaaccaccatttactatctgtgtggtcctggacctctcagagttatagcttcccatctgaaatggagactatgtaaggaataccaagctagcacattctgttggtctataatcattaccccataaatattagctagcatagatgtggctagaaccatgaatagagggccaaagaacagtttttacttttttttttttaaactgtagcaaactagagctgggaagacataccatttattccaacacttatttcccaggaaaggaatagaaaatgatagagtaaatatatgtggttagtgtcctctcactaggtgaagcatgcaggtctctggactttcagggtgcctgcctcttccatacatcactaccacagatcttaatgtgctcctaggtgagaatactaaaaacaatagcaagttatcaagattcaccctctgtatgcannnnnnnnnnnnnnnnnnnnnnnnnnnnnnnnnnnnnnnnnnnnnnnnnnnnnnnnnnnnnnnnnnnnnnnnnnnnnnnnnnnnnnnnnnnnnnnnnnnnnnnnnnnnnnnnnnnnnnnnnnnnnnnnnnnnnnnnnnnnnnnnnnnnnnnnnnnnnnnnnnnnnnnnnnnnnnnnnnnnnnnnnnnnnnnnnnnnnnnnnnnnnnnnnnnnnnnnnnnnnnnnnnnnnnnnnnnnnnnnnnnnnnnnnnnnnnnnnnnnnnnnnnnnnnnnnnnnnnnnnnnnnnnnnnnnnnnnnnnnnnnnnnnnnnnnnnnnnnnnnnnnnnnnnnnnnnnnnnnnnnnnnnnnnnnnnnnnnnnnnnnnnnnnnnnnnnnnnnnnnnnnnnnnnnnnnnnnnnnnnnnnnnnnnnnnnnnnnnnnnnnnnnnnnnnnnnnnnnnnnnnnnnnnnnnnnnnnnnnnnnnnnnnnnnnnnnnnnnnnnnnnnnnnnnnnnnnnnnnnnnnnnnnnnnnnnnnnnnnnnnnnnnnnnnnnnnnnnnnnnnnnnnnnnnnnnnnnnnnnnnnnnnnnnnnnnnnnnnnnnnnnnaaaactgaagaccacagagacgaatgttcttgtccctggtggagaagcatggtttggagacaggggcagactaggagccagaagcctcaacacagcatggggttcttcactggaaaaataaaaaggtcgaatctagcctttaaagtgccccttttagttttaaaatgtttatgtcccaagtgcttgatgatcctgggcttgaagaaatgctatttcagttcatcagcttgctatcttacttattataatcagacctcaagttaatgatcaactataagaaaggctttttgtaaaaccaaaagcaccaaatctgtgtggtgcagattcccagcatgttatttctggcttccatggcaaccctaacattgggtggcaatctcaaagtagttgaaggcagcagatggagacagagcatttgctaaactgctatgagcagcaaggaaacaaattgcttgcccaatagttttccttttgaataattactgtccccatgtgttgagggagttgaaactgaagccaagttaagtaggagtggaggaaacaaagcgttgtaccaaagtggaaagaggacaagttttcaaacaagttacgaacagccagccagggagtcactgtagagaggggtagagggatgggtattcagaagtgctaggtgaccagaaggaagtgaagacagtcagtttccacaaagcctggagaagtgaactgttctcaggagtactgagtgtgcttggttggattgttctgcctcaacaaattggagcctccacttggaatatcctgaggacagacaaggcattaagcagagaggtaactattgagaaagcagattgtactaggtaacaagcagaaagagattcactataggaagctgggcgcttgcacgatagtaggaggaaggggtgtgcagttcactacactaatacacatcgctctggatactgtcaccacaatccaccaggattctggtgagccatactactgtcactgtaatctacagggatgctggtgtgccgacactggaacaccaagtttgttgctgtagtgcactgtcttctacagtgttagcagagctagcctctatgtctcatcctttgtaaccgtctgtgtctaatagtttagctcattcttatcccaaactctagctgcagtggactctggtaattgtagtttttccctttaaacttctgtagtatttgaagacttggggagagatggtatttatgagttgatgttcaatcaatattgcttttgaaatttggaactaggtataggataagttgagaagccctcacagtcaacctgaagtttctccttcaattacctaagcaaggtagacttattcttgtggcagatatgcaactcctaacatcaggaatttaaaatagtttctctgggtttttgttttaggcttatcaatagggagctgagaatttaaacctgagaccttgttgaggaccttaaaggaccacacaggttggggacaggcatggtgagactgggttggaccaggcatgaagtctgggctaagtgtgtatctgaagggaggataaacacacacacacaaacacacacacacacaccacatacaccacacatacacacaccacacaaacttttctataactccatttcagctccttattagtgactatatgtgaccccagacagctctgtcatcctgcctctttaggatccagccttaccacccactttcggttccttgtatacctgggtagtacactctggtctggctttgagcctgcactcataactgccctaacctgtctactcaatcccaggcctaactcagtctatcatatcataaacttgtgattcatgctttttaaaaacctcccaaatatgccttctctgtgattcatcttggtgagactgttatatggtgtctttagaacctggtacaagagtacctgtgtttgtacagttgaaagtgtctctcttgctggtccagtgttcagagataggtaccctgtcatacaactcatctttactctggggaaaagacaccaggaccccatgccatgcagctgaacatatagggcctccttctcctcctggcttgaagatcttagctattctgcattactgttcacaggtctctctgccctgctcctggcttccatttgctgaactcttagagagcagaagaggctactgctcaaattcttacgtttgagtgcccctataggccagtgtctaaagtaggctttagacaactagttatgttatatgatgctctatagagagcagaagtcacatagcttgtttcccaggaagtgcttggcacatagttttatattagaaaatgtgtttttgtgtgtgtgtttatgtatgtatgtgtacatgaacatgcagatctgtggactctaatggaagatagtactatttctcaatttaagaaaaaaggaaaaaactgctcagagtgtttgagaataatactaagttgttttttttttctgtttttattctgtcagctcctattttttaaaaggatctaaagccaccgagtatgtatgtgtttgtttatactctatcaattacaggaaagtttgtgcagcaaactctgagaggacttgttgagcatttcttagtgaggttggagcaaactgctttaccttgcaaggaaatttcagttcattggaaaatatttctccagggctaaactagggcagccttttctttggctcccttgtaaagaaacccatccagggctctggaagccacagttgttgaagttcaaatggtgccgcctttcaactcctataatacttaccagaggagactggtgtgatgtggcattttttttcctttcccttttcctggctccttggtgcatgctccctgagggccttagagagctgtgttcctgaaggaatttataacagcaatgggaacaactgacatttgagctggtgtcaactaggatccatcagggggccccttgccagtgactctacttattaagcagtattgctatgcaaagatgactgacaactcattaaaatctttgtaaaataacagaaaaagaaacaagtatatttttgcaaggacgcagcctatatgtgtctgcaggttgaaaagaactcacccataaggggtttctcccaatacatttgtccttctgtacatttctttctgggttaaagtgcacacagagcaagctggacaatcccaagtcttcagctttggacttgggttccattggtatgtattaaaaagaacatacaggctattcagacagtgtgttgggtattcctgggggaagctatgatctaagtaagttcaatggtatcagctgcatgctctgcacaaagagaagaaaatttgaatgtctggcagaaaggggagccaagctattatattttccctttcttcagtcatgttctttttatttttaccaggcattccacttgggctatggagggatggccatgaaccatgagcattgtctcgtcttgatgtatgatgtgactttcattttcagtggtggaccaggactagagattgtgtggcttgtagttgcactgggttcatggaatactctctgagtctttcagtcagatgtcagttctctggagactgtgatcagcataggatcttctggtaaagcacatatgatggggcttggacagtagctcatcacactctgccttgctctatggtcactggtatgcttacttgtatcagtgagcactttgagtctccttaaactcagataagtgcatccaactacctggcatgtcttaggatgccaacgtccccacagcaccaggcactcacttttgcctttgatgccttcagttcaccaccttctatgtacacatctgaactaggctgtcatgcaatggcgatgattgcagtccactgtatgtcaaagtgtagtctgatttgtggggcttctgggccagcaaacatcatgtttatgggatgatactacacagcatgtgtcactacttaccctgggatgcacagcaggtaaatcttgtgacattggttctattttattgtctaattctcctcccagtctcaggtaccagttagtgtgctatctgctgactaggagggtaaggtaccttttctgtgggacatttttctgttgaaaggaaactacatgctaggttacctactgcagtgaaacagtggttgtaaatgcaaagagtagataggttttcaatttctttccaccatttcctatcaaccccacgtccatggacttgctagagaacctctaagtctcatctgccctcccttccttctcacattccttcctgtgcagtagtgggtctaccttctttactgtctgaatcaaactggagactatggcatagctgtcacatacatgattcagcaatggaacgatatttgcaccaggagacatgagggaatccaggatacagtgtcaccatatttctaagacctctcctggtaatggagacacaggcatggagtactctgctgcaatcccctcttctaggcacttggcaaatggcctctcatgaccacatgtctctagagaccgagttctcaggcttgtgcccaagaaccacctggaacgagtgctgattcctcgcctgtacaggatctgactcattaacttcaggactcagcatttttaatacatttgccaagtgtttctgacatcaccagaccactagggatctctgtcatggctggctcactgaacctccagatcagcttttccatccatccaagctcatggaggactgcctatacttctttttttgcttcctttccactccttacacgtacttatgcacaccaaagagaataagcaaagattcagataagagcatccaactatgtggcactttgctgagtcccaggattcatagaagatggtgcatgtagctaaatagctttatacataaaacatagagagaggattttagtagaggtaaacatgggatatgaaagagggtcgtttacatcaatggaggtacactgggagaagtgtaaaaacaagagaccccatggcttagagcatcaatagcagagtggaagctcgtgaagagagcctcctgcaaaagttagtgaccttgttgctagtgaccctgggatggtacaaccataatgactttattgtcagtgaccttgggatggttgcattggtaaccactccctgaggcttcattgtcctgggcacttcatagctgtcagaccaacttttttgactcagatcaaaatgtacccagatactcattcatgagaagttctgatatgaagagaagactaaggtcccttgagttaggagaggccaggagggccgtagatgagatagttaaaatactaatattaggaggagtctaatgatgcgctggcaacactggttgggaaatgttgacgtgtggtgttgatgagaatactatagctaaaatttgacattaaagccaaggaactggggctgtaaattgaggctgtggtatagatttacctgccattctggtcccaattttaatctgtaaccagatgtcaatctggaagtccctctccttgggattcataacttgatatttgaaccccatgtaaagtgtgcaacactaacttctcttaggtttcatcatattagttttgactcattattctagaaatacctcatgacctcatgtttcctcccaacaatgagcctagagagaccacaagagctgtttttccccttgactttggagaagtacttagaaagtattacagaggacaaaaggctttgtcaatgagtccaagagatgtcctgagcccagtaagcagcggagggtgttgtcctgagaccctgagtcagggttcagtctcttcccagcagtacttttggaagatgtgaatggaagtgatggagccagagaaagccattgctcatcagctttgtacagtgtctaatgtgaggtaatgcagcagctggctgctgattagcaagggagttggagaaacaagagttgattacaggccttccaggcctggccagggtccaggcactctattaaagtgcctaaatatgtgggaattacaggtcaagtgacactggggacaagagccaaagatgagacaaattattcctgatgtatcctctttgccatctgtaagccctgcaagtcaatcacagtcttgaggcacatggggacagaatctcacttggcatgtgctgtcccatgggcggggactatcacagcatcatttgcattgtggtctttgctctaggcactgcccacctctcttgtgtcccatagaaaatcttttgccgggcagtggtggcacatgcctttaatcccagcacttgggaagcagaggcaggcggatctctgagttcaaggccagcctggtctacaaagtgagttccaggatagccagggctacacagggaaaccctgtcttgaaaaaaacaaaaatgagagaaagaaagaaagaaagaaagaaagaaagaaagaaagaaagaaagaaagaaagaaagaaagaaagaaagaaagaaagaaagaaagaaaagaaagaaaggaaggaaggaagaggaaggaaggaaggaaggaaggaaggaaggaaggaaggaaggaaggaaggaaggaagaaaaaaaagaaaaatcttttgaggtcctttttttctctgtttctctccagtgttctagtcacattttaaatcatgtcccactggttaactctattaacaagagcagttgtaactgtttgctcaccattcctgtgcccagcattactctggccatgaaattagtgagctccatattcacacattattatcctgagctcagccattagcgtctcttatctccatcccgtaactgcactaccaggctcatacttacacttcgataatgctgaggtcttatcttcactttgtgtccattgatcttgatgtctccttcgcccttcactttcccagttgcctggcctctcagatttaatgctgtcaacctttgtcccttcctgatccacccgataaccctgttatatccagcttttgcctaacttgccccaggtcagagtagctgcaacagaacaccctaatgtgttcactggtctcacacatcacaattctttcttcaagtctgcctttgggctgtttaagatcactctctagttcttaactagcagccagaaccccagaaactattaccttgtttttttactcttgtatcattaaaatcttcagttttctcagtgcccacaagccatctgtttgtggagctttgctagggagtgatataaaacctctggtctctgttttccattctcttagcacttgtctcttgtcctggctacattcctcctagtccccacagtcactgcaagaccagtggtctgtctatctcagtgtcttctccttcagtctcctcagatctcatacctgctgagccctcagcaagccttgccaaggaagtgtggatatgagttaaccagcaggcccaggctcttgttgtgatgaaggccagggttgtttgtttgtttgtttgttttcttttgtttttatcatttgggtaagttaaataagtatttagcaagggaaaagcacttggtgaggtacaggaaagcttgggccatgttccagaaaagaaaagaactgacccccgagagcagaaagagtccttgtgtaccttgaggattgtgcgaatgcaaggtgaagaagatggggtgagcatgcttggtggtgaatcttggttcctcacacttgtacagtcagacagagggttcaacccaacatctctgcttccagacagaaaggaaactgtaagcaggtttggactctctagagccatgtcctcatctgtaatgtggaaacagaaactgctcagttcctaaggtgactagggaataaataggccagcatatggaaaacattccaaacaaggttgggcagctcagtgtgatctacaacttcctgcagtattctctttgaatcttacaagtttcttgccctgttttacagaagaaaagatcaatgattgggtgggggagagggctccgtccctggaaacttaaaacaaacaatcaaaaaactggtcacagtctcatgcacttttaatctagtgctggggtagcagaggtaggtagatcttctggtcttactggctgacaagtctagcttactttgtgagagagacccatctcaaaacaaagcacaagcaaacatgaaggtagacgatactgaggaataacagccaagattgtccaacataaaagcatggacacacacacacacacacacacactcacaagagactgagggtcaaagaacttacagagatggtcacgattattcgggcagaaactgacagaggttggttgtgtactgagatcatcacaccttattgctgtttgcctgagaatccccaagtcccctccagataaaattactttatcctcattgtagagactcacatccttccctattccaaaatgccctggcttccccagcaggatggcaccaaatgtttaccatgctgccacttaaccagttccagcattgacaaatcttcagcccaaggagaggaaatagttgtgagattgcacactgtcacccggaagggcagaaatgttctcaaaattctcctggcccagattctctttttctgaaagagggcaagagactatgttctcaaagccaggactttgagtccagatgacaagattggaagtgcagttgacagagtccagatcattgcttcatggtgagaggggatgacattttattatgtgctcacgaatccttatccaagtgtggctgaaagtcctgtcatgaggggccaagaggaagatcgctgtgtgttctctccccaggctgaggagaaggtgcatgcttcctcagcaccagtaattagcatgaggggatccctcagcggagagtccagttttctggaaatgtctcccaactggccatcgtggagaagctgcaggtttttacaggaattattttggtgttctcaagcatttgcaaagctcatattgctgtgttgtagagcgcatccttgaggatgtgttgagaggactttgaaatgatagggaagctaccattatcatgccagcctgacaacagtaagctcaagactttgctgtgggagagcccttttcataagcttgctgttctttaaagtgggtgacttgcctctacatggggtcctttggcttacattttattagtctggagtccatgaactgagagttcagccctgatgatgctgtgtataagtgtaggaactaaagttatgccacaccaacaagaggcacccatgaactctctggctttaaggttgctgtggcttccttcacctgattgccctgactcagtttcttcctctgaagccttattttaccacctgaaatttcacttaattctacagatgttgatgtggtagaatactcattgtatttccaccacataagcatgcacatgcatgtacacacgttcacacagacaagtgcatgcacacacatacccatgcatgcctacacacacacacacatatgtgcacacacaggcacatgcatgtacacccatgcacataagcatatacacacacatgcatatgtacacacacgcacatgcatgcacacaaacacatttctgagtcccaccttgtggaactcacagtgaggcagtgaagtcaggacataccagaattctttgtatttccagagatttgctttctaacattctcagatccctggatcgggaacagcaaagtcaccattcaacttgttagaaaggcaagttttcatctgtctctccaaactcagagtctagcagctctagggatgcagctcactgctttgacctttaacaaatgctgtaggaaaccagggtgcatgcttagacttgagaaccactgagctagccttcaagggacacactgagcaggtctgagttcgtaagggtagactgctacaacttgatttcagctcagagctacaactcttgtggaacttcttaacaatatttgtgaagcattgtgatatttttcttgtgtcccaagcattgtggaaacaacccatttgttttgatgggaactaattcagattagcacacaattccacatggaacttccagaattttcttcaaattgttgatgctcattgggatgttgatgccatgagtaagactcacaataaaaatctcagtttgagcaaaagcctctgctaccaaatgtctctaggggatgagaattttcagtgatttagtcctttgtggggtctccttcctttgaaccattaaagttcttgtctatggtgaggtcaaccagatcccctgatctcctcagcaagtagacaccactggcccattatcccagaaattagctcagccttacttagaaggggcagacaggtgtggcttctggaggggaactgacctggcccatcctgacacactctagtcctgctctcgcccatcctcaagcttagtatgagagctaaggagaaaggagaaaaagaacttgggagaggaggtaggcagaagagagtctacatgcttgcttatgtgactattacctgtcggccccttgctcatagctgccctgagagctgggaattagtggtgtctctgtgtgttttctcttttcctgaattatgaaagattagtaaactcttcagcacctccactttctcacctatgcaatggtacaattttagcacttttctccgtagcttgttctgaaaatggacttaggtacctatgatgaattcactgtgaaaaggagattttagaacatcttgtgaatgtgggggcctctctcttgagaaattccccttatatgtacctaggtcccaggattggatttgctgttagatggggatacgttatatgtggcttcctgccaggctactggtactgggggcacccccttcttctctgactgttgggcttgtatgggtgccatggagaggtgtgtatgccagctctacatgacaagtcaccccttggcaagctggcctgggcaggatggcttcccagactttttccacttcccatcctaatgactggcttcactgcttaatcgttggctttctgtctcattcttgcagctgtggtggttgggatttagggcaaggacttgggatcttttttctaatccctttcaaatcctgcttgagttgcaaagtccagggaggacatagagaagaagggagggggaggatcactctgcctaaaggtagtgtattggtgtgctttcttctgagctaaggaaataggtgcagctaggtaattttattatgaaaggctggggctgggagatggctcaattggagaaaagcttgctgaaaatgcataagaagctgtttggactcccagcacccacatcaaagctgggcatagctgtacatgtctataaccctaccatgagcagcaagggagacaggtggatccctggagttggccggccagccagtctacacaactggctgagggaaagacctgcctcaaaaagatagagagtaatagtgaaggacctagacatccggcttccacgcccacccatacatacagaaacccaaatacacgcacatgcataaaatacatatagagtgggtgttttttacttgatattctgtatcaagctggaaggctgtatgtggtaatgactttttgctgttaggtaccccaggaggcacaaggcattgtgggataaggaagtgtaagtatagattgtgtctcttctggcctctgccactcttcttaaaaagtcaccagaactcagcaacagaggctctgttccattcagtcctgattcttagcaagtatccaacctctggatgccatagctacattaaacttccattctccccgaacttcacaataggaattggatctggctacacgaccctctgaggaatgttctcaaaccctatccaaacagtagcaggttgtcaccttcatcggtcaggaattccacagtggagtatattatctatctggaacccctgcaagactcaaactcagttgatttttttttctatgctgagtatttaactcggggcctcataaatgcccggcatgtgctctaccactgaactgcaggcatctgaaaactctgattcagttaattgcgatcgtgcaacttccctgcaagagatgttatgcaatatggtgctaagacatcatgccatctgtgacctgtgtacagatttctgagtctgacttgaaaagttttttatagttggcttcagaatattctcagctaactccacccagtagttcttagtattctatgtgttttagagccttttacttagttttccaccacatttatcctgtctaggactttgttcatgaaccactctccatatattctttcaaccaaacgatctgtattcacaaggcagcttgtgtctcatctctttgacctcagcctctgagtgcactctccctcattttttctctctccttccttccctcccttgtttcccctcccctccctcttagaaaaaaaaagacgtatttatttttactctatgtgtgttttgactgcatggatgtctgtgaatctcatgcatgcattggcccttggagaccagagagattgtcagattcccatagacctggaattacagacagttgctggccactatgtgagtactaggaattaaacctaggtcttatgcaagaacagccagtattcttcactgctcctgtcctgctgcagctttttaaaagtctgttgtgaaaacttggtttaacccttggtattcattttcttagctctgtcttccgagatagaatgcaagccatttgatattggaccctcttaagcatcttttcttcagtgccttgccaaacttacacaccatgccacaaataataaaatacatttgattctgataaaggttttgactgaaactgcattgactttatagatttatcttgcaaaaagaaacactgtgtgtagtctagggtcatgatcatctaatgtacacagacatgccgagaactttcctgaataagagtaaacctgaatttgggaggttctaaagatgttcctggttcttaggattttccacaagagacaattcaaattggatcctttcttcttaccattatttttgcccagcttgtcaaaaacttacacaaacctggggagagagaaacccaattgaaaagtcatctccatcagactggcctgtggacatgtctgtggggacatgattgtgagtgctgatgatgtagaaggacccaacccacttgtgttgctgggcagtatagcccaagctgtacaagaaaagtagccgagaaaggcaggagaagcaagccaataggtcgtgtttctctacagtctctgcgtgactttccctgatgttgaactataacctataagtcaataaaccctttcttctccattgaaagaaaaagtatcagctcaggaccctcaagaccaagttctcaagacaaaggagatttctttgccacagagggcagggataagagacaaagacaggagatagaggatgagggagaagggaagggaacaagggaaaggggagaaagaggtaagggagaaggggcaggggtatttgtcccagagtgagacaaaggactgcttctggatagagaagagacagatgtggcacttagcaagatggcacttttcccctaacaaagggaaaccttcatgttaggatgaggtattgaagtttaattgagcatgataattaggcagccaaagaaggcttttgattgttgggcttcagtactttggtaggtggaccttagtagtcaacctcaggaggaggatcaaataaaggaataaaccttgggagctagcattaggaatgtaatctaacagcttttagcaaggcagagggaatgaggaagaaggatgaagccttccagcaccgtgctggccatgctcgatggctacacttgccaaactcaccatgcttgccactctcctcattcatgagctagtcagagttggccctttacccatgttactttgggggcagtttttgttttggtttgttttgttttggtttggtttggtttggtttggtttggtttggtttttcaaatcagggtttctttgtgtagccttggctagacttggaactagctcagtagactaaactagccttgaactcacagagatctgcctgtctctgctggtattaaagtcatccatcaccaccacttgacctgggccagtattttattacagcaacagaagggcaaatctgaacacgccttcctctgatccttgtgacctctgctctttccccagagagttcctgtgagaataagcgggcagatctggtgttcatcattgacagctcccgaagtgtcaacacctatgactatgcaaaggtcaaggagttcattctggatatcctgcagttcttggacatcggtcctgatgttacccgagtaggtctgctccaatatggcagcacggtcaagaacgagttctccctgaagacctttaagaggaagtctgaggtggagagggctgtcaagagaatgaggcatctatccactggcaccatgacagggcttgccatccaatatgccctcaacattgccttctcagaagcagagggggccaggcccttgcgggaaaatgtgccacgcatcataatgattgtgactgatgggaggcctcaggactcggtggctgaggtagctgccaaggcccggaacacaggcatcctgatctttgccatcggtgtcggtcaggtggacctgaatacactaaaggccattgggagtgagccccacaaggaccatgtcttcctggtggccaatttcagccagattgagtccttgacctcagtgttccagaacaaactgtgcagtaagtctgtgcctcatttgtctttaaggccgccttcattctgtgctcaggtccatgggcaaagagagatgcaccattctttggaggattatacatatattaagcatataattacacaaatacaaaagtagccttaattgttaacagtgtaatggaagaagaattcaggacagaaaacctcagggtctaatctaggccatgttgtttataaagactttcctagggctggtgagatggctcagtgggtaagagcactgactgctcttccaaaggtcctgagttcaaatcccagcaaccacatggtggctcacaaccacctataatgaaatctgatgacctattctggtgcatctgaagtcagctacagtgcacttatatataataaataaacaaatctttttaaaaaagactttactagaggaaaaggtgtgtgtgtgtgcgcgcgcgcgtgtgtgtgtgtgtgtgtgtgtgtgtgtgtgtttgtgtgtgtgtgtgtgtgtgtaggtgcatgcatgccacagctgcttatgtatgaaagtctgaggactatttgcaggagttggttctctgtaccctatgggtcattggaatttaaacttagatcatcaggcttaatgacgggaccctttacttgatagctccaaagggctttgaaatgcaaagacagattgagtaaggacagaataaaggtatcctccaacatgtttagctgacacattggcattcccaaaattggaactcgcaagttggagtaggaataggagcagaaggtggaaatcataatagcttccccatgtgtgtggaagaccagggaatttttgctgcaggatgtttgtttactgacaaagaggctcaatacaaagcaaggactgtgagggctttgaaggctaattcttagaatatgacaaactgcaaaccttatgatatagtgagtgaaaaacaagatgtacttaaaaacattttaaaatttattataataattattattacttattcactttacatcctattcattgtttccctcctggttaccccctcccataaccctacccctattccttctccccttctcctctgagcacatgggggtcttcctggggatccctcccatcctggtatatcaaattcctataaggctaggcacatcctctcccactgaggccagacaaggtagcccagctagtagaacatatgccatgtaaaggcaacagcttttgggatagcccaggttccagttgtttgggactcacatgcggaccaagctgtatgtctgctacatatgtgcagggaggcctaggtccagcccatgtatgatcttgggttggtggttcagtctcagagagccccaagggaccaggttagttgaccctgttggtcttcctatggagttcttatctctttagaggccaaaaccgttcctcctgtttttccatgatagtacctaagcttcattcactgtttagctgcgggtgtctgtctctgtctaagtcagctgataggtggagcatctcagaggaagccccccctcaaaattaaaagtaatttaatttcttttcaagataaggcttctctgtatagccttggctgtcctggaactcacgctgtagaccagcctcaaactcacagagatctgcctgcctttgccccccaattgttgggattgaaggtgtgtgctaccactgaccagcttaatttcttaaattcttttgacacaaagtctcaataatccagattgttttcaaactctctgtagtggggaataaccttgaattttattattgttgttattattatgttccttctaactcccacatgccaggattacaggcgtgtaccaccgcaatgaggatgaagtctagagcctcatcactccggacaggcactctcctgactgggctacactcccagccccaagtgtacttttgatgtatcactaaaaaacaaaaggaaaaaaaaaacttgcaaaccttgcaaaaactaacttaagcaaagactccattttcttttgactccagagtcaaatgatttacttaagaaatcaatgacatgaaagaaaaacaacctttttttctgagcagggtcagttggaaaccattcagaggcaccatttccctagcatcacagagaggcttcgttattgtggtgcaccgtggcctaagtcaactggaaaacttcaatcagtagaacacactgcaaacattttaaaggtttatgactttaaatgacttcagcagaatttatgttccccctttcctggaaatattaaaaaaaagaaatcggttccgtaaccctcttgtcagcttcttcgtgtgtattggatggttttaatggaggagtgccttttataagcactctgcagtcatcagcaaatggaaagataatatgataaggcagaagagctctatgacatgaatgacccccatgtgacttgggctcagagaaccttttttctctgtgtgctttagacacgcagcaaatttaaaaggctgtttggacaccccccaccccaggctccccatcatctttgtttaatctggaagctttaagaaaacactggtattatctcattcctttgtgcagcctgagaatcccctgggactcttttcatgcactctgctgaagtgcagctgagctcccggccttgcaccaccaggctctgctgagcagcttcatcagctctcttgaaaggttgaggaggccctagagcctctttatcaaccacatgctgaatacggcaatactaatgcccattaagcactttccccgtacacctgatgcttgtgaaaccaggctacatggtactgtaccagtatgtctgtgtgagggtgtcaaatcccctgggactggaattacagacagttgtgagatgccacatggatgctggggtttgaaccctgatcctttggaagagcagtcagtgttcttaaccactgagccatctctccaaccctggccttacaggttaacaaactttgctgattccaaagttcctgttctccttcacaggccaagaattataaattcctgtcttaaggtgaactatttgctaagggcagcctgcacagggaaatggctctgctagtgccattcatctgaagaaggtaaacctggtaagtgacccctgtgttgtagaactaggacaggactggctgtgtggtgctgggtgagagactggcagtgtgaccgactatgtgacaggatgagcttggtccttgtaaggtagggcttttataagctggtggatgtacagacaggtttaaataacctgtgggccccattcagtgtgtgtgcattactacagtcagatactctccggatgcacatgtgaggcaactggctttacttctcatctgcagtctgacaaccagacacagccatgagcatcttctgaactgcaaatgacatcttcaggagcaagtttcatttgctcctgaaacattgaactgcaccctgatggccataggcggtcatgtctcatgttaggtacattctgtgcattgttccatttaatactaaagctgtattcccagacaggtattcttgtggtgcccaagtacaaaagtagaaactgaggcttggagaaaaataaatagttcaaacaccagcttccgagattcagagcctaagtacttcctctccacgcatgagcctcaggactgttggaaagatgttctccttatagaagaatgggtgtggacatggtgtgtccttcatagcccaggatagctttccagacgaggacctcatcccaaagagcacctgggtctgcctgggggctccaagaaagcctttaaagtgaaacaataagattaatcactaacagttgctgttatcaatatatccatgtggctaagactgacagaacactcccgtaatctatacacttgaggttgaggggccaaggagatgtctcagagggtaaagacattgacatagaagcctgataccctgagatccatccccataactcacagaaaaagctggaggcagtggtgagatgaaaagccaagactggagaactgacaagaagttccagcaccagatagcctgaagtacacacagcacagcagtgataagctggtcagggaggatccactcctaaatgctactgtgacctccaaaggacacgttggtgtgtgtgtgtgtgtgtgtgtgtgtgtgtgtgtgtgtgatgagagagagagagagagagagagagagagagacagagacagagacagagacagagagacagacagagacagacagagacagagacagacagagagaaagacaaagagagtgagcatgagtgagcactcatacacagaggcaaaataaaaagacaaatgtttttaaagaggctgaagtaggaggatctagagtttcaagttagcctagtctatataggaagaccctggccaacctgagctacaaaagagaaacctatctcaaaggtgtgcatatgtgtgcctgagtgtgtgtgcatgctccatggggctctcagcagaagtaaaatcattttattaacacaacaaacatgagaaataagtattcttaaaactcaggaaaaaatgaaagacttaaagacttctctgccttgcccagggtcagtcagctctaggtgagtgaagggtagccaggtgttctggccccaaagctacagctaaaccacaatnnnnnnnnnnnnnnnnnnnnnnnnnnnnnnnnnnnnnnnnnnnnnnnnnnnnnnnnnnnnnnnnnnnnnnnnnnnnnnnnnnnnnnnnnnnnnnnnnnnnnnnnnnnnnnnnnnnnnnnnnnnnnnnnnnnnnnnnnnnnnnnnnnnnnnnnnnnnnnnnnnnnnnnnnnnnnnnnnnnnnnnnnnnnnnnnnnnnnnnnnnnnnnnnnnnnnnnnnnnnnnnnnnnnnnnnnnnnnnnnnnnnnnnnnnnnnnnnnnnnnnnnnnnnnnnnnnnnnnnnnnnnnnnnnnnnnnnnnnnnnnnnnnnnnnnnnnnnnnnnnnnnnnnnnnnnnnnnnnnnnnnnnnnnnnnnnnnnnnnnnnnnnnnnnnnnnnnnnnnnnnnnnnnnnnnnnnnnnnnnnnnnnnnnnnnnnnnnnnnnnnnnnnnnnnnnnnnnnnnnnnnnnnnnnnnnnnnnnnnnntcattttattaacacaacaaacatgagaaataagtattcttaaaactcaggaaaaaaatgaaagacttaaagacttctctgccttgcccagggtcagtcagctctaggtgagtgaagggtagccaggtgttctggccccaaagctacagctaaaccacaatgtgctcagatgggaagaggagtagtgttctctggtcagggctgtgtaaggagggtgatcaccatgctccgagctcagaatgatgatatttaaagtctgttttatctcgatctctgtctgtctgtctgtctgtcatctgtttatcatctatctatctgtctgtctgtctgtctgtctgtctgtctgtctatctatctatctatctatccatctatccttctacatgccagtcctggtcctttcactggtttcactccccaattagggcagtgaatcacagtttgaaagtgatgttgaaacccaacaaaagaccagactcctgtgaaccaaggtcctgtgtgcaagctgaccaaaccccacacatcctggcatccatttttgttgcccaggagcagaaaacactgactctcaaggttgaaaactgcaagtcttaaggttaaataaaagtctgtgttttgaaatctggtgactcagcatagcttggctagggctgtgtttgcttaactctatcgtgtctgttttatcagcccagagcaaagctgttcctaccctaacagcccctttatacttaggcacagcttaaggcccaaatcgtgttctgaaggcactcctcgcgtctgggaaaagtctacattgatttcacccctttgaggctctattgtgaaacagggaggcaaacctacatagatgttggcttatatattctgcgattgttcccatcgagaccctcagccagccacacagaacagaatgttcatcttatcattcatacatttttaaaaaaaaaacagatttctcaagcaaacttgagtgtggtggtgcatacctacagtcccagcatgcagggggctgaggcagaaggatgataaattttaggccagtccaggctacataggaaaactcttttacaaatcaaaacaagcgaccccacttcaaaaaaatagctacttattctttcctttcctccccacctcccttctctctctatctctgtgtctctgtctctgtgtctctctgtctctctgtctctctctctctctctctgggctctctgggctctctctgtctctctctctctctctctctcaaatatatacgtatttgagataggacctcattacataggcctggcttgtaagtcacagatctgcctgcctctaacttctaaatgctgagattgggcatgcacacacacacacacacacacacacacacacacacacacacacacacacattcttctcttaggccagtctaggttaaatgagtcattttcttaaaaaaaaaatttcaaccaggatggggccaatgagagggatataaagtgaatgagtaatatatgagtaattctaaacaccacaacatttaataataaatttattaaattaaaaaaatccagtcccaggggctagagagatggctcagcggttaagagcactgactgctcttctaaaggtcttgagttcaaatcccagcaaccacatggtagctcacaaccatccataatgaaatctgatgcccttttctggagtgtctaaagacagctacagtgtacttacatataataaataaataaatcttttttaaaaaatccagtcccaatactgacttagactagtgacttattatttcttctgagtaaaaaaccttgctcgagcttaaacctggtactttctgaggaatggagctaattggctcacacagttcttcagctcagtgaaggaggcagaatgctgcttccactttaacagcacagcaaaggtgagcaggcaagagacccagatgtacgcaggggcactcagccataggactccatagatgtacagtttattctgttctgtaaaatatttgaggttcttttggttgaaagtgatggaaactcaacttgacttgggtgttgtggctaattacactggagccaatcttggaggaataactgtatgccttctggaaaaatgcatttgagcatgctcattgcatctgtgtaaagatgaaagactggaaactgtccccatgctgaccaacaggtaaatgtctaagtaggttgagacaaatggatgaagacatcagtaggcttcagccagagccaggtaattaaattcaatcaaaaaggttagttaagttagagtttacatgtgagattaaatccaagatagaattgttttacattgttcaatgtcattttgctccatgaagtcactgtaaacactgaattaaagcacatggaatcatttcctttatacaaaatacacaggcaagatcagttgcaatgagcctctggtaatctgacactttcgtagcgggtcaatatataatctattcagagacaacaaaattaatatgtattgctgactcactaaccttgagctcatggccatcaaagaccctaaatcattctaggatggaacatgtcttaatatattcattttcctaagagggctttatcatagctttttttttttttttttacttagtgggtcatttcaaacaggaaaattacctacaaaacccgcaaaaatgtcaaaaacatagtgctgcctggactatgaaagcaacaatttgctatcatatgaagtagaagattaaaggaagcaatgctgccttgctcaacacatccaagggcatcgagaccaggagacaaactactgttacctcttagtacctcaggaagactgggaaagcgccgtatggctctggggttacaagtacagctcagtgaccaggagagtctacaaatatggaatctatcagtaatgaggatcaagcttatatggcctctcattttaatatctttgaaattagagcacattttggatcctgtaaaatacagtgcttgtgtcagtacagatagaatttgtgattaatgttgaatgaaaattgaactggatggttagacagacagacatatcaatgattgggtatacaaagagacaatattcccaaatgtaaaataaatgatattataatggagagatggctcagcagttagaaaactggttgctcttccagaggaacttggttcacttcccagcactctgtgctcaatcattgtaactccagttctagaggactggatgccctcgtctggccttctcaggcaccaggcatgcatgtggtgcacagatatacatgtagtcaaaacacatagaataaaaataaataaataaaaatcaaacagcatgatactttccttttgctgtgaaatggttaataggtattaagccctccccagctcttgatcaccattccggcctctttatcaggttaactcagttaactctcacaaggccctgatgaggttagtgtaatgtttagcttcacttaacgcaaagatattaaaatttctcaggatcacaaaaaggtcaactacttcagcctgtagtataaatggtaaggttaaacctgcaacttcccttatgtgatctgtgtcctaacaggagttatgagctcagaacaataagttctaaattgtgctgttataaaataaaacagtttcattcccctatctcatatattgctgtcttagagtttctattgttgtgataaaacaccatgaccaaaagcagcctacacctctcaggtcaagaatcatcactgaggggtgtcaaggctggaacctggaggcaggaaggaagcaggggccatgaagcaatgatgcttactggcttgttcctcgtcttgtctcctttcctttcctttcctttcctttcctttccnnnnnnnnnnnnnnnnnnnncatctatccttctacatgccagtcctggtcctttcactggtttcactccccaattagggcagtgaatcacagtttgaaagtgatgttgaaacccaacaaaagaccagactcctgtgaaccaaggtcctgtgtgcaagctgaccaaaccccacacatcctggcatccatttttgttgcccaggagcagaaaacactgactatcaaggttgaaaactgcaagtcttaaggttaaataaaagtctgtgttttgaaatctggtgactcagcatagcttggctagggctgtgtttgcttaactctatcgtgtctgttttatcagcccagagcaaagctgttcctaccctaacagcccctttatacttaggcacagcttaaggcccaaatcgtgttctgaaggcactcctcgcgtctgggcaaagtctacattgatttcacccctttgaggctctattgtgaaacagggaggcaaacctacatagatgttggcttatatattctgcgattgttcccatcgagaccctcagccagccacacagaacagaatgttcatcttatcattcatacatttttaaaaaaaaaacagatttctcaagcaaacttgagtgtggtggtgcatacctacagtcccagcatgcagggggctgaggcagaaggatgataaattttaggccagtccaggctacataggaaaactcttttacaaatcaaaacaagcgaccccacttcaaaaaaatagctacttattctttcctttcctccccacctcccttctctctctatctctgtgtctctgtctctgtgtctctctgtctctctgtctctctgtctctctctctgtctctctgtctctctctgtctctctctctctctctctcaaatatatacgtatttgagataggacctcattacataggcctggcttgtaagtcacagatctgcctgcctctaacttctaaatgctgagattgggcatgcacacacacacacacacacacacacacacacacacacacacacacacacattcttctcttaggccagtctaggttaaatgagtcattttcttaaaaaaaaaatttcaaccaggatggggccaatgagagggatataaagtgaatgagtaatatatgagtaattctaaacaccacaacatttaataataaatttattaaattaaaaaaatnnnnnnnnnnnnnnnnnnnnactctaacttgtgttagagtcattggctgcaacattccttacttaaatgcagagacgtgtatatgcaaaagtagtccatcagtagctgagtttccctacctactggctaaacacaggattgctcttacatttctcttttattgtataagcttcagaaagctattttctcacttggacatcttttatttatgagaacacttatataatgtgttctgttcacactgatgcctgttaattttaaatatgctcaacttgtactagattgattaaagtcataaattgagatgttaaaaaacagcaagaattgcaagagctccaaatagatttaataagaacctatgtggccgggcggtggtggcacatgcctttaatcccagcacttgggaggcagaggcaggcagatttctgagttcgaggccagcctggtctacaaagtgagttccaggacagccagggctacacagagaaaccctgtctcgaaaaaaagaagaagaagaagaagaagaagaagaagaagaagaagaagaagaagaagaagaagaagaagaagaagaagaagaagaagaagaagaagaagaagaacctatgtatctgaagctgagatgctttcagaaactaaatgcagcaatatttaaaattgagatacaaaaatcatgacattataaaacatttgaatacagtgttattccaaatttttgtatacttcatgcagacttgaaagtacgtagttcttagaatttatgatcatgggaggctgttggcttctaacaccttcatttgacgggtagctctccttccaactccacttctgcctactcaacgcttcttcttactaaagacattctggaatcagaaacttctctgatcttctctgcctgtcaaaaggtgttaagatgaacctggaatttgtggatttgtaggccaaaaaccatacagaataagcaatgtcatatagttcaccctaacatcattcctctttcaccttacgtggtcctttatttatctgactgtcaactttagacagagaacctccctgctgaaagggacgtcagattctatcgctttgggttcaagcctcttcttcacatgctcgcaatgcatatttgctgcacagactgaggctaagggaaggtgccactgctcacccaccttctttgtcttcctttgcagcagtccacatgtgcagcgtcttggaacacaactgtgcccacttctgcctcaacacacctggctcgtacatctgcaagtgcaagcaagggtacattctcagcacggatcagaagacttgcagaagtaaggccactttgctgatgtgtcagtgttgcttgctctttagctaggtgtgtctttttttttttaatgcatgcccatgtgttataattttattcagccataaggaacataatcatgtcatttgaagaaaatgaatagaactgaaaagcatcatgtcaaacaaaataagaaaataagacatagtatactacatgctttctctcataagcagaatatatatatatatatatatatatatatatatatgtgtttatgtttctgacattccaaacattatcaaacattatcttttcacatgacaagaagatatctgcaaaatagcagtaagttaaaccaacttgacaactgtgcaaaatttttttagctaggtgtgtcttattcacccatagtccctctcccaacctacctgccacctcctcagagctggaaacagcttttgtatttcccggtattaccccctcacccaccacagtgcctaagcctggctcatagtaggtcactaggcaatgtgtgaaaggttggtggagatgctgtctctgagaagcagtccctctcacatctactgcctcttggtggaagctttcccaccctgactttattagctgggccctatggagccatttctctcttttatcttcttcccaaagcatggactaaggatgagatattgacctcagtagtcaagcattgtgcacgccccatcctagagatacgcagggatccggctgctttagtgatagacattttatggttctcctaatttaaaaagaaaacaaaaaggacaaacagatataaagcattagaattattagaacttatggtgttcttctctggcccagttcccaaaactagacaacacactgatatttaagccagcaggaggtaccctggcctttcgggaattaaccatatagtaagtgtatgcccatcctcttcttcctcctccttgtcctcctccttctccttctctgtaagttgtaactataaccactattttaaccacatacaacccaactgagcacacaaggcctgggaagactggctgcaaggaagcgaagagaactcagctaagtctgacgtgtagttcatgcaatgcaaaattgttacaataccacacggagagcaattaaacgctaatggaaagcagtttgcacaaatgtctgtaattagcactgcatttagaaagccaaaccacagtttccacttctcgtctcacttcttgttttcagcactgagcagttaatggaaggacctccctgtcccactgtcaacttgattctctgttctggggctcctctgtgaccccaggactcctggaacctttgacactccctcaggttccccagcagaagtcagtcacagcaaatattcacaggtttaacagaattcgctgacaagccagggagtctggaagggtcatctagaatagtctcacacatctcttgttcaccttgtcctcttcaggtgtgttcagccatcatgcccaccccttttctgctttctcctctttgaggagcataaaatattctctgtgtctcatgcccggtgattggctggggcctgggaagctgccagtgcctattttctatgggctggcttagccatgccagatgaattctgacaccaataaataaataaattaattaactaattaaactaaagagcttttcttccttcaatttcacaagcagtctttgtcagtcctgcccagcccagcataggcctggtattcccagactcctctcatcctgagggaagtgcctaggcttagggaaaaaaggaaggacccaagcagagctctgcctagcactgtggcatcaaagagctcaaagcagaggctacctgggctttgaacaggcaactaggtgcaggatagggaagtccactaaaggaaggacagaagcctagagtaaaggctcttaaattcaagagtgacaaatggatcagagagcaactcccagagtcctcggagactccaactctacaatccagtgtctccctttgtttgtcctttttcacaaaaagatgttgattttactttatgtgtatgcatgttttacctgaatgaacgtctgttcacagcatgtaccacatacctgtggaggccagaaaggatgtcagatcttctggaactgaatttatagatggttatgtgctgccacgttggttctaagacccaaacttgggtcctctgcaagaacaaccgtgctcttaatgctgagccatcattccagcttcctcttcctacttctctcttcctcttactactcctcctcttactcttcctcctcctcttactcctccccctcttactcnnnnnnnnnnnnnnnnnnnnnnnnnnnnnnnnnnnntcccattccttcacctccccaaaacatactgttatttataattacaggtgtcatagaagccaaaggtattattttcactgtgatctagagtggttgcgagccaccttatatgggtgctgtgaattgaactcaggtctttgacaagagcaatacatgttcttagtctctaaattatctctccagccctcctcctttttttgacacttagtttcactaagtgagtgaaactagaagcctctgtcctcttgagtttgggggtttcaggtttagtttcagagagcttctgcccgattgtttctgccctttgaggtcctataaccttgggcagtaagggtttggggaagtgtctagccaacactaagttaggggaagttaggggagacacacttggaaaaatgtggctgctgagccttgtcttctgcccaggcctagttatcctgagccattaccagaaccttcagcaccagaggtaaaggtgcacacttccttctcagaagcaaatcatactgtctcaactgaatttctgaaatggggtttgtgagactaacagggccattgtcgtccataggtttcaatttggaccctgacattatcatcttcaggttgtggctgcctcagccagacctgcttacttaaactctttgaccctcagtttcctcactcactaaatgggaacaatgatcacaacactgggaacttacaccgctgtttgaactacgacaatccatgtgctgagcccttggtgacaatggctgtgtgaaggctaagctgaaccagccagacctctgtctacatgctgcctccctgctgacactagtacaagactcctgggtgaaatgagacacagctacgcaccatttgattaacatcccactgactgttaatcctccatgccgttggctgtacacaaaatgtgggaaggtccctgagccactgccttgccacacagacacacattacagattaaagtatactttccttgctgctttctatgtatactctgcttttgtggagagaggggacagtcataggtgattcatagattcgcagagtgtcatggacatccatctcaaagtactagctccctttcccatgcaaatggagaactttctatctcctgtggtgtccaggtgagaaatggatctagagaagccaattatgtactgcaaagcacctggatcctagacaccctgtgttatcatgtgagctgaaatcttattctggcatttctacttttgatcctatttgtaccctctgaagccttactctagatacatgaataacctttcaggtatggaaaactattcatacctgatccaccctgggccactaatgtctctttttcagaggatatataacctcattttaggtgacctggtttggggcattttgagcgtctaagtaacatcagcttagtgaacaccaattattgcaaagtcccctcccattcaaaactagatcaaatgcattagagctcactttctgagttccactcatggaatggtctatattgctgattctttatgcctttcaaagggctttccctacccagcattatcatatgagacattgactgtaaaagtacttttatttgcctgaagtaattgttgtcttgaaggcttactgctgagtaagctcaccctttctactgctttctgaactctggctggtagttctactcagctgttgtagctcaaacatctctgtaagctgactgactcaatctgacttctctttgcttctcgctgaattgctctgcttggactcaaactaactctggcaatctgttctaatcttttggcttctttttattctctggctttatctttcccaactccactacactgcactcactgcactgactctcagctgactgactctctgtactgctcttgagtagcctcccttttctgcctgttctcatgagagctgggcatttcctatctctgacttattctgtcaaatctttctctgattcatcatattgtctgcccttcaattagatgtcactttcaaacaaggatgtttcctcttactaattaacctcacctacattgtttgggattaaaggtctacactaaggacatgtctgtattccaggtagaaggatcaaaagtatgtggtgtatctgtattctgtatggatcatatagacctagaatgtctctggatgtgatcagagctggattaaaatttgtctgcaatttatagatgtgttagaatagtgctagagtggtgaacacttaaaaagatatgtatggaaaagcctcatgtgttcctacacacccacatctgctctccatctctgtttgaattacttttccactagtaagacctctttcttcctcacccccatctcaggtttttggaaacaaggtctttctatgtagtattccctggctaccctggaactcactctgtagcccaggctggcctcaaacatgggtcaatctccccactctctgcttcccaagggctgggattacaggtatgtatcatcatacccaacttaatttttttaattttannnnnnnnnnnnnnnnnnnntgctaggaaaacaagaaggcatttggttagagcccagtcttcgtttattcctttgtctttgtttaataagattaatctcttaacagtctcccttgggtcagtacaaatcactcatggtcataaattacgacattctaaaaacagtatgaaagaacagcctcagagagccagctggcaagctcagtattcatggggcaattctctgggactgggagctttccagtccacactgcattctcatgtgtgtctggggagagaaaactgagccttggggttccaggtcacaaaagaagtctgaatactgtccactcagaggatcatggggattttttctttttcaaggggtttggtgattttctgactaccacactctggggattttgaggatatttagcaaacactgctgctgaaattcttcccctgagccagtgtagtttaacagaacgggtgtatcttggcacaactgtaagtaagtgaatttcatggttagtgtggtggaatggggaatggaaaggggagctctgccctgccctgccctgccctgccctgtccttctcctttcctttcctcttccttcctttctttttctttcctttttccccttctctttttttccccctctccttttctcgatgccaatagaatctctcattgggtcctggagcttaccagtcaagctaggctggctcatctatctctgtctccccagtgctggggttacaagcacctgtgtctgactttttatattgccttgggattgaactcaggtcctcatgcttgcctgacaggcactttgctatctgagcatcttccagttcttacatcagtgttttttgaaaggactccagaatgtctaatagacagggccacacagttattccttgcactttgcagagtcctggcctgtctagaaaataatcagcatttcctcatttgctctgtctgttctaagtcgtctggtacaaaaataaaaccacacagtatctcaagcaccttgttcatttgttttgaaatgatacttttaagacagtacacgaaccgggcagtggtggcgcacgcctttaatnnnnnnnnnnnnnnnnnnnncctttgtctcccaagtgctgggattaaaggcgtgctccaccactgctctgctgggtttttttgtttgtttgtttggttggtttttgggtttttttttgtttgtgtgtgtgtgactttaatattttcaactgttgatagtcaacaaacagaacagttattttaagatatacttcgttggtatgtctcccttttcatttttgattttgttattttggatactgtctttgggccctctggtaaatttggctaagggtttatctatcttgttgattttctctaagaaccagctcctgcttttgttgactctttctatagttctttttgtttctatttggtttgattttttgctgtctactcctcttgggtgtatttgcttcttcttgttctagagcttttaggtgtgctgtcaagctgctattgtaagctctcttcagttatttttggaggcacttagagctacgagttttcctcctaccactgctttctttgtgtttcataagttttgatgtgatgtgtcttcattttcattaaattttaaaaagcctttaatttctttccttatttctttcttgatgaagttgttattgagtaaagcattgttcagcttccatgtttatgtgtgctttctgttgtttttgttggtatttaacaccagtcttagtctgtggtgatctaatagggtgtatgggatgatttcaatcttcttttatctgttgagacctgctttgtgaccaattatatggtccatttggagaaggtaccatgtggtgctgaaaaagaggtatattcttttgctttatgatgaaatgttctataaatacctgttcaatccatttggttcgtaacttctgttagtttcactgtgtctctgtttagtttctgttttcatgatctgttcattgctgtgagtggggtgttgaagtctcccactattattgtcctatgtatgatgtgtgctttaagctttagtaaagtttcttttctgaatgtgggtgcccttgcatttggagcatagatgttcagaattgagagttcatcttggtaaattttacctttgatgagtatgaagtgcccttccttatcttttttgataacttttggttgaaagttgattttattcgatagtagaatggctactccagcttgtttcttgagaacatttccttggaaaattgttttccaaccttttactctgaggtagtgtctgtctttgccactgaggtgcatttcctgtatgcagcaaaatgctgggtcctgtttacatatccagtctgttagtctaagtcattttattggggagttgagtccattgatgttaaaagatgttaaggaaaagtgatcgttacttcctgttatttttgttgttagaggtggaattttgtttgtgtagctatcttcttttgagtttgttgaaagattgctttttgcttttttccagggtgtagtttccctccttgtgttggtgttttccatctattatccttttaagggctggatttgtggaaagatattgtgtaaatttggttttgtcaagggatatcttgttttctctgcctatggtaactgagagtttttctggatataatagcatgggctggcatttgtgttctcgtagggtccgtatgacatctgcccaggatcttctagctttcttagtctatagagagaagtctggtgtaattctgataggtctgcctttatatgttgcttgacctttttcccttactgctttgtttagtgcattagttagactggctgtccagtgagtctccaggattacagatctctacctccagccctggaatttcaggtacttctccaatgcttggctttgtatctggattctgggcatctgaactgaggtctcagtcttctgcagcaaacagatatccactgagccatctctcccagcccaggatgcaaaaattctcaacaacattttagcaagtagaacccaaccatactatatataaaaacagaaaaatatgaagagaaatcatggtttatcccattaatgcaaggttggtttaacattcatatgtaattaggtttaacattcatatgtaattaatgtaattcattgtattggtacactagtaaagaaaaataaatgaacttggtagatgcagagaaagcattaatctataaaaattcattccttaaaaaaaaaaaaaactatcagcaagtaagaataaagggaaaatggcttgatccaataaacagcagctctgagaaaaatcagcattgacattacactcctggataagaaactacattctcctctaagaggaggaatagaggaatataaagaagacacccacttctatcaacatggcattgaggacctaattggtataataaagaaagaaaaagaatttagaagccacaaggattagaaaggaaacaacagtgccacctttgtcaggttctgtgattccctatatagaaacactaattgagttttccttcttaaagctactaaactaattaaggagttgagtaagatcacaagatgaaaaagtctactgaattactttattgtatttctgtacactggcacctaaaattggtatcttaaaatactatgtaaaatagaataaaatataagttctggacaagtatttaaaataaacattctcatttgtttgttcttagagacagggttggtttgtgtagaccttactgtcctggaactagctctgtagactacggctggccttgaactcagagagatccctctgcctctgcctccagagtgctaggataaaggtgtatgccacaactaccctgacagtgttatttttcactaaaaactataaaagttttctgagataaattaaagaatatggaagaatatatttatcatgggttagaacattcagtatggctaaattgttaattcgctccaagattatctataaattcaaagtgattcccatcagaaccctccttaagttcttttagaaatcatgtgatttcaaagtattaacaaaaaatgtgtaacnnnnnnnnnnnnnnnnnnnntgtaaaatagaataaaatataagttctggacaagtatttaaaataaacattctcatttgtttgttcttagagacagggttggtttgtgtagaccttactgtcctggaactagctctgtagactacggctggccttgaactcagagagatccctctgcctctgcctccagagtgctaggataaaggtgtatgccacaactaccctgacagtgttatttttcactaaaaactataaaagttttctgagataaattaaagaatatggaagaatatatttatcatgggttagaacattcagtatggctaaattgttaattcgctccaagattatctataaattcaaagtgattcccatcagaaccctccttaagttcttttagaaatcatgtgatttcaaagtattaacaaaaatgtgtaacctaagagttgaaacagtcccttctcagtttttctggcagtgttagttctatgaagtccccatgacactgcattagcaaatattgaatctttgtctaggagaaaggtagggtcaccatactgtgatctccggaccaacattcatcagtaaatttgtaacctcatttttcccatgttgctatttaaataacccttattgtatgtatgtatgtatgtatgtatgtatgtatctctagatagagatagacatagacatagacatagagatagacatagacatagacaaagacaaagacaaagacaaagacaaagacaaagacaaagacaaagacaaagacaaagacaaagacaaagacaaagacaaagacaaagacatagacatagacatagacatagacatagacatagacatagacatagacatatctgacactagatttatagctagtcatgtaattaaccatgcctgatgagagttatctaacatttattttctccatgtacactgtatagccttcttgcactaaggaccactagagagtgcttcaatactaccttggagaaccatttaaacagcaaagtcaccaagaaaatacacaaaaatgtggcactaggtaggctgaaaacaagttgtgcgtttacatgctgaaagtagaaggcagaggagagcagcaactgcctcagctgggagcacatatgttggggacttggtatttgtcctgttccagtgtctgtggatggcagaaaatgacaaagtatggaatttgagtgtaagtaaaatgtttagcaagtaggcaaatttaaaatatgtgatctgagaataaagtgtatttgattaaaactttgaaaaagataaatggaattgtaggtttgaagctacttgcctttaagctatttacagagcagaatataatcaagacaatatatatggatatgtgtataatatcttgccattatcacaaattatgtagataacaattcaaagtgcgtttcaagacataagaataaatgctactaaatatcccagatgaatctatgccacagaccgggctcagtcggcccccctcaatccatgggaatcagggcctcagacagatgggcataaagtcggagaaaatggggtgacaaacagacaggacacaagggagtgtgctgtatctgaatgtaatttgtcaaattgagcatcaaactttttatacagaagaatatagggaagttaggtgacacatcagcaaggtacaaatgaggttactgaatgcttaatgactcttacacaaaacagaggaaaacaaacacaaagcctggcaggaactgggcagtaaaacaactgagacaaagtcagatctatctaaggtcagctatagtcttagaatccagatgtgaggtctttacactcccagggcaagggctttcatgcccaagtcatggtcctaattaaggagttccgctctagctaaccttctcatgaataatgcaatactctaaaaccacagcccaatctacttcctaaaccattgtaaattcctgtatataggagcgacttggcttttattctaagtgatagtgtgtgtgtgggggggggactttctactaataagtaatgtagtctgccgtacataactataataaggactctaaacttactttgctaaacttgctctgagatttctaactctatgtagtagatagtaatgcctgatttctttcacaatctctcttacaatactagaggcaattctgaatgtcactgaataggcaacattcttactgaattccaagcccagggttggctcaaggactacctagggcattggtgaaagccaggaagcaaagttcggttttgcttgggtatttggcaagacattgcttagaggcacctataacaaaacaatactggaaggaagcacacagatccattcacaaggataaaattggagcatacatgctgtggaatgccacagttccaagagactaagtttccgtgaaactcttcgcctcagggctccatccagacttttggcctgtcatgcgtgtcactactggagtggatgtagcaaatctataggaaaatattgccatatttggcaaaaaattcttaagacttaaaagaaaaaaaatcagtaaattttatcaaaattcattgatctctgaattatattaccactaaaaagaaaagacaaactaaactatgataaaacatttgcaaaacataaccaacaaaggatttcaaaatatataaagaagacaaaacaaccctttaaaaatagaaaaagaaaattgaatagacactaaaccaaagacagcatagagctgaggtgtagttcagtgtttgcagaatgcttgtacagtgtgtgtaagactgtgggttcaatcccaggactgaaaatcagtccaaaaatggcatatagataacaaagaagctcatgaaaaaatgctcataactagccagtaggaaaatgcgaactcaaaccacactgggtaccactacatactaactggactagatatatttttaaaagattttccttttctttttctgtatgtttgcgtgtgcacatgtgcatgtgtaccatttgtgtatgcatactcttgtataccagaaaagggtcctggatcccctaaaactggagttacagacagttgtacaccacccagcatgggtatgggagctgaatctgtcattctgattcaaaccaccacacactgcttataagaatgtgaaatgttttaccattttagaaattattttagcattttttataagcttggatgtgtacctaatatgtttacctaccattcacttggatacttacccaaagaagtgagttgtgtctaaagatctgagcacaaatgttcccatgcacttttattgcaataatcctactctggcagccatacatgctcctcatctggtgaatggataacgccctgcactcaagcacacactgcaatactacacagcaataaggaatgaactccacaggcagcagccagcgtgcctcagtataaaccttctgcatgaaaggaactagatgctaaaataggatacttgctgtaaattaaacaaagtattcctatcctatcccatctagcttcacatgaaggagactcagactatgattgattgattgattgattgattgattgactgatgtagcttttgctcaattactgggggttaccccctaatctaagtttctaatggataaactggctacttcctgactctgctccccaaatacttgctgtttgtgtttcttctgggctatttctgctccagcagtcggttgcagaggagagagcagagagtgagggcatttcactcagctttgtgctccccgctccatcacacctaatgaagaccttctgtgctctccttccctcctcttgtctcctacctgcaaccctcagccaggtaaatggaactccacctacttctaatctccccagccaattctatttacccaatagctgtaaattggggggcaaagtttacattgcatcacttggtgagtgaggagctgttcatgaggagagggtgcaactagatcttggggccagtgtttagcatttgaatgcatagcaacaccagaccaacccccagcaacttgctgtgtcatgctgacagagggcagatcagtggttaccctgcgaccaagaagaggggcagggggaggagttataggatgaacaaggatggtcacatttggtaccttgactttgttgataatgtgtagatatccccagtttatcaatttatacatttttaaaagatttatttattattatatataagtacactgtagctatcttcagatgcgccagaagagggcatcaggtctcattacggatggttgtgagccaccatgtggttgctgggatttgaactcaggaccttcagaagagcagtcattgcttttacccgttgagccatctcaccagccccaatttattttttactgaaatgcgttttttcctatgtagtccgacctggtctcatactcagttcttcagcctcagcctccccagcagcaggctgcactgccatggttgcttgactttccatttaatgcagtttgtttctgtcatttacaagtcaataaaaccagaatccgtaaatcagaatgagagctctgaaggtaagcagtgctccaagtgctacaagcaaaagagattatagaaagagtcttggaactggaccaggacacatgtgaaagcagttggaaactccagctgggtctttggacatgcgtgtcaagggcaaagttgcaattagtcttgtattttaaagtcaccgttggatctgacattagtgtttatgctgtactagaaggcaactaatgattcaaagatgccattcatttatacactccctatgggatcctttctgtgggtgagcactcttcctgggcatttctcttgtatatgtgagacttaagaaactcacattttagcttcccctatgctgcacacacagtgcaagatatgaaggctataatcagtttataattctgatcaatttcaattcagtgtgcattctttatgcctgcagagttatcgagaccacagcaatgatttgtcccaaggatgactttttgacataaagtggggtgagtgggcgggtagtagtaacaagactgacataattcttcacagagaaacacggtttcgagagcaaactacagagtccaggagctaagccacacaagtgcctagagaaggaagattatcactgaagggaaagcctaagcagaacaggcttgtttagtggtcaggagaggggtctggggagagacagagaggcagagagaaaagagacacacagagacagagacagacagaaagagagagacagaggtgggggagggaggcagggagggtgagcgaacagggcatcaactgcacaagtcagctaacccagctgccactaagagcagctgtgtagagagaggacttgctgagaagtaaatccagtcacccagcttcttgctactcctggctgctgagcctagagtttagagatcgtggtgtgtatcatttgctcactctctgcctgtgtcagggcacagagttaaaaacagaaggaatctggagagagaaaggccccgtgggagaactgaactgactaaacatgaagcaataatagtttagaaagaattccacacatggggaggtgagcctaaaccttgtgctacttttaagtgttccagtctccacctgcctagacctgataaaccaggacctccctgcagggttcacaagccacccgtggattctaatgtccgttctatcttaaagccctttgacccagacctttaactctcactcggaagctcgctgagtctacacgcaagggcacgagagcgtgcgtgcgggatgggataactttaaaaactaaaaaagcattgctctcccacaatgaagtattatttcatatattgcttcattnnnnnnnnnnnnnnnnnnnnnnnnnnnnnnnnnnnnnnnnnnnnnnnnnnnnnnnnnnnnnnnnnnnnnnnnnnnnnnnnnnnnnnnnnnnnnnnnnnnnnnnnnnnnnnnnnnnnnnnnnnnnnnnnnnnnnnnnnnnnnnnnnnnnnnnnnnnnnnnnnnnnnnnnnnnnnnnnnnnnnnnnnnnnnnnnnnnnnnnnnnnnnnnnnnnnnnnnnnnnnnnnnnnnnnnnnnnnnnnnnnnnnnnnnnnnnnnnnnnnnnnnnnnnnnnnnnnnnnnnnnnnnnnnnnnnnnnnnnnnnnnnnnnnnnnnnnnnnnnnnnnnnnnnnnnnnnnnnnnnnnnnnnnnnnnnnnnnnnnnnnnnnnnnnnnnnnnnnnnnnnnnnnnnnnnnnnnnnnnnnnnnnnnnnnnnnnnnnnnnnnnnnnnnnnnnnnnnnnnnnnnnnnnnnnnnnnnnnnnnnnnnnnnnnnnnnnnnnnnnnnnnnnnnnnnnnnnnnnnnnnnnnnnnnnnnnnnnnnnnnnnnnnnnnnnnnnnnnnnnnnnnnnnnnnnnnnnnnnnnnnnnnnnnnnnnnnnnnnnnnnnnnnnnnnnnnnnnnnnnnnnnnnnnnnnnnnnnnnnnnnnnnnnnnnnnnnnnnnnnnnnnnnnnnnnnnnnnnnnnnnnnnnnnnnnnnnnnnnnnnnnnnnnnnnnnnnnnnnnnnnnnnnnnnnnnnnnnnnnnnnnnnnnnnnnnnnnnnnnnnnnnnnnnnnnnnnnnnnnnnnnnnnnnnnnnnnnnnnnnnnnnnnnnnnnnnnnnnnnnnnnnnnnnnnnnnnnnnnnnnnnnnnnnnnnnnnnnnnnnnnnnnnnnnnnnnnnnnnnnnnnnnnnnnnnnnnnnnnnnnnnnnnnnnnnnnnnnnnnnnnnnnnnnnnnnnnnnnnnnnnnnnnnnnnnnnnnnnnnnnnnnnnnnnnnnnnnnnnnnnnnnnnnnnnnnnnnnnnnnnnnnnnnnnnnnnnnnnnnnnnnnnnnnnnnnnnnnnnnnnnnnnnnnnnnnnnnnnnnnnnnnnnnnnnnnnnnnnnnnnnnnnnnnnnnnnnnnnnnnnnnnnnnnnnnnnnnnnnnnnnnnnnnnnnnnnnnnnnnnnnnnnnnnnnnnnnnnnnnnnnnnnnnnnnnnnnnnnnnnnnnnnnnnnnnnnnnnnnnnnnnnnnnnnnnnnnnnnnnnnnnnnnnnnnnnnnnnnnnnnnnnnnnnnnnnnnnnnnnnnnnnnnnnnnnnnnnnnnnnnnnnnnnnnnnnnnnnnnnnnnnnnnnnnnnnnnnnnnnnnnnnnnnnnnnnnnnnnnnnnnnnnnnnnnnnnnnnnnnnnnnnnnnnnnnnnnnnnnnnnnnnnnnnnnnnnnnnnnnnnnnnnnnnnnnnnnnnnnnnnnnnnnnnnnnnnnnnnnnnnnnnnnnnnnnnnnnnnnnnnnnnnnnnnnnnnnnnnnnnnnnnnnnnnnnnnnnnnnnnnnnnnnnnnnnnnnnnnnnnnnnnnnnnnnnnnnnnnnnnnnnnnnnnnnnnnnnnnnnnnnnnnnnnnnnnnnnnnnnnnnnnnnnnnnnnnnnnnnnnnnnnnnnnnnnnnnnnnnnggtttctctgtgtagccctggctgtccaggaaactcactctgtagaccaggctgggactcgaactcagaaatctgcctgcctctgcctcccaagtgttgggattataggcgtgcaccaccacgctcggtttatttgattttttttttctaacaagtggtagttctttttttttttttttttttaaagatttatttattatatgtaaggacactgtagctgtcttcagatacaccagaagagggcatcagatctcattatgggtggttgtgagccaccatgtggttgctgggatttgaactccagaccttcggaagagcagtcgggtgctcttacccactgagccatctcaccagccccccaagtggtagttcttaaccacgccttactccctgcttacaagatagtgttgctggtccctcattatatacccaccagatagtcagtatttaaccatctgtctagggaaaaggctctggtttacagtgttttccagtttccctggtataaacactctaccatggccatttcaagctacctatgtggaagaaatgccagtcaactccagcacaccaaagaatcccttactagattctcagtggaatttttttccttacatcttttctgatccatttgattcactattgttttccttacacaatgaagaatgttcttgaatgaacaagtggaataattctgtcattcacagaaattccttcacagaccacatgccaggcatcaggctgagtagttgagcttgcggagtctgctcctgtgtgacaggcaggataggttcatgttatttacaaattaagcattaagttagaattgttgtgagaactatagggggaaactgtgagggagaacttgacaaatgcaactgatgtctctttggaaaatacactttaaaaaatattatatatgcactctgtcttcacacacaccagaagaggaactcagagccccttctagatggttgtgagccaccatatgaatacagggaattaaatccaggacctctggaagagcagtcagtgttcttcactgcctagccatctctctgcccctcataaaatatactttaagatgtatcctaaaggatacataaaaattaggtaggtgaaaagcaggcaaggaaggggtataaacatttaaggttaaaaaaaaaaaagagcaacatgttcagtcttggagcatgaaaaatcttgatttgaaggataaagaggggaaatagagaggcattaactaacactgaagagtagccaggaattgtatagtactctacctcgaattggatggttgggatatcacgctagagcatcaggaagccactaagacagttaagcagaggagagaccagagggagttgctgcaagatcctgaggatgaagtctttgaacaggcttctgaaagagatgatgcttgactgatgtctcaagccatacttgggtcaccaggcaaagaaggcagaaggctgtgccagggtaacaggaactctgaagccaaggtctcttccatacccagaagtgggtttatcactcttcagtgaagtcctccaggccttgagggagaaagttgtttttcaaaagcataaggaattgtccaaaaacttttgtacttttttgtcaaatggaagtgttcaatgctaggaaaacaagaaggcatttggttagagcccagtcttcgtttattcctttgactttgtttaataagattaatctcttaacagtctcccttgggtcagtacaaatcactcatggtcataaattacgacattctaaaaacagtatgaaagaacagcctcagagagccagctggcaagctcagtattcatggggcaattctctgggactgggagctttccagtccacactgcattctcatgtgtgtctggggagagaaaactgagccttggggttccaggtcacaaaagaagtctgaatactgtccactcagaggatcatggggattttttctttttcaaggggtttggtgattttctgactaccacactctggggattttgaggatatttagcaaacactgctgctgaaattcttcccctgagccagtgtagtttaatagaacgggtgtatcttggcacaactgtaagtaagtgaatttcatggttagtgtggtggaatggggaannnnnnnnnnnnnnnnnnnnnnnnnnnnnnnnnnnnnnnnnnnnnnnnnnnnnnnnnnnnnnnnnnnnnnnnnnnnnnnnnnnnnnnnnnnnnnnnnnnnnnnnnnnnnnnnnnnnnnnnnnnnnnnnnnnnnnnnnnnnnnnnnnnnnnnnnnnnnnnnnnnnnnnnnnnnnnnnnnnnnnnnnnnnnnnnnnnnnnnnnnnnnnnnnnnnnnnnnnnnnnnnnnnnnnnnnnnnnnnnnnnnnnnnnnnnnnnnnnnnnnnnnnnnnnnnnnnnnnnnnnnnnnnnnnnnnnnnnnnnnnnnnnnnnnnnnnnnnnnnnnnnnnnnnnnnnnnnnnnnnnnnnnnnnnnnnnnnnnnnnnnnnnnnnnnnnnnnnnnnnnnnnnnnnnnnnnnnnnnnnnnnnnnnnnnnnnnnnnnnnnnnnnnnnnnnnnnnnnnnnnnnnnnnnnnnnnnnnnnnnnnnnnnnnnnnnnnnnnnnnnnnnnnnnnnnnnnnnnnnnnnnnnnnnnnnnnnnnnnnnnnnnnnnnnnnnnnnnnnnnnnnnnnnnnnnnnnnnnnnnnnnnnnnnnnnnnnnnnnnnnnnnnnnnnnnnnnnnnnnnnnnnnnnnnnnnnnnnnnnnnnnnnnnnnnnnnnnnnnnnnnnnnnnnnnnnnnnnnnnnnnnnnnnnnnnnnnnnnnnnnnnnnnnnnnnnnnnnnnnnnnnnnnnnnnnnnnnnnnnnnnnnnnnnnnnnnnnnnnnnnnnnnnnnnnnnnnnnnnnnnnnnnnnnnnnnnnnnnnnnnnnnnnnnnnnnnnnnnnnnnnnnnnnnnnnnnnnnnnnnnnnnnnnnnnnnnnnnnnnnnnnnnnnnnnnnnnnnnnnnnnnnnnnnnnnnnnnnnnnnnnnnnnnnnnnnnnnnnnnnnnnnnnnnnnnnnnnnnnnnnnnnnnnnnnnnnnnnnnnnnnnnnnnnnnnnnnnnnnnnnnnnnnnnnnnnnnnnnnnnnnnnnnnnnnnnnnnnnnnnnnnnnnnnnnnnnnnnnnnnnnnnnnnnnnnnnnnnnnnnnnnnnnnnnnnnnnnnnnnnnnnnnnnnnnnnnnnnnnnnnnnnnnnnnnnnnnnnnnnnnnnnnnnnnnnnnnnnnnnnnnnnnnnnnnnnnnnnnnnnnnnnnnnnnnnnnnnnnnnnnnnnnnnnnnnnnnnnnnnnnnnnnnnnnnnnnnnnnnnnnnnnnnnnnnnnnnngatgacccagtgactgcatcaccatataaacacatgcaccattaacatcatgatgcatgctggggagggagcaagcagggtctgcgctggagtgcacagccagccagtgtgtgaggccaaaactcctcatagcaccaggcaaactggctgtcaccctccaggcacactgaagcctgggactgagggccctaatactgttctcatacaagtcaatggttttcattgagctatgctggaagtctgctaaggtccccagagctgagaatacctgtgacagatgctgtcagtcacacgagaatacaaagcacagtttggatggagtctcccctgttgaacagagttcagattcggcagcctactagagggctctcagcatctggtgttagcaatccttcccaagctctcctgccccgttccatggaattcccagagtaaactccaaatgccaagcctctcctggtctcctgcatatcagcatgtcccctccgtctccattctcctgcttagacctgagcagtttaatatgtgagagtgtaaatcttaagtttttttgtaagggctccagctcaagctgcagagagatggctccatggaaaagaacactggctctcttccagagcatttgggtttgacttccaacacccatatgacagctcacaacttttctaactccagttctaggggatatgatgccttcttttggcctgcttgggaactacattcatggatgtggtgcacagtcgtttgtacacgcaggcaagcacccatacacataaaaataaaaagttttttaaaaagtgcccagtttatttaatagagatccgtttttatcattttgtcaatttaatgtttatctgaaagcacaatacaaaattcaaaggccaagtacttatttatgtatgtttttgtgtatgtgcacatgtgtgtgtatgcacatgtgtacatgtctgtggaggtcagaggacagcctcagctgttgttgctcaggcaccaggcaccttttgcttgagggtctgcctatgtctttgccaagggtgtgaggcaagctagcagggagtgccagcgattctgttccgcctcccatctcactgccaggattataagtgcctgctaccaactttatatgccccagtacaggggaacgccagggccaaaaaaaaaaatgggaatgggtgggtagggaagtgggggggagggtatgggggacttttggggtagcattggaaatgtaattgaggaaaatatgtaataaaaaaaaaagaaaaaagaaaaaaataagtgcctgctaccatgcttggctatttatgtgggttctggggatcaaactcaggtcctcatgttgccaagacagtaactttgcagactgagccatcatgcccaggaagggacaattagagaacctgcattgtacaaagtaaatgagacaaatgcagacccgtggatgttcatggtgctaagaatatgtgacagtagagggcttatccctagaaaaggggcttatggctcagcagttcagagcacttccagagggtcctgagttcagttcccagcaaccacatggtggctcataaccatcagtaattggatctgatgccctcttctggggtgtctgaagacagctacagtgtactcatataaataaaataaattttaaaaagattttaaaggcagggggctttatgacaccccctctgaggccaaggggaaatcacagaatggggagcagaaagaatgtaagagcgggaatatgggagaaggaccacagaatgcactctccaggacatagcagccattgaaatcacgctgttccagcagccctggccgcctgcactgggccttcacaagactggccatagttaatcatagatccataggaacttatgggcccgactcttccttgctgagctattgcctacagatggattcctggggaaggacagtcattatctttagttgtatacccattggtaactccatcccccaggatgtactggatagtcctaaactcaaggtttcacagaaagcccagggtaaactcagtgggtcacaggatgaaatgacatgaatatggggaagagactggtagggagaaagaagagcgagagaaccagaaaagtattacttgtacaaaattgtcaaaaactaatttaataagggatattttagtaacaaggaaggatgatgaggctggagaggtggcccaaccacaaagagcatcctgcggaggacctcagttcagttccatgtcaggtggctcacaacagcctgtgtcaccagccccagaggatctgaccccgtgctccctctgtaggcagctatgctggtgagcacatacaaacacacagttaaagataaactcaatctttgtttcagtggtacagactctttttttccttttaagtataaagattagagtcagcagctgacagttttctgggtaactgagttttcatcacccttgatgtagtgatgctttttaaccaaaggaatatctctttaattcattcagtcccctttatgctctctggcttttgctgattttaatggcaggattgtaactagagtgtcatttctgtcatttcatggcatccaaggagtctccttgccagaaaacagcatcatcttgtctgcccacctgtgccaaggagaggctgactcactgatgggttgaaggtgcctttaacctcttcttcctctaacgtattcctaagcccatggctgaggagaacccccatacacatgttcccatactgcgtgtgaatgaccagctgctcagcactttgtggatatgtgatgactaactcaagccagactgtcaatagtcactcctctgtcactccctgtaatttggctcgtcactcatggcatctggtgtcgattgtgcaggtggacaagcagagcacatacaaagttttcctagaacctttcctatagtcagatgggaagaggaaaggatgatggaaatctaaagatcggtgttgtgcttggacttgccacgggtctatgtcagtgttctgttgccatgaagaaacacaatgggcatgccaactcttaaaaggaaaatatttaactgaggctagcttacacttacagtccattattgtcctggtgggatgcactgtggtatgtaaggggacaaggttctggaaaggtagctgagagttctacatcttgattggtaggcagcagaaggacagagtacttgggcttagcttgagcatttgaaaccccaaagcccttcccaagtgacacactttctctaataaggccacacctactccaacaagacaacacctgctataatagtgccactccttggtgagagcctgtggggtccattcctactcaaaccaccataccatgtttccagcagactgttaagtccgtaccttacttggctgccttatctgcacagtgtcaaaagcagctcaaaactaagtcatcccggcatgtgttggtgaagctatgcatgccagagattaggaatggtactttctgggagcaattgaacctcttgcgctcagctcgactcatatgagccctcaaaatatgttcagagcggttttcattaccacaggaaaagacaaatattaattaaaattattcagtttccatataattccaactttgaaaatgtttttaatatatgctaaaatgcacaaaatgtcaccagtgttttttctgggtagtagactgcaggtggagttcccttttatctattttgccctcaattttctacaatgataataatatattaaaatgtgtaatgtttctaaagattactgtagtaagtgctatagagttgaagtgtcatggaccaatagctcttctcctccagagttatgtgctaatggtgcaattttgtctcagtccaggatttgtgtgccacagaggaccatggttgtgagcagctgtgcgtgaacatgctgggttcctttgtctgccagtgctacagtggctacaccttggccgaggacgggaagcgatgtacaggtaggtatctctccagtcctgtgtgccgaggaagggcacattatgaataggaaggacagtgggtagaacaaacatgcacaaagcccagattgtcctttgggttttaatgaagttcttggttttgtggtctagtttttaggcagattttgaattttaaagacttagtttttacttggggtcagtatctgtttattctagatcattcacataaaccatgcttgaagataatctatataaatgtaattgctttctacttcactgcttgaaaagggcagagcgtggggatgtaactgtaagctcatgtattatacatacattttacttggtgatgggcagggagggatactatgcagtacctcaaaaacactggcagtcttatctctcactttggacctgcaggtcagtgaaaggctcaactgtgtgcactggcatcatggtcacagaaaataagcaatctcaaacataaagctggggagggggtctccagcaagtgcgagctacaaacacagactcacagctgaacacccttccaacttgaggacaccacgctgagcgctgagcgggttaggggttgggctagcctctgatttcttcactgatgggttgtagttttccttagcccttggcgaacaggccagaaaacccctaatatgtatgcaggaccttcctgattggctaaagtacccttgcctgatcttatttatcattagagcaagaaatagtaggtaaataacagatgttcagtaaggtgagctgaagtgaacatagagtcctgaccaaatctagcttttctgttctatagcccattgctttcagaggtcatgttgattctcttcatgtcctgtttcctttatgcttttgtattacttttttttttttttttttttggtttttcgagacagggtttctctgtatagccctggctgtcctggacttcactttgtagaccaggctggcctcgaactcagaaatccgcctgcctctgcctcccaagtgctgggattaaaggcgtgcgccaccacgcccagctcgcttttgtatttcaaatgcatattttccagcatacctagattgttaggtttatgaaaaaggaaaacgacaacaaaaagcggccatttgctatttgcatgagagtaatgagagtattgcggctttgcttttatacactggtgagtttgaaaactaccctcatctgagatcagcaaatggaatctgtctcctaagccttggagctatttactggggatggggtgttaatttcctggtggcaactatgacagagtgtcagagtattctgttgacacaccgccaaaacagacgtcaaccctgatccaaccaattattattttgcttcactaattctttattgtacaattaatatttaaaggttgagaaaaatcactgctaataattcattgcattttctaccatagtttcccccatagaaatatgtactacaaaacattttttttgcgcctttctgttgttaaatgagtagaaactttgtgaactgaaaaagaaatgaaaagaaaaaggtgggggatgggcatatgaggaaggacgagatagtgccaaggaggcaggagaaaagttctaattgagtgagaggagacacagaatgaactaagagtgtgaaagtcacagaggacagacgagcaggaggccaactcctggcccttgggaaactggagggtggtggggaacccattcctctccgttaccaaataattgtctaattgtcccagagtagtggagaatctttgtgtctctcaggattatgctgtaagcttggaatttgacatttgctgaagggtgagtccatgctgtggttgccagggagcagcactgtattgtattcatccaagaagagtgcttttagtgctaatgcttataagcatatgagagtgtcttgggctggagagatagttcagccattaaagtctaggctcacaatcaaaatgccaagtatgtcttgcctgtatttggccatcaagcagaaaaatggtaagccaagagaaacatatatcctaaggtggtgcacgtctcatccccatgatggtccttacgttaccatcttccactgcccttgacagccgctgaccaagatctatgaggagataggtgtgagatgaccaagtagaactctgtggccagtagcctcagttaaggggtcaaatttctagaaaggcagttgctgcatcgagagcccagagaggacagaaatggagaagagagacatctggagagctaggttggaactatcactgtgccctgagtgagtgtcaatctcttaggtaccgactcatgagttctagttaacatctccacccatctgagttactgaactgcatttactcattgagatgccctatgtggtttagtggagctcctgactttgaaatgcgttagctgctattgaagctgtattcattgtcaccccactctgtacatcactcatggactgtgctttttctctgggagtgcgttttctcgtgaacttgcttacccgatgtttactagtggctttgtaaatgggggtagccttggtcctattttccttccaactatctgagcagagtagaaactgagcaagttgaactcttcctcgttaggttgaacttgcattgccgtttctgtcctttgaatgagctctccctcaattagtttttaaactgcaaattcaatttttcctttttgtcttcattcattcatgctctcccaataaaatacctaaagctggataattcattagtagaaatgtattctaaatggtacaggctgcctggtgaaagttgctctctgttttcaaggtggcaccttcaactctgtgtcatcttgtcatggaaggtggacaggcagacgggactgaatactatggagacctttctaaagattggttttatttttaagtgtgtgtgtgtgtgtgtgtgtgtgtgtgtgtgtgtagggtacatacatgtgagttctgaggcccatggaggccagaagaggaagtggttgcaatctgccatacttggatgctgggaacagaacctgggcactctagacgagcacttcactcaagcactgagctactgaaggcagagcccttgtggtatggccacttactaaaggccacatttcccagtactagtgcattagaaattaaatttgaacatgaattttggaaggacataagaattcaaatgattacactaatttgcttaaagtcactcacatctggtactggcttgtcagtggtatcgaaggcgcaacacactgactgattccgtcatcactgaactaagtgctcctgagctaaataaatggcgtaggtgtccatacgtcgatcagtccaaccttatgttcttagagtgatggtgataaaaatgtacttgcatttattgactgttactggtcctggcacctctctgaagtattttacatgtatgacagtcatcctgtgtggaaaataccattgtcattgcttttatacatctctggatttctttatggttcaaccacctcagtctgtaaagtaaggataataacatgaagcttacaggtcaatttaacatgtggctctattagagtcagataatctaccaccatttcaatgtctagtggttaggtacttgatctcagttagatgcttgcatttcctttgtgactgctttctatgggtgactacatgtaaggatgtctctaaggtatgtgcactagttaacttctctgttgctgtgataaaatatcatgacaaatccaccttagtctttgtcactgcactaaagtactgtttatgtctgaagacagctgggtggtttctcacacattgagcagagactacattcagcaaggctcatttctgactcttggccctctgtgatctatacgcctggacaaggaatgatggccagggagttccagtattcttctcatctttgaaggtgcacatagagactccaggcagagataacggaagggattttgttggagtgaataaggagagtggtcagctccagacatctgcccataaccttggccttccttttcaaaagtacaattttggaacttaggaagttatgcaacaaatccaaaatacttggtaaagaaagaccaagatgagtccactagaactttctgtatcctaaaactctgaggttcacatgactggaaatgggttttttcatgtccaactgctgattggtggcctggaccaccacccctaagtggcctgatactgagtcaatgacagcattgaaacattgaaattgtatagaccagggtctcaggaacttccagtcactgaattcagcccttccttggttcagacaggtgtgcacacagaggacaaagcagcctcagaatcagcccgagagaatctcattctgtgacagtggcctgtagctggctgaggaatggaaaataccataaaaaagggatgccctaaaaactatgagttcagctggtagggcatggttatatacaattgtaacccaagcacttaagaaacattgctacaaattccaggccagcttgacctacatactaagagactctgaccctgccataaacctcaaaacagacagctccattcctaaacatctcacctatgtacacaaacatatcttaattgttttaattaaaaacaagtgtatgtttaataaaagtcatatttaatagtagtttcaaaacattaaataggcttatttgaaaaaaatagcttatttaacatctttattgtatacatcattcctgtgacatattatctgggatttttccagtttggagttctttaagttggcacaggatatgaaaatttctgtaaaataatctagggtcaggatccttgttgatattaataaaaaatactccatctttcatatttataataccataaaaattattgttctcagagtaactttagttggtaccaagcctcaagtttctccgaagttattaacttaatttttatttttaagaaaaactctgagtgcttatacttacttgttattattatagttagttacaatatcatgaacagatgtcatgtatagtatgttgttacaatttaacagagactattaaaatttatcatacactagaatcccctagggacttgttgacacagattccaggttcccataaccagaaattctgatcccacttgtctagggcaggaccagagaattgatattgtaggtaaattttcaaatgattgttgatgtgagcagttcacagaccacaacttgagaacttatgccttacagacataccatgtggtcagcggaagaatgagggtgttcaagagcacaggtgtcccaccacactgctctataagcacacatctcagccaaggtgagatatgcacagatagatagtctagtatgcagggactccaactacctcagtcacataaagtcccagaggccttaaagggaaagagagctttgatttatgaagaattgtgttcagctttaaaagctgcttatgactcctttgatgggtattttgttccctattctaaggaggaacaaagtatccacccattggtcttccttcttcttgattttcttgtgttttgcaaattgtatcttgggtgttctatgtttctgggctaatatccacttatcagtgagtgcatatctaatgacttcttttgtgattgggttacctcacaaaggatgatatcctccagatacatccatttgtccataatatggacatataagatggaatacagggcccccagtggagaagctagagaaagcacccaaggagctgaaggggtctgcaaccctataggtgaaacaacaatatgaactaactagtacccccagagcttgtgtctctagctgcatatgtagcagaagatggcctagtcagccatcactgggaagagaggcccctaggtcttgcaaactttatatgtcccagtacaggggaatgccagggccaagaagcgggaatgggtaggtaggggagcagggcgggggtagggtatagggaactttcgggatagcatttgaaatttgaaatgtatataaagaaaatatctaataaaaaaagctgcttatgtagaatgttatcttatatagtttcttctatagcttccaaacaggggattatgagaagttcaaaagaggtgaagaatctgagttctttgtgatatagtaatgtgacccttgtctatgtagcaccagaaatatcataggacttgaaagtcaagtgctatgtattaaactcacagatactaggggctattagaactacttgcagaggtgatgttttaaaagctttgcttccgactgaagcttgattcactcagaaagcaaaagaagcacacaacacaggctgttgctctttaaggtcttggcttcccctctgcatccttcaggtacggtgttggatgcactactgtctcatccatgcatgatttttcttgtaaggaactgcaaaggccaatggagtgcacagcacagtgatagagcacttgcctaatacgcacaggctctgggttcagcccttagtacagaaaccacaacaaaaagtacgcatgtatcaaacatatatttatctatctaatcctaccacttgaatttaacagtaactcttacttcccatttgtgggctctactttaggaaaaggatataatcactatacatatgcagttttgagatctgctttttaaaacgttaccattgattatttctgggatggggtagtgcacatgccacagcacacatgtggagccacaggacatctatgtaactggttctctccttctgccccttcatgggttcttaggagtctgactcagtttgtcaggatgacacagtgtctttattctgagctgtcttgcctgcctgggatctaatttttttcaccagactttgtatgtctatgagcaatgtagccatcacaactataatgctaatgtccccttgatgctccagatggtagtgtgggtcctcctgccacaatcttcaaaccatctctatcttagttcttggtcgagccatccttcctatggttctgtccaaatgtctggagttgatcttgatacttttctctggattcatctctaattcagcaggaatcccattggccccacgtttaacacccagggattggccctagggctatctaccaaagtgtcctaaatttgggggacttaaagcaacagcaatgtcaaaaatataggaaactagaaacctgaaccaagatgccagcaaggccatgcacacaacaaagggtcttcctgccccttcttaatttgtgatactaatttgcagtcctgaagtctaataatcttcacatgataccttccttaacaaagtgtgtgtgtgcatgtatgtgtgtgtgtgtgtgtgtgtgtggtgtgtttggtgtgtgtgtgatgtgtatgtgatgtggtgtgtgtggtgtggtgtagtgtgtatggtgtgtgtttggtatgtgtgtgatctggtgtgtgtgtgtggtgtgtgtttactgtatatatgtgtatgtggtgtgtgtttagtgtatatatgtgtggtgtgtgtgtgtgtgtgtgttatgttttataaaaagatagagaggaggaatatgtttggtggatgtgcagtcaggtgtggtggaagtaggtccctctacaggcccatgctgaggcatcccttccccctgagggaccagccacagaacagtattgtatagaatagagtttatacgtggcatggggaggggagttgagagggcagtaaagacaaagaaaagcagannnnnnnnnnnnnnnnnnnnnnnnnnnnnnnnnnnnnnnnnnnnnnnnnnnnnnnnnnnnnnnnnnnnnnnnnnnnnnnnnnnnnnnnnnnnnnnnnnnnnnnnnnnnnnnnnnnnnnnnnnnnnnnnnnnnnnnnnnnnnnnnnnnnnnnnnnnnnnnnnnnnnnnnnnnnnnnnnnnnnnnnnnnnnnnnnnnnnnnnnnnnnnnnnnnnnnnnnnnnnnnnnnnnnnnnnnnnnnnnnnnnnnnnnnnnnnnnnnnnnnnnnnnnnctctcagcttccaaccattctgtctccacctcctgtctcaccatagcagtgctgagttacagatgtgatctactattatctatctttctatacaggatccaggagttggacttaggtccttgtgcatggctagtatatttgcttgctcttcatcttcctggctattcttgttgcgtgtggcttttactaccctgccaagctccgggaatagactgctatgagcccccaccccacttcccttgaatccacagataaatgacacacacacagagatgttcattttcaacttaccttcttggtgtaattgctgggcattattaaactctcaaggctagcatgcccttatcgacacacttcccacctgctctaaacttttgttgctcagttacatctagtacctgccaaacacccttgaccatccacctgtaggagtggcctgtgtggccactctgttttgagatctcacatggatggagaactctcctctccttgccttgcatctccctgcttgcttccagagacccagaagtcctatctatcccttccacccagcaattggcccatggcttctttactgacagatcaagaaccaattggggaacaggaccttaacatcagaaccacccctacttactccttttcatcagtcatactgacttgtcttcatgttacccttattacctctgcttccatgtaaagccatggacaccagttctgagatctatagaatgttaagtccttgaagcccacatgtctcttttaaccacacaacttgtgtctctacctctcttcccgctctgcattggtcttttttgctagttctgtagcacagtacgtgtgaccccacctcctgacctttccacttacctgggacactccagatgtccttatgactagtacctaattcaatactgcccaatcacctttttagagaaccctttccagaccacctctgtcatatcccagcttccttccccgacaggtcctactcaccttgatttcctctagaacattctccatcttctaatggatgatgttatttaatgactttggtcataccaccaccaatgttaacactttgaggctgtgtgggtcttgtttgttatttactctgtctctaacatctaaaacagggcctgattcatagtatatactcggtgaatatatatatggaactaatgaggtataatccagtatgttttctcatgaaccactaaataatttacccttattataagttcttatctgactttcaaacctatttgatcactatggatgatgctactataaatatcttactgtatataaataatttcccactccagttattttctagaattaggtttgcaaatttaaatgatcagattgcttccataatgattcttattgctattcatgatttatgtaattgtttgtgctgacttactgctttgagttttcattcctttgttgtttttatggtcgtggagcctcttgagtgcaagataagtgcgctatcattagctatactaacagctgccactaagttttgtctgatctccattttccccagttcaatagatgtgccttataataattttgatttgattttctttgatttttaaatatacttgtccatatatgttttatattccagaatgaaagcctgatttagattcatgatttttagggggatgttgcatgtttatttatccatattgttttgggggggtggaggatgggaccattattagctctaattatttttgttataggtattctgacattcttctgcacccttctttgtatcctaaatgtgtgttgttttcttcagctgtggactactgtgcctcagaaaatcatggatgtgaacacgagtgtgtaaatgctgaaagttcctacctgtgccggtgccacgagggatttgctcttaacagcgataagaaaacatgctcaagtaagttacacgcacatgcacacagcgtgctattgtggtgggcactgtggacgtagaccttcctgcacatggattagcccatgctaagtcatgaaaatctgttcctattcctcctgtgtcagcctttctgtatagtcctaagattatggcttacttggtctcaataatctccagtcaaagtttttggtgatggcatcttttgttagagaaagacatgctaacaaccaaatcagcatcccacatgctgcctcagtatggctgtgcctatcatcataacagggcctgaagaacattttcacttaagctctgtggtttgtgggctccagctctgactccacgtgagggccagaaaatcgctgagccaaaaggaactgaatgtggtttcttgagggtggggtggggataggtggatggcattttgctgagaactgctcaagttttctgtaaactgtttagttctgtttgattttaactatatgcataaatattgaactaaacttaaacttctaaaattggaacagaaaaatctataaactaaaggtgatcaccagttttataaaagatgccaggagtactcttttaaatataaatgtgcagagggacactttggaacttctgtggatagatttattatcctgtgatactgtgggagtgtcacttgaggaatgcctacttatgaaatatcagggcccagtgatattttcataagatccaataacaattagaaataaaataagttatctctgcaatgtatatcaatgagaaaataggattttaatttataaaaagttggtgtactttccacctttcaaaggtatatcctgtatgtactactgtgtgtgttttcaaaggcatcctttctatttcctattctccaatccctaactattaacagcttaaaaccctagagctagagacagggcatattacatcgaaaacatatgttactggagcccaaacacgagccagtaaaaacaaaggaggtgaagtcctgggatgaggacagatcttggctggattttaaagtaagccatcatttatcacacaaagcagggaagaggggctgctgaaagaagaaaaaagtgctaagataggagcagcttagtccagagctggactaagatagggtatttagacctccatgcccagtacatagctcatgtacaactgtttgtttgcttttggaagggatgagtggtttagtaggctgctctgctccgagtctcccctcctttctgtacaaaacttgagcagttcccatcaagatgctgtctacctagccccaccacaccctcaagaaaccatattctgaactagaaaacaacagtcaggctgccattgtggctgggaactgtggtcactgggctgatgaatcagcattcctgatcaaaggtggactctgtgggcaatcttgggcaaaccttatgccacaatgtcctcaactgaaacaggagatggtaacacttaaagataattcagtctgttatcttaaagactaaagaagatcatttatagaaatgatttatcaaattgctagtgctaattacattttcacaaaagatgatgctgggatctgggtacatcacacagttggtaaggtgactgctgtgccagcaaggagatttgagtctctggcacccctgtgaaaagaaacacaactgaggaggtataaacaggaggctccctggggcccactggccaacgagtctagacaaataggtaaacttcaggctcaaagaaagatctgatctcaaaagattcagatggagaacaattgaagtatattcccaacgctgacctctgccctccacacatgtgtacatgcttgtgcacacatgaacacatacacactaacacaaagataacactagccacaaagattttagtattaatgagcatgtaccatatgccttgacaaagcagaaaggtacataaaaactcaagacttctgttgaaagttagcgggaacacaagtcctaccacacagagcagtttagtcacagcaccaggacacatgtgacccagggtccatggtgtgatggagacatcctggactagggaagttggaagcatggtcccatggtcaaaggaatgggggaaaacacatctgtctgatctcaaaacttcctcctggaaggagtctcgatcacattcccactttagtttccagaacagcttcatcctccatactgtccctcagcacattccctattactaaatcctattccaaacatgagagtggaacagacaaggtcagagcttctcaatcagatctggaagtagaagctgcagtgtagagccctgggaagagtttggctgggagtcagggaagggcccttccagctgggaggtctcaccagagaggcatggagccagcagctcagctatcttcaggccatgttaaaggcaagccttgaagctggccagcccaatgcgtgggcagagaggaatgctgggaaagctatggggttcagggcaacagcactaggatgaactgccccctagaaaggccaccttcccaccatccttggggatgggcaggagccagatggaaaggctgacaagaaaaagagatgtttcaagtattttaaaaaaatggtgcaggaagtaaagagaaagcctgcttgtacatatacaacgctgtggtgtccctgtctccagcaggacaagaaagagctgagaagcaaccagtagcaaggattgtgacacaagggacaaatccagcagcaccaggccttgttagtagctttgaggcatcacagtcccagctacctggccatcgctctcatgctgggaaaaagaaatccagttcctacacacttccaaaaaattagtaaattatttttttaaaaatcaactcattacatttcagtctctatagatctatttaaagatatatttttttctgggctggagagatggctcagcagtcccctctttagaacaaatcatatatatatgatatatatatatcatcaaatttgctactgtggggctggagagatgactcagttgttgggaacactgcctgtttttccagaggatcccaatttgattactacacccacatggtaattcacaactgtttgtaactccagttctatggcatccaataccctcttctggactccaagagcatcaggcatgcttgtggtgcacagacatgcagacacacaacatagccactaggtattactctattaggagtagtagtaataatcatttatccattctaccatatttgttaagtagctactgtgtgctacatatagctgtagacacatggcttacctctcagccctaacaccttagagcaggaactgtgagacaaggcaatgcctatgtcccagtgatacacctcctccaacaaggccacacctattccaacaaggccacacctcctccaacaaggccacacctcctccaacaaggccacacctcctccaacaaggccacacctattccaacaaggccacacctcctccaacaaggccacacctactccaacaaggccacacctactccaacaaggccatatctactccaacaaacccataccacttaatctttctaatccttctcaaacagttctattccctaacaactaagcattcaattatatgaacctctgggggccattcttttttaaacctaagaacataaaagcacaagaatttatgcatacagatttgaaaaacctattacaaaaagctgtttaacagattaaaccaagtaatgtacagaatattatacagatattaaaatgttttatacatgcaaatgatatgctaaagtgctcctgatttaatgctatgttgtatgatcctaaaactacaaaaacatatccatatgtgtacaatattaaaagagagaccattgaaatgggtcagtgcttgaacaagaccctgatatgagtttaagctctggaacacacctctttttgctgggcggtattgagtcagagacaagcaggtctctctgagttcaaggtttgcctggtctacatggtgaattccagagaaatcctgtctctgaaaaacaaaaaccaaaaaaaagaaaaaagtggtggggaagcaatgaataagcaaacaacaacaaaactgcctaagaaagacctgaacagaccacagcaattgatgtgagaatcttgtgctgtcccatccatagacaaagaactacaggcaactcacggatgcccagggtgggagaacagatcttccccagcgaagagcccttggttatctaatattaaatggtcagccctgaaatcatccacatactagccacactaaacaaagcagcaagatgtgtgggaaatataacccatttggaatgaacaatggggattgtttgattgcagaggtgccgatgtgacaagggaactttccctaggcaggtgccgtgtcctgatatggtctaaagggttaaagctgggcctccctgggatcatctgcatgcagtgtccttctcagactcatcatatctggatatgaatctgacaccttcataaaaagggggtctagcattatagcataaccagtaagaagtggttagctcaaccagagtgggtctaccagctatgtgtgtgtcaggaaagatttcagagctggggacacctgctggggggtgaggctggggacagggaggaacagagctgccagtctgagtgaggactggtgttggcgcaggtttgcctggtacagggcctcttcatacaggtttagggtttgtcaaaatctacagtaaccagtctcaggattcacgattgtccaagtcaagtcataaggctggtgtgggtttctggtctctgaatggaggcgtaggctggggggcagcagtacacacagctagtaaaaacagcaaacttcagactgggttaattttagcttgaaagtattggtgcccctatgaactttccattccagcgatgactgtgaattcaggcaatcttcttctggggagaagggattagctggtctcacatgggtgcagtgcacccaggcagtgatcccatccactttaacagctgttggcatgctcagcaaaatgacgtactgttctttccaccggggctccaacacattctggctaaatccgttcatgtagacccagtctccaggttgaaacttgtgtggttccagaacagggtctgcttcatagagggcactcgatttaggccaaacctgctcatgttcatcatctaattctgcaatagctgttgactgaaggttaggtacaataggagcaggaaatatatgatttcaaagggggttaatcccatctggttaggagaattcctcacccgatacagggcaaaggaaaggaatgtcatctagaccctccctgctagtttccatggctaatttggtcaaggtctcttttaatgtaagattcaccttttctgcctgaactgaactttggagtcagtatgcacaatgtgatttccaatctgccccaataaatctcgctacatcctggcttaccttggacacaaatgctagcccattgtctgacctatcatatgatatcttctagcaacttcttagacactacctttgcagtttcagtctttgttggaaatgcctctgtccatcaggagaaggtatccacgaacaccagtaagtacttatagtcatactttcccagtttgattgctgtaaaatcaactttccagtagtcccccagtctcttacctcaaagatgagagcctggatgtttggcagtgttgtgggtgttggttaaatggcaagctttcagcttgacactatattctcaataatacattgcatgaaagtcactttagattgtctcactgcatcagccatccatctcactcccatgtagatgacactatagattttcctgaggatagatcttgccagagaggtgggtagtattagcttaccttctgccgtctgccaccagacctctgaacaccgactcatgggctgattcttggcccatttgatctcttcctccgaatagactgggcattccggcaggttggggtttggcggttctggtagagtcgcagctaacatggaagcagctgtttcctctagggccacctctttggtggctttggcggccaagttgtcacctctagccactgccgttattcctttctgatggcctggacagtgtgattaccactctctttggcagccagagggcttcaagtcattgtagaatttcatctttgtttttgatagtttttccttctgcagttaggagtcctctctcctggtatatagctccatgtacatgagcagctgcaaatgcatactggctatccatacagatgttgacagccagtcctttttccataataagggcctgggatagcaccatcagttccagatattaggaatgatccccttccgtgcttcttgggacatgggatattggcagacccatactgggtctgctcctggcttatgctctacaaatacagggggtcaatgttttaccagccctgtgtctccagtctctgaccaagccttgggaaactctgccagccaggcatccaggtctttttttttgggggggggggaggtggctggtgactcgtacagtctagactcagtctcagaggccacgtcaagtgtcagcacctggactggtttgccgttctagtccattagccagattttcccagggccaaaataaatctgggctctcatttaggctagtagatctctccccaataaggggtatgggcattcaagtatcactataaaggagtgagatacccatctcattcccaagtccactgtcctttgggtagtccctgaatattgtttggcacctatggatccctggacccaggattttttattatacaatgacccttcagcctttccaagcactgaatgttggactccagtatctaccaggaagtctagaggctcccccctccattataagggttacccagggctcagggagggggtccaagccctgactccctccgtcttcctcttcctcagtgaccacggtcttgttttagggctttttctttgggcattctctgacccagtgtcctttctccttacaataggcacattggttcttacctaaggctgataggcatcctcctccaggctctggccaggggtcttctctaggttctctcccttctgcaatgttccagagcttcctctctctctgggttaccattggctagcaggaatctggctagatctctgtgtaatatcttccctgtcttatctttagattccctgttatggaacactttctcctcaacctctgctaaatctctcaatgaatttccccctagtctttctagtttctgtaactttcttccaatgttctggctgactgatttataaatgtcagcaccactatgttagaattctctgtttcctcaggatctaagtgtgtataacagcggaaaccatccataatcctctcgaggaactctgcagggctctcattatctctctgcctgacatcataaactttagccagattcgtgggttgcttggcagttgctctgagacctgccattagagactggcaatagactggaagacactccttacctgtccctgtgttataatcccaagctggtctcctgagggaaaccctcgtcaatatcagcttgattctgagttggagtgccataggcacctggaacgttcttcccggactccaggatgatgcgttctttctcctctgttgtaaagagaatctgcaacaattgctgacaatcatcccaagtgggctgatgggtaaaaaggatggtgtctaagagactaatgagctctttagggttgtcaaagaacctagcatacactcttctccagttgtaaagattagccttagcaaaaggccaatactaatagggtttgtttccctgttcatcaattgggcctgtccctttcaggggtaagatagtggaatctgcctctggtgctacagcctggggcggtgtgttggcatgcctgcttctagtcctgtgagctggacctccctccatctccaaggtggacactattggaacctggggcgctccttctgggggatacatgggcaggagtagagtcaatgtagggatcactggttctgctgcaggaatcctctcgggtggaaacgctggggatggaagtgcctgggcaggtcccctgtacaggggcacaggtggaaactccgggagtgaatatacctgcactggtcctgcccgcatgagtggaaacgcaggaagcagaagcacctgtgcaagtccatgtccaggaacacagtgggaggcggggtctcagccaaagcaggggccgctgcctttgtcagagctggtgcctgagtgtaaggcagtgggaaaatgacttctggcgtagtgtcctgtaaaatgggatagaggggctttgaagacttggagacttcctgcttttgtcttttgccatcagagtggacatgattcctgaaggctaaatatctttggtaagaggcaataggaatgatttcacccaggatagtgggttggcaaccaaatctttccagactacaatgtaggggacttgttctggatgtccctgaaccttctgcaatactttgtcttccaccactagcactgtggagagatagaaagtcccctctagtggccgtcctacttctgaaggtaggccactcggagctgcaatacgtgtnnnnnnnnnnnnnnnnnnnntgctggaggtctctccctaagcacttccaaccgatggtcaggaacctcatccaccctgggacccgaggtcaggaacatcttcctccctcttacagccatgactgcccagcacatctgctttagccacttctttccacttgcactgttacctcaaggctttttcttttctttttttttttttttttaaatatttgtttatttattatatgtaagtacactgtagctgtcctcagacactccagaagagggagtcagatcttgttaaggatggttgtgagccaccatgtggttgctgggatttgaactcctgaccttcggaagagcagtcgggtgctcttacccactgagccatctcaccagccctcaaggctttttctgatgccaaaatatggccagaaagaacagacatgaacaatgaacaatacagaaacactgactttcaccacactggcacgctgactttagactctccggactgcagattccagagatctgctggggaataccattcagaagagcccccaaatgttgtgtcagcaattccacaggacccccaggagatctctaagaaccgctgggcctgatgtaaagaaacaagagtctacttattaatttgagtcagactcggatcgtgaaccttcccactgtgcaggagagaggtgcaacctcaagcctaaaggcttagcatttttatacagaatagtcaggggttctttggattttagggtgacaggcgaggtgacaaggcaagtcatttttcaaacacaatatcatttgttcaggcggcagggcaggatctctcaactgggaaggcgaactcttctgacctgaggagtaactttatggtgctgtcaagaactagtgtgtttttatgactagtcacagctgcctgtgacccctgattaccctccttttatcaaaaagtggggcctaatcccccccccagggatgtttggttttttgtttctttctcaaggacaggcaccagctacacctgggaagtgcttagccatttatcagtgagagtgccagcctcaacaacacggaagcgagggaggttgccatttctctattcgcaagctggcatctgtggctcctcgggggggagggggttcgttagtgggtgcctctctggaatcagggatagcaatattctggtgccagaccgggtcctctctgaacaaccagggaagggaaggaaatctcacgcttgctgcaggaaggagcagaagggaacttctgcgagagaatgcagaagcaggctgcccgtgccaattcaaaatcaaatgtcagaaagatctttgagatgaagacataatatctagatgtggaaatggctttttgaagaggctcttgctgggtcaaaattgtaagttgctgtattttatnnnnnnnnnnnnnnnnnnnnctcgtcaatatcagcttgattctgagttggagtgccataggcacctggaaacgttcttcccggactccaggatgatgcgttctttctcctctgttgtaaagagaatctgcaacaattgctgacaatcatcccaagtcgggtgatgggtagaaaggacggtgtctaagagactaatgagctctttagggttgtcaaagaacctagcatactcccttctccagttgtaaataaagattagccttagcaaaaggccaatactgatggggtttgtttccctgttcatcaattgggcctatccctttcagaggtaagatagtggaatctgcctctggtgctacagcctggggcggtgtgttggcatgcctgcttctagtcctgtgggctggacctccctccatctccaaggtagacactattggaacctggggcgctccttctggggggatacatgggcaggagtagagtcaatgtagggatcattggctctgctgcaggaatcctctcgggtggaaacgctggggatggaagtgcctgggcaggtcccctgtacaggggcacaggtggaaactccgggagtaaatatacctgcactagtcctgcccgcatgagtggaaacgcagggagcagaagcacctgcgcaagtccatgtccaggaacacagtgggagacggggtctcagccaaagcaggggccgctgcctttgtcagagctggtgcctgagtgtaaggcagtgggaaaatgacttctggcgtagtgtcctgtaaaatgggatagaggggctttgaagacttggagacttcctgcttttgtcttttgccatcagagtggacatgattcctgaaggctaagtatctttggtaagaggcaataggaatgatttcacccaggatagtgggttggcaacaaaatcttcccagactacaatgtaggggacttgttctggatgtccctgaaccttctgcaatactttgtcttccaccactagcactgtggagagatagaaagtcccctctagtggccgtcctactctgaaggtaggccactcggagctgcaatacgtgtgcattttcttccaacaagagattgtgagctctggttttcacttccttaaagtgagctaaaacaatgttggggggggggaatgagagttaacccgtcccattgcatccatcaccatccagtataacatgagactaaacactaccagaaacaccactgacaaaaccacatgcacgaaataggcacatcgtgactagaaacaaaagtaaatccaagcactaggactcacagactctcacctcggaaagtagaagtgaggtggatatgggagcagattgctggaggtctctccctaagcacttccaaccaatggtcaggaacctcatccaccctggaccctgggtcaggaacatcttcctccctcttacagccatgactgcccagcgcatctgctttagccacttctttccattgcactgctacctcgaggctttttctgatgccaaaatatggccagaaagaacagacatgaacaatgaacaatacagaaacactgactttcaccacactggtgcgctgactttagactctccggactgcagattccagagatctgctggggaataccattcagaagagcccccaaatgttgtatcagcaattccacaggacccccaggagatctctaagaaccgctgggcctgatgtaaagaaacaagagtctacttattaatttgagtcagactcagatcgtgaaccttcccactgtgcaggagagaggtgcaacctcaagcctaaaaggcttagcatttttatacagaatagtcaggggttctttggattttagggtgacaggggaggtgacaaggcaagtcatttttcaaacacaatatcatttgttcaggcggcaaggcagtatctttcaactgggaaggcgaactcttctgacctgaggagtaactttatggtgctgtcaagaactagtgtgtttttatgactagtcacagctgcctgtgacccctgattaccctccttttatcaaaaagtggggcctaatcccccctcaaggatgtttggttttttgtttctttctcaaggacaggcaccagctacacctgggaagtgtttagccatttatcagtgagagtgccagactcaacaacagggaagcgagggaggttgccatttctctattcgcaagctggcatctgtggctcctcggggggggggggggttcgttagtgggtgcctctctggaatcagggatagcaatattctggtgccagaccgggtcctctctgaacaaccagggaagggaaggaaatctcacgcttgctgcaggaaggagcagaagggaacttctgcgagagaatgcagaagcaggctgcccgtgccaattcaaaatcaaatgtcagaaagatctttgagatgaagacataatatctagatgtggaaatggctttttgaagaggctcttctgggtcaaaattgtaagttctgtattttatccccttggggaaaatggagcctgagaaccctcggctttcatggctagccatattgactttttcacgattcccagaaccttgctttctttccagagattgactattgtgcctcttcaaatcacggatgtcagcatgagtgtgtcaatgcccagacgtctgctctctgccgctgcctgaaaggcttcatgctaaatccagacaggaaaacttgccgaagtaagtaaccctggcccatttctccaaatgttcctctctgttttcccttcttggcagacctttagcatcttgtatttgtaatggatgtttgtgtttattaacatcattctgctcttattttccttttgtgtcagcagaaccttttgtgggacatttttctagagaatgaatagatgaaatctggtcatgagatttgcttagcaactcagtccatacggaagctgttccttgagatgagggtgcccctagaaagggcttgtggaaccttaagggagaaaaaaggctgggcatacagatgtgacatcaaaggagctggtttcttcaagtcttacatagggaacacttgatgacctctgagtgtggggacattaaggttctgttctcgttgattggaaggaaggaggagggtaatgcacttggccactgcagctgctctcaaaggcaacagagcatcagcaggaagggggtgaggaagtccatgtgactcagatgcctgtcacctgaaatactgagaggcatctactccaaaccagacctctaggctacatccctagtatctacagatacatgcatgcatacacacacatacatacatacacatataaacacacacacacacacacacaccagactgttcctgaaggacaccagagtggaagtcctaccaggaagaggtgcttgcctttttacatcatggaatcctcagcgactcagagtgcttagctcgtatgggttgagtagagacttgtggaatagattatgtatgaaggaatgagtgatggagctgctctgagatacgtcatcctggagaaattacagtataaatggaatttcctgatccttgtttgtgatttcctcaccatggcatttgtagaattcactggaatttctgattagtggtatatatatttccttcctttctccttccctccctctgcccctacccctccctctctttctccctccctcccttctttcctccctccctccctctcttgctgttatttgtggtttggcttgttttaagacagactctggctatgtggtacaggctggtctcaacattgcacctatcttcctttaacctctgagggctgggttctcgggtatgcactacaatacatgctaggatgtctccctgtgtgctgcacctgctacttcttcctagccatcatgtgctacatggcaagactgtatcatgcactttttgtgggtcatatgtggaactgaatctagacaagtcccatcctgcttatggcacagactaagttccatactctttctaaaaaatattaaactttatgtggttacagagcccatattttgaaactgagcctctcttacaattcctaccaccaagcctggatacaaacccctgaaacagtcaagtcttaaacgagaacttgaatgaagagattcaaactgtgaagacaaggaggtggagtatttccattagaacacacacacctaacagtatgttggatggccagcttcacagcttagctgctctcttctgctctgctgacaccttttcctagggatgaatgtgtgtggggctgactacactgtaagaaaccggttgccggtggactcctattagtggatgaggggtcttaggagataattagatctggttcagcacaaataggcattatgatatcatgcttcctgtgttactcatggggtagagaatggaaacaaatcgggtatgtagccacggatggagactttgcttgagattctgcatctcttgccagtcctctaagattcccttggcttatacccctccttccacacactgctgggggctcctgaagaggagaggcctctcaggcagccattgcacagatcatcaagagagatgtgctgagagaacagggtgggagacccacgtaaggaccccaaatgggtcctttgctaggctgtggcccctgccagagtccctaacactcatctgcatatgtttgatagtgacggctccatttcctctgcagccgccctgcttttattttttatttatttattttttagatttatttatttattatatgtcagtacactgtagctgtcctcagacacaccagaagagggcatcagatctcattacgggtggttgtgagccaccatgtggttgctgggatttgaacttcggaccttcggaagagcagtcgggtgctcttacccactgagccatctcaccagccccgccnnnnnnnnnnnnnnnnnnnnnnnnnnnnnnnnnnnnnnnnnnnnnnnnnnnnnnnnnnnnnnnnnnnnnnnnnnnnnnnnnntcttctttctcttccttgtccttctcctcctcctcccccctcctcctacctcctccctccttcttctccttctctccctcctcctcccccttccccctcattatattttctgtcatctttgctgtgagcccaggcctagacctctaagatctgtctgtcagagataccattaatgcctgcattcagtcctggattgttgcaggcagctgggagtgggaggaagtgcttatggcctctctagagcattccatgcagagggaagcaaaggaattggcacaaaatctgaggtttataattaggagcctgagatctcaaaaatgttctgagccttagaacttggggccatttacatgtaacaggaggctggtggtgactttcaaatctaataaaataaaatctgtttcaaatgaattcagtatcatctgattaaactgaggaagatactttgaggcagcatcataccggagggaagactcctggccaggtttttgccttcttcctcatctcctgctggagagtgccattgtcaattgcagacattcatcatgaaggtagtggtgcaaagcctggaatgccatcagggtctgaggctgagcaattgcattgtgacccagatgtgggctgtgagattctggattctcatactcacattggagctcatcatagctggaataacatccttaaaagctagtgtgaatttcccagttagttagtctgaggaccagtctaggaactgccattcacatcagctacatcactcgaagagactatctttattgctctagacctggatttccttagtgaggagtttagacattgtgcttcaacatttttaaccttggtgttttttctggaatttctttcctgagtcatctggtatcgtgacttgagtcacgttgaactcttcttgagtcgccttgaactcttcacgaattgatatacatcaaggacattatgtgacaattctggcatgtgtctttggcataccagaccctactaaatgaagttacatccattccacaccctttattctgctcctcagtttatggtttaaccagcagtgcagtacacagaaggcatcaataacctcaccttatttcttggcatctttggtgtctaacagtcctgattcttttttgctgtgtctccagagtgcaaacccatgaaggccaggccttggtagtgttcacatttacattggtacatctagcttagggcctggcccttagctggcaaatgactgactgaatgataattcccagcttgcctcagcaagcagtattcagcagctctttccagggattgtgggaaccctggagcctacccaagtagcctcatacagtctgaatggggggtctttctctccttagggatcaactactgtgcactgaacaaaccaggctgtgagcatgagtgtgtgaacacagaggagggtcactactgccgctgccgtcagggctacaatctggaccccaatggcaagacctgcagccgtgagtgtgccccaggggtgtgggtgctgatggagtggagaccaaccattcaccatcctttgggctcattagcatccatacccttccagagcttctgggtttcctgcaatttataaaccatcaagtgtcactgttagtactacccactccaaatgttgagttgtaatgatcaagagaatccatatgggggctagagagatggatcagtggttaagagcacttgctactcttgtaaaagacccagattctgttcccagcacccacctagtggctcattactgtaacaccatttcaggggattcaacactctctaatctctatggatgccaggtatacatataatacatacatacatacatacatacatacatacataatacatacagacatacatacatacaggcaagattctgatacatataaagtaaataaatctaaacaaaatttaaagagagttaatatatgctaagtacagtggtgtatacttaacagtctcagcactcaggaggctgaggcaaaggatggtgaattcaaaaccggcataggctctagagcaagatgtcatctcaaaaaattagaagagaacaagatgggggttggggatggaaataaataaatgtgtagggtttgtggtggtttgaatatgcttggcccatggaatggcactattaggaagtgtagccttgttagaggaagtgtgtcactttggacatgggctttgagaacctccttctaactgtctggaagccagtattttcctgactgccttctgatcaagatgcagctctctcagctcttctagcaccctgtctgcctggatgctgccaagcttcctgccatgatgaaactaaaccagtcaaattaaatgttgtcctttatagaagttgccttggtatggtgtctcttcacaacagtggaaatccaaactaagacagaaattggtaccagggactgtgttatcgctgtgataggcctgaccacgtttttgtttggagaaatgtggattttgggactttggatttggaatgacatagaatgctttaagaaggaattaataggccattctagtaggactacggaagacattggtattgaggtgatttgaactctggagatcatccttatgatgttttggtgaagaatgttgctgctttttgcctttatccaaacagtctgcctgagactaaggtgaagacatttatatttattgcattgacaaaggaaatctcaaaaaaactccagtatagactctgtcctctggtttactttcatgaagaacattttgatcaagcatagccagcttagaaaggaaaaatacaaaatgtgtggttcaaagagtaaaggggtaccaggaagtagaatgaagctaaactctgtgttcaaggatattaaatggaattaaggaagtggtgacctccatgcaagatcccacccagctaaacgtatatatttgcagttgtatgagggagggttatatcacgttaggtgttattatgacctggttattgtcttcatttggacataaggagatgtgattgtgtatcaaattgacaagggatgggttgtgataactattctcagttttcaacttgattaagatctataatgaaacgcttaggttcaggcatgatggtatactcctttaatcccaggagacaaagacaagcagatctctgagttcatggccagtctagtacagaacaagttcctggtaaaaagaagcttaagtatagctgtggtggcacacacctttaatcccagcattcagaagaccgagtctaagactcttgagttcaaagtctatctacagagcaagttccaggacagccaagcttaggcagtgaggaagttgaaaaagagaaagctggcaatacattaagaaggccatgttcctgccacagcaagcagcagaacttggcagctttgaccatgtgaatctggctttatagtcaagaatagaagagactactgggacaagtgatactggttagctggagctaaaaaattagtggtgattaagaagagattagcatctaggaagtgttttctgagagcacaaagaagctatgttccagagatagatagccaaggttgtaccttgtgttgcaattggacttggtaatgtttaaaaatcacccaggtgatactggttttgaaggcatgaaggggtcatggagagcagctgaggattggcactgtgagaggccatggaaggccattggtgaaggtgcagcttcagatgatccaggactaaaagggtcacacaaagaagttgagccttggcacaataaagagtctatgagaagctattggtcaagtctagttgcagcagaaaatcacagtatattgaagatgccactaccgtgggatgaccaccaagaacagcagcatcagtggagtagaatcaaccagagcctagagttagttctacagaggacagagttggagaagtgagccaagccctttggaggagtccagaagatgatgtgtggatcctagacattggaacaagaatctgtaaagttgaagttgcctgaatatcccaagatgttagagatgtaaaagctatgggacacctgctgaggaaagctgctaacagggagttgagccagcccaagagaaagaagtttgttgctgtcaataaagatgaatagagttggagatttgaagagcaatttgacttcagacatggagacacagagtttggagtttgcccagctggctttttgtcttatttcaggccagtatttcctcactatgatgttttagaatagtatcgtatataatatgatgttggaggtatgtgatctgctttttgattttgaatttataggagattacagttaagtgattaggtgaatctcagaagagactttgaacttcttacattgttgagactattatagactatggggacttttaaagttgaactaattttgtattaagctatggctaggtatgactcacatagattcatgtgttgaacaagcccatgggggttaagacatggaatgtggtggtttgaatatgcttggctcagggagtggcactattggaggtgtggccttgttggagtgttggagtaggtgtgtcactttggatctggactttgagactctcttcctagatgtctggaagccagtcgttttctggctgccttcagataaagatgcagatctctcaggtcctccaacaccctgtctgtcgtgtttcctgccaaaatgaaattgtaagctagcctcaattaaatgttgtcctttataaaagttgccttgatcatggtgtctcttcacagcaattgaaatccaaactaagatagggttgagggtgtaagctaagtcagtaagtagaatggtaactttgcatgcacaaagctattggttagatcccagcaaaaataaagctgggagagccaggtgtggtgatgcatacctttaatcccagcacttggcaggtggatttctgagtttgaggccagcctggtctacagagtgagttccaggacagccaaggctacacagagaaaccctgtctcgaaaaaaaccaacaacaaaaaaataaataaataaaaaataaaataaaataaaaaataaagctggaaggaggcatgggggggcagagaatggagagagagagagaaatgaatgtgtaggctgcttagaatagggctgctagctgctattagtctttgctactaaaagcatttgctaaatcagataggcctgaattcaaatctaagctctgtcacattctatatatgtgatttggacaggttgttctcccagttttgattgcctatttttaaaaattaatagcattgattccccaggtggttgtggggaataattgaggccatttcaatctcgtggtctaatgcctggtttatgataaacataatactagatacaaatatagtccatatcaacaagcctgtgaaagtgactaacggccagtaccaggttgggacaagaagtcagaaggggtagaccttggaaaactttggactacccaggctaatgtgagggggaaacagggcaacatgggaattttgtgaagttgttcctttatttccttctattggacccaccacaagcttagtgacataaacatatgagaactttcagatcttgccagctggatgggcccataacttttttcttttttgaggtacagtcttcacagccccaagccagcagaggctaagagtatgtgggggctgtgatagttaccatgacacactgagagctggggctagtggctacataagaatcatttctttgtgctttgcaaacagtacactatgtactgcttggctctgcaggcaggaggctgagtgagaagcatgcagctgttggacatttggacccttgaatgccaggaagggaagtttcacagttgaagtatgagatacagggccagcctggggggacctcattcttctctgtcttcagagggagggaaatgtggctttctaagcatgatcccagaagtcaagggggttttgaatgaagaggttgaagcaaaagtcagcactgggctgtacactttcttctgactgtcactgggtcctgagctgaggggaaggagaaggagatctttgttcaacaagaagatgcctggctaatggaggtgccaaatcctgccttcttctcagcatgtataggtttggcttgccactggccctggtagtaatctgcaacttcactgagtctaccttaggcattaaagcatccttgacttcctgactctcccagcatgccttgggaaatctagaagttcagatgtgagcccagaagagatgggggtctttataagatttgtcaatatttagaaaatataaaccaagctgtttctgcccagaagtcctcagggaaactcatggggttcttagagagccccaagcaagacggcagccaacccttctgaggtactcattccatgttggcacagttgtgagcatcttcaacaccctagctctcacatgcttcccaacagttgggcctggtaaatggcagttcaggatatgagcatgagcattcggctcctgagactctgaaagagtttccagtaggtttgcctgccagtagactgttgcagaaggcactagtcctcagccatgcagagtgaaaaggcttacttcagtgggctgtcgtgaagtcctcagtgtctgtccagctgatgggggttacattttctccattcagtaaatctgtgaggcagcccatgggactctacgtgggagctagccaccatagctgtgtgttccctggctttccactctccctgcccaagcaccagctgtatggtgtttaggtgccagaagaggccacacaggcagctgaggcttttgtttcttctctaaatctggatgtcctgattaagagaggttttttttttgtttgttttttgtttttcttttaattgacttttttattttcaaatagaaatgaattacacaataattctgcttgtcttatgccagcccctggagggcttttagatggatcatctcctctgactttgactgcattataccagaaagtaaccaccaggtatctaagggggaggtctcggttctacatcagaacctgggtaagagtggaggtgtgacagtgtgcactgtgatcgcagcactggaaacagaacagtggaggcttggacatttttttttcaaaacctattttagtaaaggttcttaaatgtttcaacttcccctctagcccaccaaccaaaggtaggggagaagaaaggttactaggaaatgggagatgtggacctgtttagaagtagttcttttgggtgattccaaacattaatcagtagcagctgttcagtccagaagaaaccacaaggctctgtcgaatcagcacaagtcctctagagtgtcaggaagcagctggaataccatgagaagttctttggttcttttctctctatgaagtcatgacaagtaaaggtcagaaggtcagctaagacctgcaaactgttacaaggtgaactgatgcaaaaatctgttgggctctttccaaacatcacagtgtcctcttgtgtgtctgcttcaacgaaacatactctcataagacagcttccagaaaaaaatatcacatgacacaactgagtttccaaataaaccgggaatttccacttcagaaaggctcctgttagccagccttgtgtgaacaaacagagtcaagggaggcatagaaaagaaagggactgctatcacccctgggtaaggaggtcacagcacagagaggctaagtgtgactcacacccacagctaggacatgggaatcagccctgtcttagtttgcttctctgctactgggataaactctatgaccaaaagcagtttggagagaacacagtttgtttcagtttacacttccaggtaacaatttatgactgagggacctcaaggcaggaactgagccagagaccacagaggaacgctggtaccgccttgcatccaggttcatattcagcttgctttcttataccactcaggactaccttctctggggtggcaccattcacagtgggcatcaatcaaatcaaggacatgccacacactcccacagcccactttgggggaggcaattcctcaactgagactttctcatctcaagggactctaggtttgtatgactgacatggagcaaggctgatatctcagcaagcatagctctttccctgtggctgctgttgctgccagaaaggctttgcttagccttgctcaatggtgtgttggcacctcggtccctttatgttttcatattttgtgaccattgcaggggtggaccactgtgcacagcaggaccatggctgtgagcagctgtgcctgaacacagaggagtcctttgtctgccagtgctcagaaggcttccttattaatgatgacctcaagacctgctccagtgagttcccctttcacctctctatgggaagggttcccaacagaagtgcttgtatagacaatgcagagaacagcatgttctcctctgcccttttttctcccccagggagactaaggggaaatcttctgggggccgcatgctttcaatggcaataaataaacagttacttgattcccatcatagccatgaaggcttgctgagacaggctcagggacctcacttggctttggtctttcaggggcagattactgcttgctgagcaaccatggttgtgaatactcctgcgtcaacacagacaaatcctttgcctgccaatgtcctgagggtcatgtgctccgaagcgatgggaagacctgtgcaagtgagtttcattacacttaagatcctgggacagacaggctcagcacaagccctcacgggtgccagtgagttgatgacactggcatgtacctgtgcatcctccttcagacttcactgggcccctggtgatgtgtgtgcctatatcttgaagccactggtgttcctgcccaaaactccttcccacgctcctggaaatggctctgctatctccatgccctgccttgttagcattaagaaacagtccctcatttttggtgtgctgcagtggtttgagttgtggtttgttcaaagttatgttcaaatttagttgctattatgatacgtttgaaacatggcagttttccaaggtgattgtgttggtgggaagggttaactctcgtgggagttggctgattacagagaatgagcaattatagtgtgggatcaatccctctgtccccacctcttgtacataagtcctcactgtgctttcctacagtgagatgaagcaggatgaagtcctaacttcttatgcttctattcttccttgtcactctatccatgtgctgtgatagaactccagagcacagactaagacatactctcagctctacccctagccagtcaaacctgggacccacaatacagagacttgctgactgcaagctggctgcatgccaggtgcttagcactgtgctaagcccatgctatcacactccaaggacagatggattggctgcagctcagactcagggaagagtccaagatggctcttgtcttagtcagggtttctattcctgaacaaacatcatgaccaagaagcaagttggggaggaaagggcttattcggcttacacttccatactgctcttcatcaccaaggaagtcaggactggaactcaagcaggtctggaagcaggagctgatgcagaggccatggagggatgctctttactggcttgcctccactggcttgctcagcctgctctcttatagaacccaagactaccagcccagggatggtcccacccacaagggccctttcccccttgaccattaattgagaaaatgccttgcagcgggatctcatggaggcatttccccaactgaagctcctttctctgtaataactccagcctgtgtcaagttgacacaaaactagccagtacagccctctactaagtagggtctcagtctgtgtgggagctcagttagctctgaaaggcagatgtctgagaaaacttttgccttccctgagccctgtcaccttagcacaaggccagattggcagtgatattatccaggtatctagctttacttgtagctggctttaactcctttctccatttaaacaaacaacctaacgataaaattccaggctgcatcacttcttggccttttggctaagatcaagtgtaaaattccaggatgtttcactgggcagtggtgataaatgctttaatcccagcatcaggaggcagaggcaggaggatctccatgagtttgaggccagcctggtctacagagccagttccaggacggccagggcaacgcaaataaactttgtcatgaaaagccaaaaaacaaaacagaaacaaaaacaaacaaacaaaaccattctctcatcttccactaaagaatgctgtgctttctgcccaatgctactatttccacatagaacaaaatgaagaactaagaaccgtctgagagaaagggtaaaaatggaagcaaagacgatactttgctttccctggctcctgcctttctcattatcagaccgagttccttggccagtggcacaactgaagatgcagcagtcatcctccccctgcctgtgttgtcagttcatgttgacagctgccctgccatccctgtgcttcctgtgagaaacacttgccctctttggaatggattcttggaccttggcaagtgggctatccatgttgctgcttgcttgtcgatctctgcccagctgcctcacagactgctgctgcagccaattctaatagggcccgggcactgggggtgtggaaaaagggtgggtatgttaaataccatctatacttgcctgccttctaaagccggatgtgagggggttatgggttttttccctcatttgttttccttgctctgataagcaagagccgagggtgagatgctcgcaggactgcttggtcctcccgccctcgcctaaccaggcttttgctttcactgtccttaaaccttgcctgttttcacagttaaagtgtgtttgtaactaagggaatggtgtcattgtctatgtgagtttaagcccaacaagggtctaaataaagagccaacatcaaatacaagtgagctttatgtctggttgggcggtactgagaacctgtgaggtaacctgatgggttaccacatacctcagaactcacggggcagaagcattttacccggcagagccgttcccctaattgaagactttctgtctgctctcaagtgattcagtgcagctgctccatcctgtaatcaaagcctgagttttcactgtagtcacagctaatggggtgaggatgactgtaccccagccccatgccagatggtacagagccagataacatgactgtaccattttagtaaagtctggtggactttactaaagtaagcccaggtctgccagaccttgctcaacacacaaggggttcctcagcctttatttagactgttgacaacaaatggtcagaagagcctatcactcattctggaaggtgctgaagtatagaactaagtccaagttcctgggtcaaagcaggtactgactggcatgacgcctaccctctcttcctctcagtcctctgatgccagattctagctatacagtttgggagtgagctggggtgggggtgggggtgggggaataaggaggtttcttctcccagccacagctcaggggcctctttccctcactagaatgcctttcccttaaatgcaacttgcacaaatcagcaccgtgccaaacaagactccacaggcacagtacaaatggagtgctcagcccgcagtcttcaagaccttgggagttgagtcagagtcagaggccaggtcttacctggtgttcccagggcccagtctagcaaagtgagatgaatgggttagcagtgaacagagaccatctaggtctcctttaactccactccaccctgtcacctgtaatgaatccctattgcctcccgggggtggggggggatcactaacaatccttgactagcagtgtgggagagcccctgttccacctatgcttcagctagcccctcccacctatgcttcagctagcccctcccacctatgcttcagctagcccctcccacctatgcttcagctagcccctcccaccttgcgtacagaaacccagtctatcaccagagtcagccccatgtacagaaacatatattcagagacatgttttaaaatgtgtagtggaccttaaaccatatggctcccctgttagttaaggtctcactcctcagctttagcctgttgttcaccaagagacccaaagagacccctgtattgctgtctggagacctctcgctcagggacaggcccgggcacactctccttgcaggccagagagagataccctcctccagaagttagcaagctcaggattcacacactgtcctgagagaagcccttctttccagctgtggaggacactgcttgtacaggagccagagccttgaagcttctgggatccaactggccatactcccagtccatctatcacaggctaacatgaaaaacctcttcagcctcaatggcctgcccctgtcccaccccaagcctagttgtctaagtctgctctgaaagccatggcaaaataccacagactgcatattgttttctaaccacagaaatgtctttctcatagtactagaggctagatgtctgaatgcagggcgctagcatggtaatgctctggtgaaggctttcccccaccaatggcgtgtccactcatgaaggaagagagatggagagacagggagtgaatgaatgagctctttggtgtctttttaaataaaaacactagtcctggactgtcaagatgactcagtaaagtgcctgcctcggcagcctggtgagctgtttaagcctgagagtgcacataaagataggagagaactgactccagaaagttgttctctgacctctagattgcacgatagcacatcagctccccatcacatcatatacccttgatgatgatgatgatgatgaagaggaggaggaggatagtgacggtgatagtggtgatggtaataatgatgatgatgatgatggtggtggtggtggtaatggtggtgatggtgatgactagagtggtgatatatggatgcttcttagtttaagaaaaagcttctacaggggcaccaacaggtcagctgcccccactgaaaccatcatgccagctgttgaccttggtcaggcaccttcttggcaaactacccctatgaccatctcctcctaaggtcagttgcatttcaattacattgtatgtggagttcaaaaccagaccagagtcactatctgtcattgttgacagtctgactacactggacacactaccccacaattcctgaaactcccaccccacacacaccgcctggtttataacttagatgtgggaagcacagtttgtgtcaatatacatgtacctcaacaacctagctatgcggctcagccttgagtcatcctggtcacagagggcagagcctgttcacagtgaggccttagttaaatgaaggggaaggcatgtctttgagtgggagatgtttttgtcctgcttcctgggacttcttaaagcttctaccctgttctgctttagcattgattggtaactgagtctggttcatcttcttgtctgggcagagtcttaatatctgcttcagcacatgttccttggcccatctcctctcccgtgtctgcctgtagtgcacgaggtgctggtggtccctgggactgacctaattcagtttcttccccagcagtggttagggttcctctggaagaagtacttaagatgtgtcagtcagtctgcatggtagccaccgggatgtgggcagaacggccacaagagcatggagtagggagtcccaggtctcaggaaagatgttaaatttgatgctagacactcaatcaggggagccagccacaggtacaacccacgagcttccctgacacaggtggacagcagcagtgcaggtgcatggtccagatgggccagagggaggtcaatgccagagggagtcacaggagcaggtgggacctgtcacctgtagcacagggtgacaggaaactttctggagcttaccttgagccaactattaatttgtcttccaagaatcttaccagactggctagccccatagagttgggagggaaacacagaggggatgaatctgtgaactactgggttcagtacagctaagacaagtcacctcttcagtttaaggagccttgagacagtcacttctgctcactggccatcagtttcctcatctctaaagtggggttggaccagcatacttccaaggcctgttttagcctctaaatatggatagaagtgggcataggtcattgttccacaaatgcttgctaaacaagtacagtcctgcctggagtgtacactatttctgcaggccggtggcaagttagagatggtgacttaaaggacacactcaagtacattcccatagcagagtatcatcggccctgagagaagctgaggccaagatgccttccagagtgggtgggcaggtaggactagcctccctgagcaggaaatgagttcagagcacacttagcattctgtctcttatggcatatggtccttggaattcctgtgacctcacacaccctctgcatgcagaaagtgggcagtgtgagaagtgagaagtgttctataaggctaccttagaggaaaggtggggagcccgggagtggggagccctgcagtaataaagtccacatcataggatctggtggacattctcaatgaaaattctaggtagagagtgttgggagtcacgggacctttgaaacctcaaatcttagcaccagtgatacacttcctctaacaagaccatacattccaatccttctaatcctttcaaatggtatcactccttgatcactaagctttcatatataagagcctatgaggaatattctttttcaaactaccagattccacttcctggcccccataggcctatagccatgtcatagtacaaaactgtttcatgtagttttaaatttgctactgcctttgcccaggatcagccaagctaccagcccctcctgtcttcccttttgctttgcccacctttggttccaggaggtaatcatgctaccagctctttctcagcttccctgaatcctcggataaaagacacagacacagtttgttactttacaatttgccttcttggaacagatatctccctcctggaaaagcatgtccttatcaatttattatctctgtctctccacctgccctaaacttaatggctagtcccatctggcccctgtcaaacatccttggccacccacctgtagtggaggccacaagccccagctttccccaagacctcacatgattgctacattcttctttctccaaagcatggcagaaagccctctctctttcctgtgcctcctttttcctcaaagtaccacctataccttcaacccagctttcttttttttttctcttttttttactgtacattttttaaaaatttgttccaaatcatttgttttctacaaaatcatgcaactctctttttttaacagttttttattttatttatttttttattagatattttcttcatttacatttcaaatgctatcccaaaagtcccctatgccctcccccgaccctgctccccaacccacccactcccgattcctggccctagcattctcctgtactggggcatatgatcttcacaagaccaacggcttctcctcccattgatggcctactaggtaaaactctgctacatagtcaactagaaacacaagctctgaggggtactgtttagttcagatttcaacccagctttctttactggccaatcaagaaccacttggggaacaagacctttctattagaaactctccttacataaaatgcattcaggccaacttcaaaagtttccatcgtctatcacagtttcaaaactgtttaaaagtccaatgttcaaaatctcttctgagactcaaggcactctcttaagagttacagttggggggagggtataggggactttcgtgatagcatttgaaatgtaaatgaagaaaatatctaataaaaattttgtttaaaattaaaaaagaaaattaatgtggtacataattttgagaaataccatatctatggaaaatatacaattaaaggaaaattttaaatgtggaaaaatataaaatcaaaataagaaacagatcacatactttgagcatccaatgacatggggtgtacattagcattccagaagtaaggaaagggagcatggcgaggcaatactggaccaatgcaagactgaaaaccagctgggcaagctcctctgcacccccatgtctaacagctaggatccccaacttctttcatgtttctctgtcttggcctggatccacatctcatctgcagcttttcttgacaggtatctcacaattccagcatctccaacatactggagtttccagcacagtccagcttcacacaatgacatctctgggcctcgtgcagggacttttcttttgctgagaagggagtgtccacaacccctttcatgtatccttgccactatagcagaatcttgtaactaaagctgctaattctgctgcttgctagagctgggcctcaccccctccttcagttacatttgcatcacctttctgctgttggcagcttccatcacacagaagccttccttcattactattcaaaaattgggagtgtagcgcatagggtcttgccctgaggtcaccactctcatttagcatcaggctcttctttaaactttttatctcgttgtgcagtgaactccattatactttttggtgctccttttatcctcaagctgtacattttgcatttttctctgcctagcttactctttttcacatagatctgcataaaagtggttactaacaactacatgacacagtcaatactagcctgtcttgaaatctctgctgacaccataacaaaactcttcaatttagcctcagatagatttttaggatgagggcaaaaagcagccacactccttaccacaatatcacaagaatgtctctaacccacttactactcttcttttcgtcaaacccagctgtcataatctacactgctcccagcaccaccattagttaggcccctgccaaaacattcaactgctttcctaattcagagtcctaaagtctacattctgccatcaagcagtggtcaggctgcttacagtaattactctgacgactgttttagtcacttttctattgctatgaagggacaacatgaccaaggcagctcttataaaagaaagcatttaattggggtctggcttacactttcaaagttttaatcctttgttatcatcacagcagagaacatgacagcatgcacataggtgctggaacagtagctgagagtgacacactgacacactgacccagagatagaaagaaaaagagacagatagacagagacagacagacagactgactgactgactctggccttaccttggacttttgaatcctcaaaacacacctccaagtgacacacttcctccaacaaagccatacctcctatgtttcgaacaacaccactcctggtatctaagcattcaaatctgtaagcctgtaggggacattctttttcaaatcaccacaattacatagggaagttcctatacataaagatatgtaaagctgtgtaatgttccattgcatttggtcagtcccgtttctggacactttggttgactctcacttttcacctctacaaacagtaatgtagtcagtaacttgaaagcacatccctttacatagtgcaagggtatctgcagaagggaatccctacatgaagttgctgagtgcattctgtaactttcatagacatgtgtgccctttagtacagttgactttggaagctgtatgtgttttccctttagcagtcatctgtagacgtctcctatgactgactgagcatcacccatcctgttctggatcagataccctgaagggatgaaaagaaaagcttataaactcttacttactttaaagcatgtacattgtaacagttccaagagaactgaggagctgggctggaggctgccgccatatagccaagtataagaacacgagcctatgggcacagggcttctccctggctgtcctgacctctgataaagaaaagcagtgccatctgacagacatgggcttgggaaacttgagctcagtcgcctgtatctccattgaggaaaaccctgtagtcttcaagactacaggactgggtttaggaagtcccaggcagaagagtgtgatcagaaagtccactttggattagggcttggtgatattggcctgagcacttttgctattttattaccttggaaaatggagtattcttataaatgcatgaaaaaggaaatttcccctctgtgccaacaagctgtctgtgctgtgtgccacttagtggtacttttaactctgtgaggaactacccagccacagggaattattctgcattaataatgagtccagaatgtgtccagagaagtgagtcacacccagagcaaaccggagcaccaacctctgcttagaatctcctctgcagttaaatgtccagcctacatcatttccccattgctcaaacattctggcagtgttcctgcccaaagaaaggcaaaattccctttgtgtctgaaagcttagcagatggtgatgctgtgtagttgggaaaagttatggaattcattatcaaaaaatttttaatctggttcctccatttattagcaagtggtcttggcgagctgtaataagccttcctcgactttaatttctcttgctagtaaatgagaataatattggatcccttaactagcctacaggatatatttctgaggacttcccttgtctaaaaaatgttgcaatgatgcttaacaaaaacaaagttgatgggttcttcctgttgtaacccctgccaagccccttttccactttggtgcacacccactgttgaaatcctgttcactgtctaaaaggcttagttagctttcagttaactgtatggttctcataaactcttactgttccccgatggagctgaagagataactcaacagttaagaacactggctgctctttcaggggtcctgagttcaattcccagaaaccacatggtgactcacaaccatctgtaatgaggtctgatgccctcttctgacatgcaggttacatgcagcagagagcactcgaaaataaaacaaacaaacaaataaaatgcagcagagcactcatgcactaaattaattaattaattaattaattaattaattatttaaaatgtcactgccacccagccctataaaataatatgctacattcaggagctcagtgtggtgatctcagagttatctctgactcttgtcctaaccatgtgacggtggactcttcatttcaagtgttggaaaggacagaagttgacacaaaattgtccttcagatgaactttactaggagagatcttcatgatcatgagcagctgcgatcaggccgtgacatgggagaccagtagcaggcacagccacaccagagtaaagaagctagtgagaaagagtcctggattctaaagaacgaaggccatccggatccggcgttgtcagtggaggtggccagatccataccatgtgatctgcctggcactgactgaagtgtcttcaagggttgtctgtggtctaggcttgctcacagctgcaagagggaagagagaactcccaggaagacaggcttcagggaggtgcggcctgatttctggaagggggagaaagacagctagaagatctgtgctctaacatcaatctaccggcaaatcttataggctctaccatcggaacataggcagtctgaccacatgatccactgtgttctgggccagcaggatcactgcagtaggctatatctgtttcctgtgttccttccctgcattcacagctttctgtgctttcacaacacagccaggctaggggattctcctgctcaaaacattctatgactgcccttctccctcagacatgtcctgcctatgtgccctcatgttgtgtcctgcctacccccaccctgctgggctctttgcctttcctgaaacatggcgaacatgttcttggcatcttcatcgtgcatctagtcatccttctcatccagacacttcctcagacaccagcactactcacctcctctccatctccagggctctgctccttagcagacactataaggtgtcaaactccaacccacttggcccctttgaccatatatatatatatatatatatatatatatatatatatatatatatatggttatatatatattggttgttctgtccttagtgtctagtcaatgtctggcccacagcaagaactcacaacacatttgctgattatctaggtgtgttgaagcttaccttagtgctcaggctaaagcgtaagatcatgagttcaaggccaacctgggctacatggtggtagcctaacttgaaaaaaaacaacaaaaagctttgctgcctttgaataaacgaatgaataggtcaagtgttctacgtgcatatgtagatccacaggaaagttggtgttagacttattctcttttagtcttagctatttacatctccctttggaaactgtctttttctgttttctttccccctggagctgtatgttttgctttatgtatgtcctttttatatattaggaaatttttgctcatagacactttctatcctgaaatgaactctgtgagaaaagacaccgttttcatttaagatgtctggaatgtcttttagaaatgaataggtcaccattcatttatctatgaataattttcttccatttttgtaattctaaccagaactggactcttgtgctttgggggaccatggttgtgaacattcatgtgtaagcagtgaagactctttcgtgtgtcagtgctttgaggggtacattcttcgtgacgatgggaagacctgcagaagtaagtttactagagctaattcatacagccatgcctaattcacactgcaggcttaatgtgagccaactactctcaacagctaataccacacaatcaaatgtcatgcagggtccttggtgggatcctgaaacagaagaggggtgctatgtaataatgaagtaactacgtataattataggttttactaaataataatttgtcaagccaggtgtagtggtacttgctttgcttcccattactcaggacacagaggtaggtggatctctgtgcattcaagccctgtctggtctacacagcaagttctaggcttccttacatagtgacaccctctctcaatgacagcaacacactaagctaggcctggtgagctggtggtgtactcctatcctcctagctacttagagtgctggagagatggcttagtgattaagaatacttgggtccttccagaggatatgaattcagttcctagcatccatatcaggcagcttacaggctcctgtaactccagctccaggggatctgaccccctctcctggcttttgcaggcaactacatgcatgtacacatatccatacacagacacgtaagtaaaaatataagtaaataaatggactaaggatgtagcttcgtggttagagcacttgccaagcatacataaggctctgggttctgtccctaaaactccaacgacaacaataacaatcaaagcgcagtgtgcacgactgggcgaatggatctttgtcagtcctcttctctgacttctcaaaactcttcccaaagagctgtgaaggaaagatgagtacctggagtcgttactctcatttcagacgggaaagctaagtttctaagaggtttcgtgattttcctaaatagtagattatgccactgacaaaggtaagatcagctcccagtgctagcaatttaaaaccaagctttcccctatgtaaccttaccaacaacaccttctcgtgacaccagaagctatgcctgcagaccgctggggctggattgcatcctgagacactgaagttggtgctggagagtggaggtggctatggcagtgggaatgtttgaagacggaagtcaatccagagccaccagacttcatccagcttcaccttcctactcaaggagcagtccagagcccaagatgaatggatcttccagggggagtccacgtagactttttgttgatgcagttgttttaatcaccgtactctcctcagggaaagatgtctgccaggatgttaaccatggatgtgagcacctttgtgtgaacagtggcgaatcatacgtctgcaagtgtctggaggggttcaggctggctgaggatgggaagcgctgcaggagtaagtagctcaaggtctgcatatggaactgggcacagctcttcactggatcctcacattctacctctgtagaattcgtaaccacgttacaaactcacatcccacctgtgggtgctctgaaggtgtttccaagggatcaagtgagctgactctgggctcttcaggaatttctcagtggcagtcctaagttgtcaggcttctgttctgtttcctcccagcacttgcatggtggttgggtagctgtacagggcctaatttagtgcctagcaagctgatgggaaaatctagaatcattggtagcaattgactaccagggccaaaaagataatttcagctctttttcttcttggcagaccatatatgtaaggtaggagaagggccggagggaggttctgtggggttttgagaggggaaagaaacccaaactaacaacaaaagaagacttaccatttgcttccctagaccaggtttctcaagcagagtttcattagaaagctccggagggatctcagagatggctcagttggtaaagagcttgctgtgtaggcatgaggacccaaggtccatccccagtgctgtgtaaaagaaagcatggtagagtacacctatcacctcagtgtggggaggcaaataccagagaatcccagacacttgctggccagccaatttagttgatttggtgagctacagcctcagagagagaccttgtctcaaaaaataaagtggatagtgactgaggaagacattgacttctgacccccacaagcacaaacatgagtgcccacagatagtcacatatacgcatgctaggattctccagaaaagtggataacagcgtttatgtggcagaggaacacgtacatacatgttgtagataaaggaagaaagggggagaaaagaaagagaaattgactttaaggaattggctcatgaaattgtgagggctcgtgaggaggacgtctctttgcctgctctgaaggccttcatgtgactagatgaggcccacacacacttgggaaggcagtcggctttactcagaatctgctgatttaaatgttagcctcacgtacaaggtacagaaacttctagacctgtgcttgacaaaaaaacaaaaacaaaaacaaaaacaaaaacaaaaaaacaacccaaaaagcgggcaccatcaccagttaaagtttacataaaattagcagttatgctactcaagaaagagcagctcagtcaagtggggatttgaatataggtatagactttcttccctttctagatgatagttctctttaaggggtgggggttgataatatctatatggttttctgactctactgtagtggatagaatggtcctttcttggttaaacacagcaagttcattttgttttgaggttgctttgtggcagtttcctcacagactccttgagagcatggggcattgcacatgtcagcaaagctgagtagagaactattggcaccattcttctctgggagcagggcttgtgtctagagagaggctctgatgtgaatgagtgcattggggccctggctggcctctgccagccttcctgcaccatctgaccttctagctgaacactgcagtccttctttcatagagctcatgctttggtcctgtccacatgtctggatgagccaatttttctattcatttaacatatttatcagtcaataccttgaacaggtggatacgaggcaatatttctagccttacaattttatccctaaattaaatcccacagtttccaccttcctagtggtatctctagttacagattataatttcatgtaaggtttctccttttaaagggtagacagaggctcaggggtgtcatacaatcagaaagtgaagactcagggaaatgtgccccaactgggcaatcctctggccagacaaccttgtacaactcagtcagatacatggcatccatagctttatttattctctgtatgtacctagccacgccccaagggtgttgttaggattaaagggtcattaactacttcaaaaagctcaaattacctaacccatgagaaatgctcattatacaaccagcatggggtatctgggatcgctactaagaaatatgaagctaacacctatatagccattctaaaatcaaatggcaaatccaccaggtccagtagggtcaaaagagctctgacgggaactgccccttgacctcagcctattttggcacagactgcaaaggcaatcattttagcaatgatatgtctttaagatggatcacttccttaccatatcctgacgtgactgctcttgatagcttctttctacaataatgggttgttcatctccccacattttccctagggaagaatgtctgcaagtcaacccagcatggctgtgagcacatgtgtgtgaacaatgggaactcctatctgtgcaggtgctcagagggctttgtcctagctgaggatggaaagcactgcaagagtaagtgaccaaaactggctcgctgcttccatttagttttggagcaatggctttttggagcattttcaggcaatagactccttagctctccttctgccatagatgtatatgcggacagcaacaacagccgccagaacacctttgatttagtagatagtaaatagactgtttctgttctgtatgcaaagagtatatagaggatagcagcttgtgaattactccagtacccctgaaatatgctggagagacacatgcatggcatctgagtcttttctgatttcctttctatgatgaatcaatagattgagtaatgaagacaagcatttaatgaagaaagagaaaccctggggctggagagttagctcagtgcttaagaacactatctgttctttcaaagaacctgggttcaattcccaacatccatatggtacctcacagctatctgtgggtccagttccagaagatctgagacatatacaagcaggcagaacgctcatacacataaaacaaaataaaatttaaaaagagagaactcaacccctaactatccccctacacacacacacacacacacacacacacacacacacgcactcacattagcattttctgctggccaggcatagaagtaattttgcatatatatgcctttacttgctctattttttactttactttgaaaggttagacagctgcttgatctatataaaaagagaatattataataacatactgtagactgtttgaaataagatcatccatttggaattggtacaattctcttatgcagccctacatacaaagtctcttagcatctaaattgcctatgtatttatataaagtttgtctttttactgttaaccatctaagttttccaaaaatctctttttaaagttacattctttaagtcttaataggtcagtagagtactgacctagtaagtactactagtagtactgtgctaccaaatagatactactaggttcttttattctatcagaattaatatacataatacctattgtgtgtcaaacattatgggcctcaaaataaaagatacttagtatgtattgaaggagaatttagactaagaaagacacattgtttttgattgttctgttttgttaagattttatttatttactttatatatatgatgagtacactgtagctgtcttcagacacaccagaagagggcatcagattccattacagatggttgtgagccaccatgtggttgctgggaattgaactcaggacctctggaagaacagtcagtgctcttaaccactgaggcatatctccagcccaacacattgttaaataattatctcaccgcatgggtacagcatagggtacattggatttaagcaaaatggcatttgacactttgtgttagtcattatcataatcctgctggtgtccactgacttgcacaaagcagatgctcaatacattgactttggttgaataaattaatgtgttaggatattcagagagtagctgacacagctgggttactgtgtaagcttcttgaaagaggaaatggctgaggagaaactaagcatatcttcttctgtcagtcaaaacattagcactcatgtatctgagcctccagcaataaagcaaaaggaactgccaaggtctagcctaatccagtggttctcaacctgtgggtcatgactcctgtaagggttgacagaaccttataatcacagcagtagcaacattacagttttgaatatagttttatggttgggggtcaacacaacctgaggaactgtattaaagggtcacgtcattaagaaggttgaggaccactggtctaatcctttactgtactctgtgcacagtaaaggtcttgctgccagtaatcagtgtgtgatttcctttacaacgtgtgtatactgtgtagcttatttagggaaattactggtgttagtaattgggaactcacaaatagaagagtatctgggaaaatggtaattgtgatatccccacctgcctatcctgtgtactagctgaagaacaaaaacccggctctctaagttcacctatgcctcctgctgaagtatgcttttttatcctttgtatacacatgttctctaactttttaaccatgtgacctttcctttcattcctataggatgcactgaaggcccaattgacctggtctttgtgattgatggatccaagagccttggagaagagaactttgagactgtgaagcactttgtcactggaatcatagattccttggcagtttcccccaaagctgctcgtgtggggctgctgcagtattccacacaggtccgaacagagtttaccctgaggggcttcagctcagccaaggaaatgaagaaagccgtgacccacatgaaatacatgggcaaaggctctatgactgggctggccctgaaacacatgtttgagagaagttttacccaagtagaaggggccaggcccccctccacgcaggtacccagagtagccatcgtgttcaccgacggacgggctcaggatgatgtctctgagtgggccagtaaagccaaggccaatggtaaaatgggatggaggtgtggtttatattactcaaagtttgggtcttttagattcacagctggtcttaatgattgagcaaccaataattgttggctaagccattaaaaatacaccttggcaatactgccacctacaggccataatgggaccctggtgataactaaataaaatggcctcacagcctgggtaatcggatttaccacctagtgtgtgaagttcagtagagataatcacctcagcaagtgttatttaactacaacatacaagtgttttaatgccctggtatgtttcctccagagtcacctgaagaatttttttaaagatggatttctggtggcaactttactgacacttttaactttttttatttttattttcacatgcattggtgttttgcctacatgtgtgtctctatgagggtgtgaggtcccctagaaatgaagttaggcacagcttttatctaccatatgggtgtgggaattgaacccagatcttctggaagagcagcacctaaccactaaaacatcacccggaaccaagactctttaaaaaaaaaatggagaagaggaggaagagggagggagggattggggagtaagggggaagaaggggatggggtgggggaagagagannnnnnnnnnnnnnnnnnnnttcacgctgacctgaaacactcgatgtagcacagaacagcttcaaactcattgcctcagcctccctagtacttgaactacaagcatgaatagatttttgatcaagtctttaagtgaatattctgaagtcatgaagtctttggatagagacctatgttggcagaaacctggcttttgaaaagaacaaagttgaatgggtccaagttcctattgctccgcaaagctcaactctttctctggggttttcctgactttgtgtattctacagggagggtctgaaggatgactttatttgcatagatgtggaagagtgtggcctttgattcatgagaggccaaaagccaggatgggtgttggagctagttcatgatgattatatatggatttcatctggtgcgatgagaagactcaaggtcgtaaagcagcctgcttccaagccaacctccttcaagtactgaaggcgcattgctaagaagaagaatgcacgcagtcccatgggagattctctagaatctgtgcctaaatgggcccagatgtagatgactgacagttgctcagtctataaaaaacaggagtactcttggatctattagcaaactccatcctccctcacaaaattgctgatggtttccaaaccatttttttttaatgaaagagtccattttataggcttttcttacctcagtgttcagtctttccctgaccaagagtgagggagcctttagagttgtctatccccaggatcgcctgatcttagtagtttataaaaccggttgttcactctagactagcttgctagagctcaagtataacccataagccctggtagactgcattcttaaaaagtactaggcaagagtcttttcctcccaaaacagtaattgtccttttattagattcattgaaactaacccaccttacatttccacattcaaattgcttcaaattgcccaacgacagctagtaaaagcagattatttagttcttgaatcagccaggcttatccaaaatgacatcctcttaatgaattcagtttctctgggcgaaactaaatatgaccttgaacaagcagtttccctcttgggaatgctcctttgaaatttcaggaagatattttaagtttcttctttatcctgactgggaattccagtggtctgcagactcacctctttatcttttcatttctgttcaagacaatgccccaccccacccatccattcaagaaaggtgggcagaaggcagctccatttggccccaagacagttaagatttttctcatttccttttgaggttagaccatccaagcactcaaaaggctgggtcagggggataacagcccaggtttcaggccagccttagctatatggtaagggcctattttgtttgtaaactaaataatgttataaattaacctgcttagaattttcccagaaaactccattttaccaagctgtgagacttttttcctaccgtccagaggccaattcaggagtacaacgaatatttgttacttgaaccccccttgagagctaatcaataaatctgtgccttagggctggtgagatggctcagtgggtaagagctcccgactgctcttccgaaggtccagagttcaaatcccagcaaccacatggtggctcacaaccatctgtaacaaaatctgactcccccttctggtgtgtctgaagacagctacagtgtacttacatataataataaatctttaaaaaaaaaaatctgtgccttagctatctacccccttctagacactgcatctctagaatcctcttttgttcataggtccacaataaaagtgttagaaactataaatgggttgttagtattgatgtttcaagtccacaacttaatacctaactgactttgggcacagcacaatgtacagatggtgggaatgcaatggtatcttactctcatttctgttgcttaggtatcactatgtatgccgttggggtaggaaaagccattgaggaagaactacaggagattgcctctgagcccattgacaagcatctcttctacgctgaagacttcagcacaatgggcgaaataagtgaaaagctgaaagaaggcatctgtgaaggtattatagaatgtgtctaaggtagaccttagttagccaaagggcagcatgaaccccagagaaaaacctcaaaccgtttcttcagtgcccagaaaaatgcctccctgctgaccaagtgatacctaaaaaggcactgcacccaaaaaaatgaagagggaagacaagtgtgatagctaccatgtcttgctgtgccaaatagcgtactaaacttttttttaagatatattttatgtatgagtgctctatctgcatgtactcctgtatgacagaatatacagatggttatgaatcaccatgtgcttgctagaaattgaactcaggacttctagaagaccagccagtactcttaaccactgaagcatctctccagcccccattctaaatgttttgatatactagtcttaattctcactaaaccctagagaagtttaagcaaggagccaccactaaagaaaccaaaaaataagtactacttcaggaaatttgtggggatacctgtccttgagggctcaccattgagcatttaaagggtgccttcctgcagggacatctacgtctagaatgactctcctttagatgttagacatttaatatacttttctccaggtcactagctgacctcgttatacttacacataatacccattttgccttttgggttcagacgcccttaaaatccaatttaaatgatgccttattcctctaaagcaaagaactctggagtgaagagaggacccaaggagaaagccttccagattcccaagggttgagcatgctttgccttgtggctttcattcctagtgaaatgtcttaggtaggtagggctgcagattatactgggtcttttagcaacttcaactttttttcagcatcaccttcttgacatggcatgggggcattctttagacttaagttctcttgtggagagaactgctctaacatagtcaaactgctttgtttgaatccttggtgttaccaaataacaccaaaagaccctgggtcctaaagagcatgtgtggaactatcactccctttggccatctctttccattcagctctagaagactctggtggaagacaggactcagcagcatgggacctgccacagcaggcccaccagccaacaggtgagtcttaaaaggcactatggtcacttgggtcttctgcctcagctcccctgtagacagaagttgtaaagtgacagttaagatttaaatgtcagctaggacccttttcctctgacagacaggaaagcttcactctgtcccttaggccatagtgggtagctactatctctgccaagtgtttttgtcaccgtatgtctcaaagcaaagctctacaacaaagctgagggctgcggaacaccgtgcctcagctggtggctgcttaagacagtcacgtgagacagacttgaatccacttctttctcttcacagaacctgagccagtcaccataaagatcaaagacctactttcctgttctaattttgcagtgcaacatagattcctgtttgaagaagacaatctttcacggtctacacaaaaacttttccattcaaccaaatcttcaggtaattccaagtgaacaatcactactagctaaggtgcagcagccttttagtttgctaacagacttagattttaaagtggggaagaggaaattaagtgcagtaactaaaaactaatgcaggagccattgtctcgacccccaagtacactgtctcttccgttgtttgaagccaaccaagcccttcaccagcatttacttccctgtatctggatccatggaaaaagacttctttatgggttcctgtgtactgataagtcccattattatgtctgggaagtgtggtaaagacaaaggcgaactcttttcatctgctttctcaggaaaccctttggaagaaagccaggaccaatgcaaatgtgaaaaccttatactgttccagaacgttgcaaatgaagaagtaagaaaattaacccagcgctatatccttttccagtaggatactgttgttgaaaatattttatctcaatcagtggtttttgccctgcttttgatcattcagttcctgggtaaaaaaaaaacactttcattattataagccttaatcagcactagagctaggcagatatccaccctctatgctaaattatttccccatcaataaccccaaatcataacttccatgttccatctaggctgctcttaattccaatcaggcagccttcgtagacatgtattcataactcaccctatggcagcttccccttctccttcctccttccatcagatcccaagccaggaaaataacctcttttctgcctagcttattggttgtaggcatccttctttgcccatcagggataattttggggaagggggacaaggttacataaggtcacttgggtacgatagataggctctcattcctgggccaaccagggcttgggggccaatatttagcattacaatacaagcaaaagaccaaacctcaatatattagcaaaacttttcaaataactgtgtagattgcattgacaaaggcatcaacactgaaccaggaaagtgtttttttttttnnnnnnnnnnnnnnnnnnnnnnnnnnnnnnnnnnnnnnnnnnnnnnnnnnnnnnnnnnnnnnnnnnnnnnnnnnnnnnnnnnnnnnnnnnnnnnaaggcatcaacactgatttttttttttttttttttttttttttttttttttcttcttcttcttctgtaagaggcagctagataggtgtttgagagttgaggtcaagccaagcttgaccattcaagcaagcacttagctgtcatctgctggctagtgtaggaagaataacagccaatctggcaacatgtaaagtgtaagggggagacacttaaacctctacattaggatggatatacacagctcttccgaaggtcctaagttcaaatcccagcacccacacggtggctcacaaccaccagtaatgggatctgatgccctcttctggtgtgtcagaagtcagctagtgtacttatgaataataataaatgaatctttgggccagagcaagcagggttgaccagaggtcctaaaaaattcaattcccaactacatgaaggctcacaaccatctgtacagctacagtgtactcaaatacataaaatatgtcttttaaaaaaaaaggatggatatacactagaaacaaagtacctcagataggcacagtacactataaaaggaagaagtttcaaactccatcaagcctttaaaccttcagccctaaaaccacacaatggccccacagatgtgcagattttaaggagctgggtgtgttcctttttgtttttggcagcagagatcctttatatcaattctcttaagagattgaagattctaccaagcaaactggatacaatgattcattctattgaacaaactgccagctgctctgaacttaaaattagagtaagcttactaaagccagctgatactcacctcagtgtcaactagtccatagggaaatggcttaattctgaactactcctgtgccaacaggcttacataagaacacacaattctccatgtaagggggtggtatgacactggtcctccatgtggactgtctttctgatggtagatacacagataaagctggactcactgtcatgggggcagatgatgaggattaagtggcttagagggaagacaagcattaactctgtagcctctttctgtccccttcccccactccctagcttttgactcccatgccagtcttctgacacacctcacaccttcccaactatgagtgtggcactggctagttagttataagcaacactggtttggataaagttttttttttgtctttttttatcataaggaaaagtaaattcaaattgaattatctgggtttgatattttgaaaataagccaactgggcgtggtggcgcacgcctttaatcccagcacttgggaggcagaggcggcaggtggatttctgagttggaggccaccctggtctacaaagtgagttccaggatagccagggctacacagagaaaccctgtctcgaagaaaaaaaaaaaaaaagaaagaaaaagaaaagcagcttaacatgaactactttttatagtcttaaaggcatgttagattactataaatgtacaagagttttaatatactggaaatttttgcaacttgttagttaaatcaaattgtacttgattgtaagttaaaacaggtattccagactccttttccttaatttgagatttactagaagaaatgactcaaagaatggaagctttggaaaatcgcctaaaatacagatgaagaccagaattgcttttatgtatatttgtacaccatcttaaaaaggattttgacaaaggtggtagagcctcccaccataagcagacctacaagctgtaaagcaaaatacaaccagtacaggagacactggattgcttgactgctggacagagaaaatggagacactgaggtgtctaaattcaatgagggtggggggaaggaatcctgaattctgagtttaccatgagaataaataagctgcgcagtgtagtgttccacggtgtactgtggacataatttccttctactgcaacactgaaatttcattttcggcagaaaactgactccacaaattgctattttttgtactggaatttaccttgatgtgtatatggacatgtgcataagtcacagagacatatgttctgtaataagttggatttctacacaatattaaaattcaccattccagaaaatagtgttgagtaaaattcctagtttaaatttgattaggggccatgctatttactagttgttaactcaggctgcctcaaactcccaattctcctgtttccaccttcagagtactgggaacacagacacatatggtaccaagcccaagcttagcttaagtataaactatgtatacatgagaaaagccaatataatcagaaaaaagcaggtttagcgtttgcatatattttttaagctcatcagctcagcagtcactgacttgactagtgatgttattaatgtggaaatagaggtccttgcatgctgctagggaaagtacaaactagcaggttctgaaaacagacttttaactatagcactgccatttgagatcaaaccgaatggtcttaacgtatacaagggagacctgcagagaaatgtcactagttaggaatagcctaaacatcagaactgattcaccgtgtggtctgtatcacagaaatactatatacttacataaatatccatggtgaagcccaaaactaaggtgggtttttgagacagggtttctgtgtgtagccctggctgtcctggaactcactctatagaccaggctagcctcgaactcagaaatccacctgcctctgcctcccaagtgctgggattaaaggtgtgcaccaccactgcctggctgggtttttttttttttttctttaaagtaggatttcaagcatccccagctggcctcaaactcactatgtaacatatggcctttttaaggtctcttgcttcacctaagtgttgaggattatagtcatgcaccaccataactaatttacctggtgctaaggattgaaccttggaattcatgtggatcaggaaagcactcgtaactgtgccacattccagccctcaaatcaatgacaatttgggaaacagggagctccttgagttcaaagccagcctgatctatatactgagaccctgacatctagcattctggtaattctatgaattaacatatacattgctatgcatggacatattaatttgcatatcaagtgcaagagataagtcaaagggaacttataccacttcaagaaagcactcagctgccaggcgtggtggctcacgcctttaatcccagccgggtctacagaatgagttccaggacagccagggctactcagagagaccctgtctccagacaaaaaaaaaaaaaaaatgcacttagctttacagaggacagacaagccgctgtattttaaattatgaacctttcatattcaaaatactataattaaatttatactgatacttaaagtgctttgaccagaatgttctcccaaaaggtgggtggaacaacatttaccaggcttcactccattgagtaatttttctagaggtcaacattgtgactcaaaataaatgttgctacaaagcattaatttggatgatacaaagattaaggtataagtcacagggcttcaagttggctactctttgttcaacctccctctagctgcataaaaccatccctaccactttttccttgatgccacatataacacacaagcccgcagccaatccccactattgattagggactagacagagtatctactgctgaactgaactgggttcccacaccaggcagctgtactctcaccagttaattccaggtacaagccatcaaatgcttcatcaggcatactcacatgcagacatggtaagtaaaaagcttaaggtttcttaaaaaaacagaaaaaactcacagggctggggaggtgacatggctcagcagctaagagcactggttgtgctcttccagaggacccgggtttaattcccaaacagccacatggcagctcacaactgtctgtaactccagttccaaggtatcacactaacatacatacaggcaaaacacaggcgcacataaaatctttcgaaaaaattatgcttgttcaggtgttatcagcatttttaaatttcattgttggcactaacctctttaagcctacatgtcacctgtaacaaacgtcacagtgctcttgtcataatattgagcacatacacatttagcaagtctcaaaacattttttatatacatctttttttaagtgaagcatggcttggcggataagtgcactgttatcaatcatctgtgactcggttcctgaggacccaagagcagcaactggccttttaagcactaggtatacacatggtgcacttaaacgcacataggcaaaacaaacacacacacacattactaaatctttgtgctggagggatggctctgcaattaggtgcacttgtttttgctgatgaaccaggatctagggaattcaatgccctctactggcctcaatgggaatcaggcatgcaagtggtacacagacaagcacaacacccatacatgcaaatcttcaacaaacactttaggcatacattcgaatgaatactgtatgcaagtgcccagagtctagaaaacagtgtacagcaaccctcaacaccttaaatgctcagtgttagctgtgacaattttattcttcaccaccagtctctcacaagatggggcctgggaggattatactgagtagatgaagaccactgtttgctttgactctgaaccagatggaatagcaagttaaatggtaagtggacacaatattgaaaactactattaacaagacaaaacgcttagccgggcgtggtggcgcacgcctttaatgccagcacttgggaggcagaggcaggcggatttctgagttcgaggctagcctggtctacgaagtgagttccaggacagccaggactacagagaaaccctgtctcgagaaaaaaacaaaagacaaaacgtaaagttccagactagacagtcataaatctaatggggagctgcttaaacactgggaaatatttactcaaatttatgtgacctaaagttgaaaacgctgaatccttacttttccatagttcagtaagaatcaaatgtgactaatgctatttaaacaacaaaaaatatcaactttaactaggttagactttcttcctatagcaagctcaacctgtgtctgccagtgttgcttgcagttaacatattctatactcacccagtagagctgtggattaaatccagctggctagaatcccctgcacgtttatggttttttgtttgttttgtgggttttttttttttttttttggtttttcgagacagggtttctctgtatagccctggctgtcctggaactcacttggtagaccaggctggtcttgaactcagaaacccaccttactctgcctcccaaggcatgcgccaccacggccggcttcccctgcacatttaaaatgccactttttacaacccctgatgtgggacagtgacctttcctccttagaaacagcagaatggtacttcttacagattctccatgaaacacagcagagtaagttgtgtctcctaccacatagcttttaaacgttcctttgcattttaaacccttcttgcaaacacaatgactacacaaaaatttaaaaaattatctcatattatcactacctacaaagctctaggaaaaaaaaattaaatgcttatagccaagtcacaacacaggaactctccatattttaaggaactaagtaggaaatagttaatttgaaaatagttctaaattattcaaaatagcatgcaaaatccacagctttggtccatcacaaatcatcccatgcctctcaaacatacccaaaaatacaatgcaaacaccctgagactagaaccccgagcctgtctttacaaggcgctagggataacagcttagaagctttctgtgcaagtttgaggactgaaactggaccaccagcacccatataaaataaacagtgggtgccagcctgcaattctatcacttagggtgtccagagaggctccccagaggaagttagctagactagctggcactgccaaactctaggttaagtgagagatcttacctcagtatataaaatagtgattaaaaacaccaaatgaccttctgattagatattattgtatcaccacaaatgtgcatttcaatattgaaaatatacactcaaacacttctctggtccacacattttgcatagtgatacagtgtacaatcttttaacaaaaccccagcaaaatgaaaaccaagcagtataacttctcacccaagtcttgcctgtggtttcaagaaagctaaatgttagaaagcaaacagacaccatgtttttcaaaaggagctctggcaaagttttattaaaggaaaactttcttgtttacttctcaccagtctgttctggcatgcttctaataatatcagaatcacctagaaaataaaataatagttttacaagtcatttaatggcaactaataattaaagaattcccctacttgttctttaggtaagaaggcagattagcactacgtgcaaattgtttcggctatcactcttaaaatcacttaaaaataccttaaaatctcagccatcctatacaaataatgaatcagatggtctgtcaccagcatttagataaccagactgaagtaaagaactaggtctggggacacatgcatggtcttactatagcgaatgtctagcctgtcctgattatcacagaatcagaacagcgagaatattcgcagtgttctacaaggcaactaaaatttctaagctcaaaataaaatagaatgcaggcatttaccacaaactatttatccccaagcaacaaagaggtggtaaaattttatctcgttcaccttctaccaaacttttcttcccaagggggggtatggtaagaggggttgagaggggtagagggacaaagagtttcactgtgctgccccagttgtcctagaacttgcattaaacaaaattcttaatatcaaagttgaaccaaagccactgtctaataagcacttacattagaaaaaaatataattttaaaaacatacctgggtcaatgatagccagtgtgcatactctgtagtattttccacacgctgtgcccagttcaatattattgccactgtagtgatggaccccagttttagccaacatggcatagtactctatttcagatttccttagggaacaacaaaaagtcaaataaaatgccataccaaggtactgacagacttgtgacaaattggtgaggcctttttaacagtaactaaatcacttccaactcttaaaaaagattctagctgtcctgattatcatggatcctttactagtgtattgtgataattaaatacctaactttttggaggtagtatccaatattaaagtacattgtattcatgtttcaatttactaagtttaaaatgtgtaagttacttaaaaactagaaaagggtataatagacataaaaaagccaatgctggcctggagatatggttcactgaaagcttgtactgctcttaagaaagttcagtttccagcattcacatcagccacctcacaacaccaggagaatctcgtgtcagcaacaagtatatactccattttaatcaaacgaaggcaaagaataataggaaggtggagtggagggtcagaaacctaaaaaagtaagccctcttaaaccacctactatacagtgaatactacataagggctgctgataatattacccaaaaaataaatacttcagtgccaagttaaaggatacaaattgttaagatttgaaagttccacagaaccttgagcttagaatgtggccccacataccaacagtgctccaaagtgcttatgagaaatgaacttgaagctccagcctggacccactgagtctgagcttgtaatttagtaatgaatgtctacgctgccactatgaatcgactggcaaaggtttaaaataagaccaaacattccaaactctgccactaagtatagacacctacataaaaggctgaagaggtgtacaattgccatagaaaaatcaaggagcgtatactacacaagcttcttcagcttacttaaaatacttgttaggttcgagttaaaatagttaatcaagaatgaacgtgttcagaaaattggaccctgccaaataggtgatttcatgataccatcacctccataatccagccagaatttttctaaactaaaacaggcacatgaagcggagtgttaacacttcaaaccttgaaaaattcgggatcgggcttcccccagtctgcgtgtatcatttgtatacctcctgtcacacaacgtgcctcaaaggtacatttacaaaaaacacacacaaagcaaggtccaaacatcagaaagcaaccatcattattcttcttcccaatgctggatactgcacagtgaatttacaataggctgcacacatccaggttccctccattacctcaaagctggacagttgttggcaaggataaccaacttcgctttgccttgtctgatcatcttcagagtctgcttgtagcccagcacgtacttcccacttttcataacaagttggagcctagagttgatcgactccagagactttttctacaatgcaaacgtttgagacttgaacaccacttgcagtcatctaaaaccaaactcagttccagatttctggaactgaaccctttcatgatgtctgagaccatacaaagagcctctcggattcactttgagaccctgaaacgtcagcgacaagtcgtccacccagtgtgctcaaatctatccgccccggcccgacccagctctccacgtgaaccggcttccgggcccgatcggcttcactcaccgtcttctttgcggccaccatcttcctgccttaggtgcgggacaacccccaacctagcatacacagaggacagaagagaggattataatccagagcgtcaaacaccagctagcggagctccccgagccgcctaatcgtttaccccgcagagctcactcaccaacaccagccgccaagatggccggggagcgagaaaggaaggagctcccacaatgcaaagctcttctaggccgacagaggattgtgggaccggaagcggaagagaagccggtccgggtcacaagcagaacagcgcttgcgagagtagtctgcggtagttggttgctatggggaccgggttacaacgcaggctgggctgctgcggcgtctgggctccggccttcggttctgggcgtttgttctgctgcagcgggctgacaccgcggagagccggagctcgatgggagctgacgacgaggcccagggctccgtggcgaggcggcagcgacctggcctctcctgggctggtctccgcctgacgttgtcttgggcgtgctccggaaggaccccgggccgccggtttaccccgtgactgctcaccaggagcggaggcatctctgtccacccgccgctgatcttcctgtttgccgctccgtaggacacacaccccttttgcggcggttttataccgtgtacttgggagcctactttgcacagggaccacaattgaaaaaaaaaaaaaaaaacctggtgaagtggctgacgggtaaatgcgcttgtcgctaagtagacgaatgagttccaaacccacgtggtgggaggggagcgccaagtccagcaggtttttctttggcctgcgcttgaatgctcacatacgtatacagaagtaaagaaatagtcgcaatacgaataatttaaaaaatcattttgctacgaaacttgggccgttgtataaatgtagcattcaaggaaaaaaaaaaaaaaccttgaaagcctctactatttacgcactagcaccaacgaaaacccagggctgttgagattgttcagtcagtaaagtgtgcttgccttgcaagcgtggggacctgcattttatgcctaaacctctctgtcaatccccagcccccaaaagtctggcatggttgtgcacacttgtaactccatttgtggaacagattccccaaggctggctagccagccaacctagtctaacctgtcagctccaggtctcaaagatcttgtgaaaaataaggtggacaactaccgagtaagtacccagaagttgacctgtgacctctgcccaactgcacaagcacctgtgccaccaaatttatataagcatgaaaaaggaaacccagggtagtaggtaagctgtatggtgagttactttgccctggaggttaggaaagggaagaacaaccctgcctccccttaattaaaataactttaaaaacatccatgagtcatgcgggtcgagatgatctatacctataatcccacccggagctggcaatctctgtgagttgatcttttggaaaaagaaaaaaaacggaaactaaaacatattacttagccaacacacacactctatgagatagtaactgtgttattctcacatttttacagctagtgtattacagaagtatgaatagaaccaggcctgcaaattagggttttttggtttttgtttgttttggttgagtcttttgagacaggatttctctgtctgtcctggaactcactctgtagaccaggctggcctcgaactcagaaaatccagaaattttacattaaaatttattcaactgttgtggcccattttaatgtgaatttgaccaaacggtagtgttcaattaccatactctttgctttaacatttaggcataaagtacttaggatggtacaaatccagctaattgtcttctattaatccagttttgtaaacatagtaaactttaaatgaactttaacaaatagctcatatgatttaaattcaaagcaataagcctagattggagttgtgacattgctgtttaacatgctacccttaccccacccacccccctttttttaatcctgtgctttgctgacctgtttgggattttttttttttttttttttttttttggtttggtttttcgagacagggtttctctgtatagccttggctgtcctggaactcactttgtagaccaggctggccttgaactcagaaatctgcctgcctctgccttctgagtactgggattaaaggcatgcgccaccacgcctggagattttttttttttttaaagattttgttttatttatatgagtacactgtagctgtcttcagacacaccagaagaggccatcagatcccattacagatggttgtgagccaccatttggttgctgggcattgaactcaggacctctggaagagaagtcagtgctcttaatcgctgaaccatctctccagccctctgctgacctgttttgtttgtgattgtcctctgattatgaaatggaatgtctgcttaagagcactgtgcaatacagttctcttcaggtgcagcttgggagtgttgagggcctcctgttcatactagacattcaagtatgaatcttctgcctgccttcccccactctcaaatatttctggtagacacttaaaatgaaccatactgtaccctcagaattaatgtcatactaagtaagatacagtgtaagtcttagtgctgtgtgaagaaattgttatggacattataagtattaattcgaaagggtgccatgtagcaggctctgggttttgctgctcctgtaaggtgctttcagaagtgctggtgatgtatctcacttggtagacgtttggctgtcgtgcacaaagtcctggatttaaccccagtaccaccaaaagctgggaataataatgcatggtgtgtaactccaacacttggaggtgggggtgagaggggagaagctagaatagaagctctagttctaggtcatcttccattacatatcaagttcaaggccctcctgagaccttgtcttcaaaaaacgaaaggattggtaaataaagactataatgtctgtttacagctgtgcagactttaatatacttttgctaaactttaacttatggtcatgttgtcatagaccatattaatcttttttttttttttttcggttttttgagacagggtttctctgtatagccctggctgtcctggaactcactttgtagaccaggctggcctcgaactcagaaatcctcctgcct

SEQ ID NO: 68 - DNA, 3573 bp, Mus musculus
ctttcagggagcctcccaggcagccagcaagcgcggagagcgcactgggatgggacttgaaggcggcttctcaggacacggcgctggcgcgggattcttgttcgcgtccggggatcggtgcccaaggagctctgcggtcctctgcggggcgaggcggcggaccacggagactgacactcacagctgctcccctgtctctcttcccgggtgtcggcggcggtggctgcagctgcagccctgctcctcttgaagatggagaagatgttggtggggtgcttgctgatgcttgggcagctcttccttgtcctcccagttgacggcagagagcgtccccaagccaggttcccttccagaggccgtcatgtccggatgtatccgcagactgcactgctggagagttcctgtgagaataagcgggcagatctggtgttcatcattgacagctcccgaagtgtcaacacctatgactatgcaaaggtcaaggagttcattctggatatcctgcagttcttggacatcggtcctgatgttacccgagtaggtctgctccaatatggcagcacggtcaagaacgagttctccctgaagacctttaagaggaagtctgaggtggagagggctgtcaagagaatgaggcatctatccactggcaccatgacagggcttgccatccaatatgccctcaacattgccttctcagaagcagagggggccaggcccttgcgggaaaatgtgccacgcatcataatgattgtgactgatgggaggcctcaggactcggtggctgaggtagctgccaaggcccggaacacaggcatcctgatctttgccatcggtgtcggtcaggtggacctgaatacactaaaggccattgggagtgagccccacaaggaccatgtcttcctggtggccaatttcagccagattgagtccttgacctcagtgttccagaacaaactgtgcacagtccacatgtgcagcgtcttggaacacaactgtgcccacttctgcctcaacacacctggctcgtacatctgcaagtgcaagcaagggtacattctcagcacggatcagaagacttgcagaatccaggatttgtgtgccacagaggaccatggttgtgagcagctgtgcgtgaacatgctgggttcctttgtctgccagtgctacagtggctacaccttggccgaggacgggaagcgatgtacagctgtggactactgtgcctcagaaaatcatggatgtgaacacgagtgtgtaaatgctgaaagttcctacctgtgccggtgccacgagggatttgctcttaacagcgataagaaaacatgctcaaagattgactattgtgcctcttcaaatcacggatgtcagcatgagtgtgtcaatgcccagacgtctgctctctgccgctgcctgaaaggcttcatgctaaatccagacaggaaaacttgccgaaggatcaactactgtgcactgaacaaaccaggctgtgagcatgagtgtgtgaacacagaggagggtcactactgccgctgccgtcagggctacaatctggaccccaatggcaagacctgcagccgggtggaccactgtgcacagcaggaccatggctgtgagcagctgtgcctgaacacagaggagtcctttgtctgccagtgctcagaaggcttccttattaatgatgacctcaagacctgctccagggcagattactgcttgctgagcaaccatggttgtgaatactcctgcgtcaacacagacaaatcctttgcctgccaatgtcctgagggtcatgtgctccgaagcgatgggaagacctgtgcaaaactggactcttgtgctttgggggaccatggttgtgaacattcatgtgtaagcagtgaagactctttcgtgtgtcagtgctttgaggggtacattcttcgtgacgatgggaagacctgcagaaggaaagatgtctgccaggatgttaaccatggatgtgagcacctttgtgtgaacagtggcgaatcatacgtctgcaagtgtctggaggggttcaggctggctgaggatgggaagcgctgcaggaggaagaatgtctgcaagtcaacccagcatggctgtgagcacatgtgtgtgaacaatgggaactcctatctgtgcaggtgctcagagggctttgtcctagctgaggatggaaagcactgcaagagatgcactgaaggcccaattgacctggtctttgtgattgatggatccaagagccttggagaagagaactttgagactgtgaagcactttgtcactggaatcatagattccttggcagtttcccccaaagctgctcgtgtggggctgctgcagtattccacacaggtccgaacagagtttaccctgaggggcttcagctcagccaaggaaatgaagaaagccgtgacccacatgaaatacatgggcaaaggctctatgactgggctggccctgaaacacatgtttgagagaagttttacccaagtagaaggggccaggcccccctccacgcaggtacccagagtagccatcgtgttcaccgacggacgggctcaggatgatgtctctgagtgggccagtaaagccaaggccaatggtatcactatgtatgccgttggggtaggaaaagccattgaggaagaactacaggagattgcctctgagcccattgacaagcatctcttctacgctgaagacttcagcacaatgggcgaaataagtgaaaagctgaaagaaggcatctgtgaagctctagaagactctggtggaagacaggactcagcagcatgggacctgccacagcaggcccaccagccaacagaacctgagccagtcaccataaagatcaaagacctactttcctgttctaattttgcagtgcaacatagattcctgtttgaagaagacaatctttcacggtctacacaaaaacttttccattcaaccaaatcttcaggaaaccctttggaagaaagccaggaccaatgcaaatgtgaaaaccttatactgttccagaacgttgcaaatgaagaagtaagaaaattaacccagcgctataagaaatgactcaaagaatggaagctttggaaaatcgcctaaaatacagatgaagaccagaattgcttttatgtatatttgtacaccatcttaaaaaggattttgacaaaggtggtagagcctcccaccataagcagacctacaagctgtaaagcaaaatacaaccagtacaggagacactggattgcttgactgctggacagagaaaatggagacactgaggtgtctaaattcaatgagggtggggggaaggaatcctgaattctgagtttaccatgagaataaataagctgcgcagtgtagtgttccacggtgtactgtggacataatttccttctactgcaacactgaaatttcattttcggcagaaaactgactccacaaattgctattttttgtactggaatttaccttgatgtgtatatggacatgtgcataagtcacagagacatatgttctgtaataagttggatttctacacaatattaaaattcaccattccag

SEQ ID NO: 69 - protein, 967 aa, Mus musculus
HSQLLPCLSSRVSAAVAAAAALLLLKMEKMLVGCLLMLGQLFLVLPVDGRERPQARFPSRGRHVRMYPQTALLESSCENKRADLVFIIDSSRSVNTYDYAKVKEFILDILQFLDIGPDVTRVGLLQYGSTVKNEFSLKTFKRKSEVERAVKRMRHLSTGTMTGLAIQYALNIAFSEAEGARPLRENVPRIIMIVTDGRPQDSVAEVAAKARNTGILIFAIGVGQVDLNTLKAIGSEPHKDHVFLVANFSQIESLTSVFQNKLCTVHMCSVLEHNCAHFCLNTPGSYICKCKQGYILSTDQKTCRIQDLCATEDHGCEQLCVNMLGSFVCQCYSGYTLAEDGKRCTAVDYCASENHGCEHECVNAESSYLCRCHEGFALNSDKKTCSKIDYCASSNHGCQHECVNAQTSALCRCLKGFMLNPDRKTCRRINYCALNKPGCEHECVNTEEGHYCRCRQGYNLDPNGKTCSRVDHCAQQDHGCEQLCLNTEESFVCQCSEGFLINDDLKTCSRADYCLLSNHGCEYSCVNTDKSFACQCPEGHVLRSDGKTCAKLDSCALGDHGCEHSCVSSEDSFVCQCFEGYILRDDGKTCRRKDVCQDVNHGCEHLCVNSGESYVCKCLEGFRLAEDGKRCRRKNVCKSTQHGCEHMCVNNGNSYLCRCSEGFVLAEDGKHCKRCTEGPIDLVFVIDGSKSLGEENFETVKHFVTGIIDSLAVSPKAARVGLLQYSTQVRTEFTLRGFSSAKEMKKAVTHMKYMGKGSMTGLALKHMFERSFTQVEGARPPSTQVPRVAIVFTDGRAQDDVSEWASKAKANGITMYAVGVGKAIEEELQEIASEPIDKHLFYAEDFSTMGEISEKLKEGICEALEDSGGRQDSAAWDLPQQAHQPTEPEPVTIKIKDLLSCSNFAVQHRFLFEEDNLSRSTQKLFHSTKSSGNPLEESQDQCKCENLILFQNVANEEVRKLTQRYKK

SEQ ID NO: 70 - DNA, 169659 bp, Homo sapiens
  misc_feature (1)...(169659): n = A,T,C or G
tggagaaaccctgtctctactaaaaatacaaaattagccgggcatggtggtgcatgcctgtaatcccagctactctggaggctgaggcaggagaattgcttgaacccgggaggcggaggttgcagtgagtcgagatcgcgccattgcattccagcctgagcaacgagagtgaaactcagtctcaaaaaaaaaactttttttttttttgtagagatgaagtctcactatattgcccagactggtctcaaattcctgggctcatgtgcttctcccacctcagcctcccgaagtgctgggattacaggcatgagcttctgctccttgcctacttcattttgaaagggagtgactacctacccatatctcagttgtcataaatgcaattccacctgcagaaattcaggaagggaagattgtatttagcactggtgccaaatgcattcattaggagagacttaaaaacagtctactggttaggattaagttcagctgcaagttacagaaaaaatgaaatgacagtgggttaaagaaagaagtttatttctgtcttgtgttcaagaagtctggagacagtgagtgtccaaagtgtatgtggggtaaggccccatgccctgtgcctggttgcttttagcatgcatagcttccatttccatgcagtctcacccaggatttcgggatgactgctgagtactaaaccaaaaaacaaaaacaaaaacaaaaaaaaacaaaaccgatgttagagaggcaggtaaggcatttgaaaacattgttttatggaaaaaaaaagttatggaacatttataaaatgaaaaaagcagttttttctaaattaacacattattttataacttaaaatgttttaaatatgtatttgtgacttaannnnnnnnnnnnnnnnnnnnnnnnnnnnnnnnnnnnnnnnnnnnnnnnnnnnnnnnnnnnnnnnnnnnnnnnnnnnnnnnnnnnnnnnnnnnnnnnnnnnnnnnnnnnnnnnnnnnnnnnnnnnnnnnnnnnnnnnnnnnnnnnnnnnnnnnnnnnnnnnnnnnnnnnnnnnnnnnnnnnnnnnnnnnnnnnnnnnnnnnnnnnnnnnnnnnnnnnnnnnnnnnnnnnnnnnnnnnnnnnnnnnnnnnnnnnnnnnnnnnnnnnnnnnnnnnnnnnnnnnnnnnnnnnnnnnnnnnnnnnnnnnnnnnnnnnnnnnnnnnnnnnnnnnnnnnnnnnnnnnnnnnnnnnnnnnnnnnnnnnnnnnnnnnnnnnnnnnnnnnnnnnnnnnnnnnnnnnnnnnnnnnnnnnnnnnnnnnnnnnnnnnnnnnnnnnnnnnnnnnnnnnnnnnnnnnnnnnnnnnnnnnnnnnnnnnnnnnnnnnnnnnnnnnnnnnnnnnnnnnnnnnnnnnnnnnnnnnnnnnnnnnnnnnnnnnnnnnnnnnnnnnnnnnnnnnnnnnnnnnnnnnnnnnnnnnnnnnnnnnnnnnnnnnnnnnnnnnnnnnnnnnnnnnnnnnnnnnnnnnnnnnnnnnnnnnnnnnnnnnnnnnnnnnnnnnnnnnnnnnnnnnnnnnnnnnnnnnnnnnnnnnnnnnnnnnnnnnnnnnnnnnnnnnnnnnnnnnnnnnnnnnnnnnnnnnnnnnnnnnnnnnnnnnnnnnnnnnnnnnnnnnnnnnnnnnnnnnnnnnnnnnnnnnnnnnnnnnnnnnnnnnnnnnnnnnnnnnnnnnnnnnnnnnnnnnnnnnnnnnnnnnnnnnnnnnnnnnnnnnnnnnnnnnnnnnnnnnnnnnnnnnnnnnnnnnnnnnnnnnnnnnnnnnnnnnnnnnnnnnnnnnnnnnnnnnnnnnnnnnnnnnnnnnnnnnnnnnnnnnnnnnnnnnnnnnnnnnnnnnnnnnnnnnnnnnnnnnnnnnnnnnnnnnnnnnnnnnnnnnnnnnnnnnnnnnnnnnnnnnnnnnnnnnnnnnnnnnnnnnnnnnnnnnnnnnnnnnnnnnnnnnnnnnnnnnnnnnnnnnnnnnnnnnnnnnnnnnnnnnnnnnnnnnnnnnnnnnnnnnnnnnnnnnnnnnnnnnnnnnnnnnnnnnnnnnnnnnnnnnnnnnnnnnnnnnnnnnnnnnnnnnnnnnnnnnnnnnnnnnnnnnnnnnnnnnnnnnnnnnnnnnnnnnnnnnnnnnnnnnnnnnnnnnnnnnnnnnnnnnnnnnnnnnnnnnnnnnnnnnnnnnnnnnnnnnnnnnnnnnnnnnnnnnnnnnnnnnnnnnnnnnnnnnnnnnnnnnnnnnnnnnnnnnnnnnnnnnnnnnnnnnnnnnnnnnnnnnnnnnnnnnnnnnnnnnnnnnnnnnnnnnnnnnnnnnnnnnnnnnnnnnnnnnnnnnnnnnnnnnnnnnnnnnnnnnnnnnnnnnnnnnnnnnnnnnnnnnnnnnnnnnnnnnnnnnnnnnnnnnnnnnnnnnnnnnnnnnnnnnnnnnnnnnnnnnnnnnnnnnnnnnnnnnnnnnnnnnnnnnnnnnnnnnnnnnnnnnnnnnnnnnnnnnnnnnnnnnnnnnnnnnnnnnnnnnnnnnnnnnnnnnnnnnnnnnnnnnnnnnnnnnnnnnnnnnnnnnnnnnnnnnnnnnnnnnnnnnnnnnnnnnnnnnnnnnnnnnnnnnnnnnnnnnnnnnnnnnnnnnnnnnnnnnnnnnnnnnnnnnnnnnnnnnnnnnnnnnnnnnnnnnnnnnnnnnnnnnnnnnnnnnnnnnnnnnnnnnnnnnnnnnnnnnnnnnnnnnnnnnnnnnnnnnnnnnnnnnnnnnnnnnnnnnnnnnnnnnnnnnnnnnnnnnnnnnnnnnnnnnnnnnnnnnnnnnnnnnnnnnnnnnnnnnnnnnnnnnnnnnnnnnnnnnnnnnnnnnnnnnnnnnnnnnnnnnnnnnnnnnnnnnnnnnnnnnnnnnnnnnnnnnnnnnnnnnnnnnnnnnnnnnnnnnnnnnnnnnnnnnnnnnnnnnnnnnnnnnnnnnnnnnnnnnnnnnnnnnnnnnnnnnnnnnnnnnnnnnnnnnnnnnnnnnnnnnnnnnnnnnnnnnnnnnnnnnnnnnnnnnnnnnnnnnnnnnnnnnnnnnnnnnnnnnnnnnnnnnnnnnnnnnnnnnnnnnnnnnnnnnnnnnnnnnnnnnnnnnnnnnnnnnnnnnnnnnnnnnnnnnnnnnnnnnnnnnnnnnnnnnnnnnnnnnnnnnnnnnnnnnnnnnnnnnnnnnnnnnnnnnnnnnnnnnnnnnnnnnnnnnnnnnnnnnnnnnnnnnnnnnnnnnnnnnnnnnnnnnnnnnnnnnnnnnnnnnnnnnnnnnnnnnnnnnnnnnnnnnnnnnnnnnnnnnnnnnnnnnnnnnnnnnnnnnnnnnnnnnnnnnnnnnnnnnnnnnnnnnnnnnnnnnnnnnnnnnnnnnnnnnnnnnnnnnnnnnnnnnnnnnnnnnnnnnnnnnnnnnnnnnnnnnnnnnnnnnnnnnnnnnnnnnnnnnnnnnnnnnnnnnnnnnnnnnnnnnnnnnnnnnnnnnnnnnnnnnnnnnnnnnnnnnnnnnnnnnnnnnnnnnnnnnnnnnnnnnnnnnnnnnnnnnnnnnnnnnnnnnnnnnnnnnnnnnnnnnnnnnnnnnnnnnnnnnnnnnnnnnnnnnnnnnnnnnnnnnnnnnnnnnnnnnnnnnnnnnnnnnnnnnnnnnnnnnnnnnnnnnnnnnnnnnnnnnnnnnnnnnnnnnnnnnnnnnnnnnnnnnnnnnnnnnnnnnnnnnnnnnnnnnnnnnnnnnnnnnnnnnnnnnnnnnnnnnnnnnnnnnnnnnnnnnnnnnnnnnnnnnnnnnnnnnnnnnnnnnnnnnnnnnnnnnnnnnnnnnnnnnnnnnnnnnnnnnnnnnnnnnnnnnnnnnnnnnnnnnnnnnnnnnnnnnnnnnnnnnnnnnnnnnnnnnnnnnnnnnnnnnnnnnnnnnnnnnnnnnnnnnnnnnnnnnnnnnnnnnnnnnnnnnnnnnnnnnnnnnnnnnnnnnnnnnnnnnnnnnnnnnnnnnnnnnnnnnnnnnnnnnnnnnnnnnnnnnnnnnnnnnnnnnnnnnnnnnnnnnnnnnnnnnnnnnnnnnnnnnnnnnnnnnnnnnnnnnnnnnnnnnnnnnnnnnnnnnnnnnnnnnnnnnnnnnnnnnnnnnnnnnnnnnnnnnnnnnnnnnnnnnnnnnnnnnnnnnnnnnnnnnnnnnnnnnnnnnnnnnnnnnnnnnnnnnnnnnnnnnnnnnnnnnnnnnnnnnnnnnnnnnnnnnnnnnnnnnnnnnnnnnnnnnnnnnnnnnnnnnnnnnnnnnnnnnnnnnnnnnnnnnnnnnnnnnnnnnnnnnnnnnnnnnnnnnnnnnnnnnnnnnnnnnnnnnnnnnnnnnnnnnnnnnnnnnnnnnnnnnnnnnnnnnnnnnnnnnnnnnnnnnnnnnnnnnnnnnnnnnnnnnnnnnnnnnnnnnnnnnnnnnnnnnnnnnnnnnnnnnnnnnnnnnnnnnnnnnnnnnnnnnnnnnnnnnnnnnnnnnnnnnnnnnnnnnnnnnnnnnnnnnnnnnnnnnnnnnnnnnnnnnnnnnnnnnnnnnnnnnnnnnnnnnnnnnnnnnnnnnnnnnnnnnnnnnnnnnnnnnnnnnnnnnnnnnnnnnnnnnnnnnnnnnnnnnnnnnnnnnnnnnnnnnnnnnnnnnnnnnnnnnnnnnnnnnnnnnnnnnnnnnnnnnnnnnnnnnnnnnnnnnnnnnnnnnnnnnnnnnnnnnnnnnnnnnnnnnnnnnnnnnnnnnnnnnnnnnnnnnnnnnnnnnnnnnnnnnnnnnnnnnnnnnnnnnnnnnnnnnnnnnnnnnnnnnnnnnnnnnnnnnnnnnnnnnnnnnnnnnnnnnnnnnnnnnnnnnnnnnnnnnnnnnnnnnnnnnnnnnnnnnnnnnnnnnnnnnnnnnnnnnnnnnnnnnnnnnnnnnnnnnnnnnnnnnnnnnnnnnnnnnnnnnnnnnnnnnnnnnnnnnnnnnnnnnnnnnnnnnnnnnnnnnnnnnnnnnnnnnnnnnnnnnnnnnnnnnnnnnnnnnnnnnnnnnnnnnnnnnnnnnnnnnnnnnnnnnnnnnnnnnnnnnnnnnnnnnnnnnnnnnnnnnnnnnnnnnnnnnnnnnnnnnnnnnnnnnnnnnnnnnnnnnnnnnnnnnnnnnnnnnnnnnnnnnnnnnnnnnnnnnnnnnnnnnnnnnnnnnnnnnnnnnnnnnnnnnnnnnnnnnnnnnnnnnnnnnnnnnnnnnnnnnnnnnnnnnnnnnnnnnnnnnnnnnnnnnnnnnnnnnnnnnnnnnnnnnnnnnnnnnnnnnnnnnnnnnnnnnnnnnnnnnnnnnnnnnnnnnnnnnnnnnnnnnnnnnnnnnnnnnnnnnnnnnnnnnnnnnnnnnnnnnnnnnnnnnnnnnnnnnnnnnnnnnnnnnnnnnnnnnnnnnnnnnnnnnnnnnnnnnnnnnnnnnnnnnnnnnnnnnnnnnnnnnnnnnnnnnnnnnnnnnnnnnnnnnnnnnnnnnnnnnnnnnnnnnnnnnnnnnnnnnnnnnnnnnnnnnnnnnnnnnnnnnnnnnnnnnnnnnnnnnnnnnnnnnnnnnnnnnnnnnnnnnnnnnnnnnnnnnnnnnnnnnnnnnnnnnnnnnnnnnnnnnnnnnnnnnnnnnnnnnnnnnnnnnnnnnnnnnnnnnnnnnnnnnnnnnnnnnnnnnnnnnnnnnnnnnnnnnnnnnnnnnnnnnnnnnnnnnnnnnnnnnnnnnnnnnnnnnnnnnnnnnnnnnnnnnnnnnnnnnnnnnnnnnnnnnnnnnnnnnnnnnnnnnnnnnnnnnnnnnnnnnnnnnnnnnnnnnnnnnnnnnnnnnnnnnnnnnnnnnnnnnnnnnnnnnnnnnnnnnnnnnnnnnnnnnnnnnnnnnnnnnnnnnnnnnnnnnnnnnnnnnnnnnnnnnnnnnnnnnnnnnnnnnnnnnnnnnnnnnnnnnnnnnnnnnnnnnnnnnnnnnnnnnnnnnnnnnnnnnnnnnnnnnnnnnnnnnnnnnnnnnnnnnnnnnnnnnnnnnnnnnnnnnnnnnnnnnnnnnnnnnnnnnnnnnnnnnnnnnnnnnnnnnnnnnnnnnnnnnnnnnnnnnnnnnnnnnnnnnnnnnnnnnnnnnnnnnnnnnnnnnnnnnnnnnnnnnnnnnnnnnnnnnnnnnnnnnnnnnnnnnnnnnnnnnnnnnnnnnnnnnnnnnnnnnnnnnnnnnnnnnnnnnnnnnnnnnnnnnnnnnnnnnnnnnnnnnnnnnnnnnnnnnnnnnnnnnnnnnnnnnnnnnnnnnnnnnnnnnnnnnnnnnnnnnnnnnnnnnnnnnnnnnnnnnnnnnnnnnnnnnnnnnnnnnnnnnnnnnnnnnnnnnnnnnnnnnnnnnnnnnnnnnnnnnnnnnnnnnnnnnnnnnnnnnnnnnnnnnnnnnnnnnnnnnnnnnnnnnnnnnnnnnnnnnnnnnnnnnnnnnnnnnnnnnnnnnnnnnnnnnnnnnnnnnnnnnnnnnnnnnnnnnnnnnnnnnnnnnnnnnnnnnnnnnnnnnnnnnnnnnnnnnnnnnnnnnnnnnnnnnnnnnnnnnnnnnnnnnnnnnnnnnnnnnnnnnnnnnnnnnnnnnnnnnnnnnnnnnnnnnnnnnnnnnnnnnnnnnnnnnnnnnnnnnnnnnnnnnnnnnnnnnnnnnnnnnnnnnnnnnnnnnnnnnnnnnnnnnnnnnnnnnnnnnnnnnnnnnnnnnnnnnnnnnnnnnnnnnnnnnnnnnnnnnnnnnnnnnnnnnnnnnnnnnnnnnnnnnnnnnnnnnnnnnnnnnnnnnnnnnnnnnnnnnnnnnnnnnnnnnnnnnnnnnnnnnnnnnnnnnnnnnnnnnnnnnnnnnnnnnnnnnnnnnnnnnnnnnnnnnnnnnnnnnnnnnnnnnnnnnnnnnnnnnnnnnnnnnnnnnnnnnnnnnnnnnnnnnnnnnnnnnnnnnnnnnnnnnnnnnnnnnnnnnnnnnnnnnnnnnnnnnnnnnnnnnnnnnnnnnnnnnnnnnnnnnnnnnnnnnnnnnnnnnnnnnnnnnnnnnnnnnnnnnnnnnnnnnnnnnnnnnnnnnnnnnnnnnnnnnnnnnnnnnnnnnnnnnnnnnnnnnnnnnnnnnnnnnnnnnnnnnnnnnnnnnnnnnnnnnnnnnnnnnnnnnnnnnnnnnnnnnnnnnnnnnnnnnnnnnnnnnnnnnnnnnnnnnnnnnnnnnnnnnnnnnnnnnnnnnnnnnnnnnnnnnnnnnnnnnnnnnnnnnnnnnnnnnnnnnnnnnnnnnnnnnnnnnnnnnnnnnnnnnnnnnnnnnnnnnnnnnnnnctgggattacaggtgtgagccctgcacccagtcaacagtgtatactattgattggtttgattacagaataataccaaaaataataacagcaacaacaggccgagtgtggtggctcatgcctgtaatcctagcactttgggaagctgaggtgagtgaggagttcaagaccagcctgggcaacatgatgaaaccccgcctctactaaaatacaaaaaattagctgggcatggtgtggcgcaccggtagtcccagctactggggcggctgaggcatgagaattgcttgaacccaggaggcagaggttgcagtgagccaagatcgtgccactgcactcctgcctgggcgacagcgagactctgtctccaaataacaacaacaacaacaacaacaacacggaatagctaacacttaaattcagcactttctatgtgccaggcagtgtttgaagtgctttaaatatatctacatatgaaccgattgattctatataacaattaggtctactgttgtctccgttttaaagatgaggaaactgaggtcaagagagggtaagtaacctgctcagggttggacagctagcattattttgctttgtttatttttaactcctcactcttcacctatcctcagtgccttttggttagcaatggtgacttgaaaatacaaacatttcttgaaatccacagtaaacccaaaccacatgcaatgatgtttgttttttggaaatgatcacacaccacatcatattccaagtgttgagtgcatatgcctcggagtggaagtgggccttgagagcatgttgtatacattttgaaacaaataagcctggactttttatctgctcggtttggagaaaggggaatagcaataaaatcataaatcacatataaatgatgtaacacactgaatagtgttttataaaataaggtgagggcatgatggtgcacacctgtagtcccagctactcgggaggcttgggtgggaggatcactggagttcaggagttcaaagaggcagtgagttattgtgccactgcactccagcctagatgacagagtgagaccctgtcctcccaccactaacaaaaaccctgagatgataaatagcaaggcagcttgaaagtaaatagtaagtttaggatttgagaaaggggcaagatgttctaagttttcttcctttgttcagaaggaatctcagagttaaagctatgaaaagggaccaatctaattagtaaagagtttaaataggctgggtgtgttggctcacacctgtagtcccagctacttgggaggctgaagttgggggatccctcgagcctgggaggttgaggctgccgtgagccatgatcacaccactgcattctagcctgggtgagagagtgagaccctgtctcaaaaaaagagtttaaatggtttaaaaaggggggtgaggagagtagttatttgtaatgagctagtgcaggggtccccaacccccacccggaattagtccatggtctgttaggaaccaggccgcacagcaggaggtgagcagtgggcgagctcagcttcatctgtatttacagccgctccccatcgcctgtgttaccacctgagctctgcctcctgtcagatcaccagcaccgttagatccattagattcttttttttaaattgctgctgcacaaattaaggcattagattctcataggaacatgaaccctatcatgaactgcacactccttatgagaatctaatgcctgatgacctgtcactgtctcccgtcactcccagatgagaacatctagttgcaggaaaacaagctcagggctcccactgattcctacattatgttgagctgtataattatttcattatatattgcaatgtaataataatagaaataaagtgcacaataaatgtaatgcacttgaatcatcccaaaaccacccccacagctgggtctgtggaaaaattgtcttccacaatattggtccctgatgccaaaaagattggggaccactgagctagtgggttctggaacttcacctcttatgagcgatgtaaccttgggcaagttacttctctgagatactctataaattaaatcacttaatacgttgaaggcacttggcccagtgcctggcacataggagatgctgaataaacattcactatttttaatataatcttaatgcatagtaaaattatattaaaaagagtgagctagttcaatacagcaagtgtgaaaaactggactctgaaggttgacaggcccaggtccattcccaggtcaatttctggaagcaatttgctgaacaaacagttcgctgaaatagtgaggtttttttttaagttttgaaacatggtccctgccccacccctgccctgtccctgcctctgacaaagaaagaactatggcatttcatgacttgatttctggggattttcctttcagttttctactaatcaatgcattggaaaattgacctgctagtcctgggtttgaatttgttttacctttttttttttttgagatagggtctcgtgctgtcacccaggctggagtgtagtggtgcagtctctgctcactgcagtcctgggttcaagtgattcttgtgcctcggcctcctaagtagctaggactgcaggcacgagccaccacacctggctaatttttgtatttttagtagagattgggtttcgctgtgttggccaggctggtctcaaactcttggcctcaagtgatgtgcccaccttggcctcccaaagtggtgggattacaggtgtgagtcaccacacctggacttttttaactttttaaataaatttaaattttttttttgtagaaacgaggccttgctgtgtggaccaggctggtttcaaacttctggcatcaagcaatccttctatctaggcctcctaaagcactaggattgcagacatgagccatggcacctagacttgaccctgggtttgaattctggctctgacacttgctaactgtgtgtgaccttgggcaggccactgacccttcctgagccttatgggaatgtgggaataatattaggtaatggagcaagttaatataggtaaagaatttagaatagggcctggcacatggcctcagtctagtaccagagtccaagcccataaccactgtgccaacactcttgtaataaatgtatgtgggagacagggaggctgggaggctggatatgtgatgctactttatgtcaactacacatgaattttatatgtataatttatataaactaattgatgccatctactattattagactgaacaaatattgttacttggaactctcagatatgtaatagcttttttttattcaaatccaaaatgtaaaatgtgactatgagtaattgataatgaacttaactgataagaaacttcaggatagatttttctcaagttttccattcagtcttacagtgattaaagtgatgaaaaattccaactatgcatgccctgctcggagcgtccaagaagagcctaccaacgggggctacttaagctctcaaaggccaaacacacaaacggcattttgagtgcaagtggtctgtttgaactctgaaaaggcggggcagcgggcctgcagctcctggagttcagggagacccggaaatctcaccctgccctcttcttgtgttgtgtttgtcacagccttgcccctcttgctcgccttgaaaatggaaaagatgctcgcaggctgctttctgctgatcctcggacagatcgtcctcctccctgccgaggccagggagcggtcacgtgggaggtccatctctaggggcagacacgctcggacccacccgcagacggcccttctgggtgagtggtggtgctcacccccaaaagtgggcaggtgggggtggtttggggagggctcagggacagggattggtgactgtttgagaagctttcctttccctgggtccttgttggatgtgctgggcctggggtcctcactggtggtgaatgcatccggagttgagcacgtggttgcacacgagttttcaaaataaacttttctttgaagcctttaattgaatctgaggcttatggcttttctccaatattcagggcaagatttctcatctgaaaatgtccttgttgttggacctatctgggcaaaggtgttatgaaaattttttattgggtttgcccagctagatctgttaataatgcttccctgcatggcagcagggaagtaagagctgggccagaagagaggtggggacattgtgagctgaatcgaggtattaggaatggaaaatgccaggggtctattcatctgatccagtgaacatttttcctagaaaaaggaaatgtcatgaaaacacacggaaaacatgtaaatcagctgattctaaacaagggcattggtaagcctggcatgtggaggttataggaaggttgggcagtgccaagagaatgagttttggcattgacctgggttcaagtcctgcctctgctactttccagatgtgatataacctccctgaggctatagatgtgatataacgtaggtgatataacttccctgaggctcagttttatcatctgtaaaatggaagtgtgaatgccaaccttggaacatttctgagaaataaatgaggtaatatacatacattctaggtactcagtaagtaaaagctttaccacaactgtcattctattaagttctttgaaactgtatttgacatttataccttgttggccagccactcgaatctgaccccctgcaaaggctactaagagaactgcccagtgacctggtagcctcagtggcatccgaaattacaatcagggaccacagggacctaaagagccctgttttcagaggtcagaatctttattgatgttaactaagtgaggaccccagtgataggtcttccaggttcctgaaagtccttgtttccatagtgatgggggacaacacttttgcaaatgtgaaaaggagtgggannnnnnnnnnnnnnnnnnnnnnnnnnnnnnnnnnnnnnnnnnnnnnnnnnnnnnnnnnnnnnnnnnnnnnnnnnnnnnnnnnnnnnnnnnnnnnnnnnnnnnnnnnnnnnnnnnnnnnnnnnnnnnnnnnnnnnnnnnnnnnnnnnnnnnnnnnnnnnnnnnnnnnnnnnnnnnnnnnnnnnnnnnnnnnnnnnnnnnnnnnnnnnnnnnnnnnnnnnnnnnnnnnnnnnnnnnnnnnnnnnnnnnnnnnnnnnnnnnnnnnnnnnnnnnnnnnnnnnnnnnnnnnnnnnnnnnnnnnnnnnnnnnnnnnnnnnnnnnnnnnnnnnnnnnnnnnnnnnnnnnnnnnnnnnnnnnnnnnnnnnnnnnnnnnnnnnnnnnnnnnnnnnnnnnnnnnnnnnnnnnnnnnnnnnnnnnnnnnnnnnnnnnnnnnnnnnnnnnnnnnnnnnnnnnnnnnnnnnnnnnnnnnnnnnnnnnnnnnnnnnnnnnnnnnnnnnnnnnnnnnnnnnnnnnnnnnnnnnnnnnnnnnnnnnnnnnnnnnnnnnnnnnnnnnnnnnnnnnnnnnnnnnnnnnnnnnnnnnnnnnnnnnnnnnnnnnnnnnnnnnnnnnnnnnnnnnnnnnnnnnnnnnnnnnnnnnnnnnnnnnnnnnnnnnnnnnnnnnnnnnnnnnnnnnnnnnnnnnnnnnnnnnnnnnnnnnnnnnnnnnnnnnnnnnnnnnnnnnnnnnnnnnnnnnnnnnnnnnnnnnnnnnnnnnnnnnnnnnnnnnnnnnnnnnnnnnnnnnnnnnnnnnnnnnnnnnnnnnnnnnnnnnnnnnnnnnnnnnnnnnnnnnnnnnnnnnnnnnnnnnnnnnnnnnnnnnnnnnnnnnnnnnnnnnnnnnnnnnnnnnnnnnnnnnnnnnnnnnnnnnnnnnnnnnnnnnnnnnnnnnnnnnnnnnnnnnnnnnnnnnnnnnnnnnnnnnnnnnnnnnnnnnnnnnnnnnnnnnnnnnnnnnnnnnnnnnnnnnnnnnnnnnnnnnnnnnnnnnnnnnnnnnnnnnnnnnnnnnnnnnnnnnnnnnnnnnnnnnnnnnnnnnnnnnnnnnnnnnnnnnnnnnnnnnnnnnnnnnnnnnnnnnnnnnnnnnnnnnnnnnnnnnnnnnnnnnnnnnnnnnnnnnnnnnnnnnnnnnnnnnnnnnnnnnnnnnnnnnnnnnnnnnnnnnnnnnnnnnnnnnnnnnnnnnnnnnnnnnnnctgaccaacatggtgaaaccctgtctctactaaaaatacaaaaattagctgggcatggtggcgggtgcctgtaatcccagctactcgggaggctgaggcaggagaatcgcttgaacccaggaagtggaggttgcagtgagctaagatcgtgccactgcactctagcctgggtgacagagtgagactctgtctcaaaaaaaaaaaaaaaagaaaatagtggagtgacaatcgtgaaaccagaaagcaaacactatagctgtggcctggattctcaagtgcaatctgcttttttttttctcattttgatggggaacaaaaatggaaaagcatgctcattggtagtccttgccccgagggtatgaccttctcttcattcttagaataatgtagtgttttgtattttatgcatgtttgcttctcttggctcttggactatttgttcagaatatggcccaggccacatttcactttttaatggcaaatcattttggctgaagttatggcatccactggcatgatggattttactggttatttgcttgcaagtatgttcctgaaagtttaacagagtagaaacagcagaattgtttcttaggttaattttttttgaactttctgggttttaaaaatgtttatcttttatgtttaaattcaggtcagagtctcagtaacaacttgagtcagtttgaaaaaataacgcatgtatatatccaccatcctgtgaacatctgtgggctgttcactcggcagcctgtgatgtctgtccacatgggcttatctcttacctcattcatttatctggaatttctactctgtgccagatgccggttgggggtgtgggggtagtgtttaagatgaatagacaccatcaggaggtgcacagagtagtggaagagacaggcatgtgaaaagatcattaatttggtagaatcggtgtgcaaaagtagaggcatagctacattatagctcaactctgcctgctgagcaggcttagtgtaaggcagtggttctcaagctttggtctcaggatccttccttttacgctaaaaattatttttattttattattttattttattttattttgagatagggtctcactgtctcccaggctggagtgcagtggcatgatcatggctcgctgcagccttgacctcttgtgcttaagcaatcctccaacctcagcatctcaagtagctgagactacaggcacatgacactacgcctggctaatttttgtattttttgtagagacagggtttcgccatgttgtccaggctgatcttgaactcctgggctcaagcgatcctcccccctcagtctcccaaagtgctgggattctaggcgtgagccactgtgcccagccaaaaattattaaggatcccaaataacttttgtttgttttttaagaatcctgaggacaatcaagggagctttgtttatgtgggttagatctattggtatctacctgatcagaaatttaaaaataacaataataaaatcagaatgtgttaacaaactatatatgtataaaaaactatattttctggccaggtgcagtggctcatgcctgtaattccagtactttgggaggctgaggtggaaggatcacttgagcccaggagtttgagaccagtctgggcaacatagggataccttgtctctacaaaaataaaaaaatgaggccgtgcacagtggctcacacctgtaatcccagcactttgggaggctgaggtgggcagatcacttgaggtcaggagtttgagaccagcctggccaacatggtgaaaaactgtctctactaaaaatacaaaaattagcctggtttggtggtgtgcacctgtaatcccagctactccggaggctgaggcaggagaatcacttgaacccgggaggcggaggttgcagtgagccgagatcacaccactgcacttcagcctgggtgacaagagtgaaactgtctcaaaaaaaaaaaagaaagaaaaaaaaaaattagccgggtgtggtggtacacacctatagtcccagctaattgaaatgcttaggctgcaggatcacttgagccccagaggtcgaggctgcatgagtgagccgtgatggtgccactgcactccagcctgggtgacagagtgagaccctgtctcaaaaaaaaaaaaaaaaaaaaaaaagaagagtagcaccgttttacagttttgcaaatcttgtaacggtctggcttcgtagaagacagctagattgtcatttcttgaccattcaatctgtcatgaaatgttttcgttagattatatgaaaatgcatggatatgtagttggaaaagggaagagcatttaaatagccttttcatataattgtgaatgttctttgatactacaccaaaacttgacaaagagtagtttcttaaagtttagttgcaatgtgaaatctaaaatcagatcaataaactttttgttctctatatacccacaagagaatgagagtatgaaaggcaaacattcatgttattatggaaatagttctgacctcatggatcctctgaaaaggcctcagggacccctagaattccccaaactacacttgagaatggctggtttaagagaattgttcccagtgaaggtcctgcccacggagagccctgtgggacagcaggtggcagaggcatgaggatggagtgtggcagtggggctccgatgtggcgctgggtctgccagacaggtggtctgagctggagataaggcagcaataatttaggacctcgagggctccaaggaaggagttttgagcttcattttgcaggggtaggagctgtggagggctttaagcagtcaacagtgggtgtcgctttgtctttgcacccactgtactctccggacagacttgaccttcctgggttgtggcaaagagcagggatctaaatagcaggctgcaacaggagaaggaacgagcacctgctctagcccaaagacccctccaggccacaacgctggcaggtagagtcggagaatctgactgtgctgtacccagaaccctttggacttggattcttccccttgaccagccttatcagtggcacccatccccttccacactcctcgctaggccctcctcaagggggcgctaactggaaggcatgctgccccactgctaatggccgcctgcttcgtttgtgcacactttttctctttgttaccccactttcctatgaggaggtggacctgtctccagaacaaccagtggggtatatcagcctttttggaaaccttaaccctccttgcccaaactcccagagtattcttatttatttatttatttatttatttatttatttatttatgatagagtcttgctgtgtcaccaggctggagtgcagtggtgggatctcggctcactgcaacctccgcctcccaggttcaagtgattctcctgcctcagcctccagagtagctgggattacaggtgcctgccaccacgcccggttaatttttgtatttttagtagagacagggtttcaccatgttggccgcctgcctcggcctcccaaagtgctgggattactggcgtgagccgccgcacccggcccccagtgtattcttgattccctccactccacaaactactctacagtcagccagcttgtggtctctggtggtggtctgtcttatgaggtcttgttgacatatgcattcttttctaaatttaccaaactggctcattttatttctgctaactaaacttgaaagccttttcttttcctattatagactctcctttggatcaatactacacactcagaagttatgtttgtgttttaagagagcattttgtggcaatatggcatcaattctagaagtgggagacaaagatttaaaaggaagttggccctgcagtctggtcaggggatggtagggcctgagctccctcccaccccacaccccaccacacacactgctggaagaattccagaggtgttccagggtagacaccacagcatttagtaaaatttactcataacagttaatttactacttaaaaactaatgaagaaaatctaagaattcaccttttttttttttttttttttttttagacaggatcttattctgttgcccaggctggagtgcagtggcactatcatagctcactgcagcctgagctcaagcgatcctcccaagtcagcttcccaactaactgggactacagtcatgtactaccacgcccaactaattgtttaatttttttgcagagacagggtcttactatgttgcacagactggtttcaaattcttggccttatgcaatcctcctgccttggcctcccaaagtgttgggattacaagtgtgaaccattcctcctggcagaattcaccttacacagccccaaattctgctcttggggaatcacagtgtattaagagacacttattttcatttttgcatgtatctctaaacctgacatcaaaatattcataaaattgcaatacgtttcatataatgagctgaaacctcctaagtgagcaatgtgaagttgttggctgcctggagaattaaatgtaagcatggcctgctctgtgttgctaatggaaatttttacctaggttgatatttattaacccccccttttttttttgagacagagtcttgctctgtcacccaggctggagtgcagtggcgtgatcttggctcactgcaacctccgcctcccgggttcaagcaattcttctgccttggcctcctgagtagctgagattgcaggcgcccgccaccatgcccggctaatttttgtatttttagtagagacggggtttcatcatgttggccaggttggtctcaaattcctgacctcatgtgatctgcccacctaggcctcacaaaatgctggaattacaggcgtgagccaccgtgtctggctccaacctacatttttaaggcttagctgccactcaatggatttctacatcccaaaacaatacctttaattgacttttattggcctcctctgtgaaggacggaaagcagatgccagaagccatgagaggctctggctctccgaccaacccgtggaagccactagtcttaaatttcctgaagccattttgccatgattaaaacttttgtctccttccctgagctttccagagctttgtccattctcttccttctacctggaatatccttccccagacaagacccattctcatccagggccaggtcaaatgccacctcctccctctccaggcaagacctccattgagggaccacacacattgcaggccctctgccaaagtgccaaccctctctgccttacattccaaggggtaatagtgatacttacctcagagggattcacattttagctatttttgcacttgtctcattttactactagactgtctcttcaagatagggactgaatatttttcatttctcatagcacctatgaaaggcaactctcatttactgagcccctgctgtgggttgggacgtgttatctcacctaatccatagcaggagcaaacactgtaaggtaattcttgttatattctattttcagacaaggaagctgaggctcagataggttaagcagttttggcaaatttgtcaagacttctgcaaacctagacagaaaaggtgctcaacccccagcccctttatggaaaggatgcatggcttaggggcagatatgcgttggagcaaagagaaagacacacgtactcttgaatgtactattttagcccctgcttgctccttgacccagagtttttgtgtagaccatagaatgccctgcccatctgtatttggaggtgctgctgcagccggtcacacctgggttctactgacctccagccctggctgtggtcctgcccagggctcagtgtgtattgaacaagtaagtgaatgagacatgcagaaggctgatttcattcttatttgaatgatttcaatcttgattaaccttcttagcaagaggttattttcttctcctggacctcagttcattcatctctaaaagaaggaagttgaagtcaatgatctctcaggtctcatctcagatgtggtgatgtcaccaattcccctgacatcccttctatgtgggaaccctgatgaaatccgcagctttccctcactgtgtccaggtaggaaagccaaggaggaaccatattctggaagccaaggaaggagaagttttgagacacagggtggtcagtaggatcaggcaggacaacagggatggggcagtgggatcaggtaacacagcagggctgggcagtgggttcaggcagaacagtgggctgggcaggggatcaggcaacacagcaaggttaggcagtgggatcagataatgcagggctaggcaatgggatcaggcaacacaacagggctaggcagtgggatcaggtaacacagcagggctgggcagtgggatcaggcaacataacagggctgggcagagggatcaggtaacacagcaaggctgggcagtgggatcaggcaacacagtagggctgggcagtgggatcaggcaacatagtagggctggacagtgggatcaggcaacacaacagggctgggcagtgggatcaggtaacacagcaaggctgggcagtgggatcaggcaacacagtagggctgggcagtgggatctggcaacacgacagggctgggcagtgggatcaggcaacacagtagggctgggcattgggatatggcaacatgacagggctgggcagtgggatcaggcaacacaacagggctaggcagtgggatcaggcaatatggccgggctgggcagtgggattaggcagtgaagcaggggttgttaaacttcattgtgcatcaaaagctcctggaaggcttgttagaacacagattactgggccctgtgctcaaagtgtctgattcagtaggtctgggttggagcctgataagtggtattcctggaaacctcagtttgagaactattactgtagagaaacctacaaggttgggtgggaatgggcaggaggaaaagatactagaagaagatgctgtggggcatgagccggaaagacaatacaagatgagtaacatctgcagagaattgcagctgcagagtataaactaactgtaatctaggtccagcccttctgaagctttacaaataagctgctagcattgtccagccttatagggaattggcaaaaggtgagtttcaggcctacatgggagccagcctcttacagcacagcagttagcaatacacatctaaagaactaagtagctggcatgtgtctttatcatcagaatagattatacaaatgaaggtcgatgcattgagcttatcaaattgttttaaatatagcaacgtttgttttaaaatttttttttaaacctttgaagtaaaactgcctctttttcagtgctcagctgcagtgcatcacgggcagtacaatgacagctggaaacatggaccccatggaggcgctgtcatggccgccctcagcacagacctgctgttccctatcaaattcatcctctgtgcctatgctctgtttaatatagatttttataaactgtatgaagtaaaattcttcattcctatcttgtgattaacgctggaagaatccaaaaagcacagcgtctgacctccaataagccataaagttaaaagcttttctaggcaatgaatatataacctgatttttttctcctacagatcctctctctccccttctttctccctttctcctttgtgtgaaactctttctttatccctttccttttctataaacttccttgatctttccctctccagtactccccttcctcattcccttcttcagttccaggatgttctctcctcagcttgcccatatattttgcacctgcaactcatgtgtgtgtcagggagtagaggtgagggattatcccttccgtgagtgacagtcacctttcttttctttgctggctggtgcttttaggagacaaggtgtacaaccttacccctaaggagccagtcctgtccttcgtctctctatctaatgctaataatgataacaatagtagtgatgacggccgggtgcggtggctcatgcctgtaatcccagcacttggggaggccaaggtgggtgaatcacctgagatgaggagtttgagaccagcctggccaacatggtgaaaccttgtgtctactaaaaatacaaaaaattagccaggtgtggtggtgggcacctgtaatcccagctactcgggaggccgaggcaggaaaattacttgaacctcggaggcggaggttgcagtgagctgagatcacaccactacactccagcctgggcaacaagagtgaaactccttctcaaaaaaaaaaaaaaaaaatagtagtgatgacaagccaccatgtgccaggcactgtggtaggcagctcacacttcactctgcatgtactattatcccttaaatgtctcatacaaggtcattcaactactgagcagccagaggtagaattcaagaagcgaacttgctgttttctctacttaaactcttttatcacccaggctgcagtgcagtggtgcgatcatggctcactgcagcctcgacctccaggcccaggtgatcctcctatctcaacctcccaagtagctgggattacaagcacgcaccaccatatccagcaattttttttttcatatttttttgtaaagacagggtttcaccatgttggccaggctgttctcgaactcctgagctcaagcgatcctcctgctgtggcctcccaaagtgttaggattacaggcataaaccaccacaccccgccttcttgaactcttttctataaccccacccaccctgttttatccagttgaattggactcatctttcaggtctcagtggaagcgcttctaatcttctaggttgggatttaataccccaactattgcattcccatggagtgctgtatgtccccaaaactgcacttagcctgtacagcaattgcctgcttaattgtctgtgtagttcgtcactgtaccagcatagctgagcaaggtgcctggtacacagcaggtattccataaatgcctataggaaaagtaaattaacggactcttcctcaataaatatatatatgttctagaaatttgagttgtatattagtttcctagggctgctataacaatataccacaaagtgggtggttaaacaacagaaatgtattgtctcacagttctggagctagaagtctgagctcaaggtgtcggctgtgttggtttcttctgagccctctctccttggctcataggtggctgtcttctccctgtgtctccacgtggtcttttccctctgtacctgtgagtgtccagacttcctcttcttataaggacaccagtcacattgaattaggctcgccctaataacctcattttaacttaatcacatctttgaagaccctaactccaaatccggttacctcctgaaggcctgggggtgaggacttcaacatatgaatcgcgggcagggagagggacagaagtcagcccatgacaagctgctttgcttttcactttcccagtttgtggaggacagtgtgtcatctttcaacatgtttctaaatagcctctttttcctttctgattcactttatgttcccacttcagggtgatatgagaaacgctggggaagcatgttcaaagacttgagcagtgggtcacttattactttaccatggcatatttcagagtcattaaagcagctccagcaagcgcagtgggctgtgcagccggaatcccagggctgaagatgggacaggagtgcaatctaaccaggatgtgaaaccaagtccaagtaaggtttttcaaaagccaagaattagaacgactaactcagtcctgtttcagtatatccaggggaggctgatttatagggaaagatgaaaggaggacaatgtgtatattttggctgctcagaagaccatggggctagacatgggggaggaggaagttattataagcctacagccagccaatgagtaagaacatcaaagaggaaggctggttggccagatggaccaagagctggggcacaggcaggatctttgggagaaacaagatgaatggatgcttcggacaacctaagttcagagcccggaggggcctttagaaaggcatgatggattatgtgtactgtgggtcattgcgccatgagaagtcccatgggggatgagccccagaggcccttaaagtcagggtggaccattaagtaaactgcggaggaatttcttccaggagggctcagacttggcaaaggctgggaagggctgctttccatctccggctcttaatcccccagccctgacactggggctcgcttgttccagcctacttgatccatttattgaataaagatatactgagaaccagccgggcgtggtgactcacgcctgtaatcccagcactttgggaggccgaggtgggcggatcacgaggtcaggagattgaggccgtcctggctaacacggtgaaactccgtctctgctaaaaatacaaaaaattagacgggtgtggtggcgggcacctgtagtcccacctactctggaggctgaggcaggagaatggcgtgaacccagaaggcggagcttgcagtgagccgagatagcgccactgcactccagcctgggcaacagagcgagactctgtccccgcccccccaaaaaaagatatactgagaacccttttattccaaggtctgcattaggcccagtgaaagatgaggaatccttaaatctttgggacttggtggggtcaccggggatacatcctcctctcctaggtaccgttcatctgtttgcacccagatgtggcctgtcccatgtgattgtcccaccactgaccgaagcaggcctctccattctcctcttccagttaaagctgaatttgtctccaaagtgaagaagaataggaaaaccatcaattttatggagctttttaactatgccaaaatggtttcattctgatacactttttttttttctttttgagatggagtcttgctctgttgcctgggctggagtgcagtggtgtgttctgggttcactgtaacctccgccttttgggttccagcgattctgctgcctcagcctgctgaatagctgggattacaggcacgcaccaccacaccaggctactttttgtatgtttagtagagatggggtttcgccatgttggccaggctggtcttgaactcctgacctcaggtgatccacccaccttgacctcccaaagtgctgtgattacaggcgtgagccactgcacccggccctgatatactattttgtttcataatttgcttgggtaatcattgattcatccattcaacaaatacgtatgaagaagctacagtgtacaaggctttgctttgggtgccaaggatactgcagggtcaggccagggtcacatctggctcaccaccagtcaggctttagggtttggtacaaattccacggcctcaggcaccatgggtgcataggatcagcaaaataagtccttaaagagatggaaaactcactcataaaaccatctgggcttgatgccttttgtagaggggatatatttgacaacaaattaaatatcttcaaaatccatttgtgcattcaggtttttcatttcttcttaagtctattttggtcattgatatctttctgaaaagttttctcatttgtctacattttcaaatctgttgttataaattatagctcataatactgagttacgttttaatagggaacatgtattttataaatacatgtttataaaaaatagggtcccactatgttgcccaggctggtctcgaactcctgggctcaagcaatcctcctgcctcagcctcccaaagtgctgggattagagatatgagccactgtgcctggccaggggacatgtatttgttttttttttttttaacaaaaagtacccagtgttaggccgggtgtggtggctcacacctgtaatcccagcactttgggaggccgtggtgggcagatcacttgaggtcaggagtctgagaccagtctggccaacatggtgaaaccccgtctctactaaaaatacaaaaaattagctgggtgtggtggcgggcacctgtaatcccagctacttgggaggctgaggcaggagaactgcttgaacccaggaggtggaggttgcagtgagccgagatcgcaccattgcactccagcccaggcaacaagaacgaaactccgtctcaaaaaaaaaaaaaagaataaaaaaaaagacaaagaaaaaaagcaaaaagtgcccagtgttttattctcatagatcacaaagctcttagcaaaaattctgaagaaacactgagacctgggggatgggtgtgtgttgccgggagaggagtcgctattgcctcttgggtttctccgataacacctggcttttgtagaagatcttcacagtttttcaaagcacccatcccttgccttacctctcctgtctcccttgtctgcctgatgcctccaacttctcagaagtgccagggccagggcactgctgggcccatggtgtgggtctacattgcagtaaaaggctcgttacccactcccctcaacacaggagtctcctgtttttaggcagcttaagaaagcagtcttgtctgtggaggaatgcccagccttcttggtgcagatgctgggtttggggacccagctgtttgcaggagttgtctaggaacgtcagtacccagggactgtgagactcctgggatgttatagtccccatgctagcagagggaagacactgggcccatgagaagttgagtttaggtagccagtcctgctgggagaaaggaaagcctcagatgccagcaagcttgctgtccagccattttctgacaaccctgcttattgcaccatgtacagtaatcaacacagacttgcatctgctctgaggggtgcaggtggtgctccatggaacacacacatgcacgccttcacccaccctttcctgtacctttggaattcgtggcataggaacactatatctattgcacttgggtgtggttataatgccagggtaaagataagtttctctgtggagtacctgaatgacaagatcatattttgtgtcagttccacatggaagggctcttcctcacagacattggaagggtaacagtagaatctaagctctaggaaggcagggtttttttgttttttgttttgtttttgtctgcacatgatagacacttagcaaatatttgctggatgggtggacaaatggaaactggaatgaaatggagatgcctaggtgagtgtgggaaggactctgcctctcctggtctttgccctgtagatgccaaatatcctaggcgggaactgggaagttggcagatgctgctgtgtagagagtcagtggagcaaagactggaaaaacatccagcctgtgtcagctagcaaaagaggggttttgggtctattttggggtcagaatattagaggaggtaacctgtaccctcaggcttcagagtgtggttgactaggaggctccaaagagtaagtgaaacccaaggggacggagataggaccacttgatccatccttgtaggttcagagctatgtcttatcaaatgttttcccttcatgtagtagcatgataatgaactcttcctactttggtttgataatgcaatggattatatggatagattttctagtgttgaaccaatccttgcattattgaggtaaactttacttgatcataatgtactttttaataccttactagaattattttgctaatctgtttttgtatttagattcataaattaaactggcagatattccctctaattttcattttttgcactctctggttttggtatcaaagttaagttagcttcatgaaaataagttgtttttgtaaagtaggtattagctattccttaaagagctggcaaatttgttcataaaaccatctgggttgaatcccttctgtaggggaaatatgtttgaaactaatttaatttctttaaaagccattagtctatttgacttttctatttcttttgagtctattttagtaattgatattttccttgaatgttagccatttgtctacattttcaaatctgttggcataaatgacagttcataatactgagctgtgttttaataggggacatgtgattctttaaccaaaggtgcccagtgctttgtttctgtaggtcacaaagttcttaggaaaaattctaaagaaacattgagacctgggggatgggtgtgtgtgctgcagggaggggagtctggattgactcttgagtttctctgataatatctcgcatatgtgaaaaagccgtacagtttttcaacacacgtattgcttgccttatctcttttgtcttctcaaagtccttgaaatgtagattttataatcagtctcaatttgtagataaggaaaggccaatcagacataccagtttatctataatatagatgagatcagaagccactcctagatcacaccattttaattagaagagagtttagagatcatctcattgagaaactcttaacctgggatccatgtccctcaaagtgctcttgggtagacttcagtggctccataatttggatgagaacaaaattacattatttttcactaaactctaagtgcagtttagcattcccttctattatgattgcaagcaacaaacaccagagtagtagcagtactgtgtctccagtagcaatcacagatattttcatggcacattgtagccatcagagataactcaaaatactgtttacactcatcactacttcaaaattacactagttagtagacccgcctcttgatcttgacatgttgtttttaaaagtacatgttactctataccaaatttttaaaaatattttgataactgcagttcaaataattggcctcctttctaatcctttgcattcatttacttgtttattgtgataaaatatacataagataaaattgactattttaaccgtttatagtacatgtttgatggtattgagaaaatttacaatgttgtgtaaccatcaccactatttccagagcttttcatcatcccaaatagaaactctgtaaataatgaagcaataactcctcattcttcccttccccaccccccagtaacttctattctacttttttctctatgaatttgcctaaatacctcatacaaatgaaattctatcatatttatcctttggttgttagcttttttcatttagcttagtgttttcaaggttcatccatgttgtagcatgtatcagaacttcattctttttgtggttcaaaaatacgctacattttactccattcacctgtcaacggccacaggttgttttcacctttggactactgtgggtttttttgttttgttttgttttttgtttttttgagacagggtcttattcctatcacccaggctgcagagcagtggcgtgatccgggctcactgcaaccttgacttccctggctcaggtgatctttccacctcagcctcccaagtagttgggactacaggcacacaccatgcctggctaattttttgtattttaagtagagacagggtttcatcatgttgcccaggctggtcttgaactcctgggctcaagcaatccacctgccatggcctctcaaaatgctgggattataggtgtgaaccactgtgcctggccacctttgagctattgtgaataaggctgctatgaacattagcacacaagtatcttcttgagttcctgctttcaattcttttggatatatactaaggagtagaattgctgggaaatatggtaattctatgtttaactttctaggaactgctaaactgtgttcaacagtggctgcagcatgttacattcccaccagcagtacacgagggttccaatttctccacatcctcaccaatacttgttattttcattaaaaaatattaattaccatcctagtgggtgttgcattttattttaggcatgtaaaaactttattctgagaaggagtcatgggcttctccagactgccatgggggtccctgatacaaataaaggttaggaagctaggatgagggaactcaagagctcagagatattgtcacatgtccaaggtgaggtgatggactagcagcagcccaggcattagaactaagtttcctgggtctcaaaggagcccttttccctcctaccagatggtctgttctcatgtacatgatccaccccagccagtggtcagaactgagtcagagctggagctaagccattgaccaaccagctactgaagctgaggccagcaccagacacagactagatagacataattaatccctgtttgcaaatcactgcaatgtagaactaccatgcaccaccacagctgctaaatccttatccagcctacaaacatccactgaatgcctgtgtgcagatcaaactccatattcagttggagtgtttgggggacacttacggggacatcaacggacaatttggtttataggtataaagttcaggagggagaaataaccctgtgtatgtttcatttaattacagaataggtgtcttgatctctcgtttctttgtggggaccctctatttccgcagaggcaggttcagatggcctcttgagtctcatcgcccattttcttactgagctctgtcagccttggctcctgaacctttccacacttgtcagctcagtttttaaaataaccatagctgactttttttttttttttttttttgagacagagtcttgctctgtcgcccaggctggagtgcagtggtgcaatctcggctcactgcaacctccatctcctgggttcaagtgattctcttgcctcagcctcccaagtagctgggataataggagcctgccaccacacccaactaatttttgtatttttggtagagacggggtttcaccatgttggccaggctgatctcgatctcctgaccttaggtgatctgcctgcctcggccccttaaactgctgggattacagaagtgagccaccatgcccagtcatcatagctcacttttttttttttttttgagatggagtctcgctctttcctccaggctggagtgcagtggcgcaatcttggctcactgcaagctccacttcccaggttcatgccattctcctgcctcagcctcccaagtagctgggactacaggcgcccgccaccacagctggctaatttttttttttttttttgtatttttagtagagatggggtttcactgtgttagccaggatggcctcgatctcctgacctcgtgatccacccgcctcggcctcccaaagtgctgggattacaggcgtgagccatggtgcccagcccatagctgacttttaatgagttttaattctagctctccactgtgcaaccatgaataagtaacttaaccaccctgaagttcagttgtcttgtttgtaaaatgaggataataatgatacctccctcatagagtggttatgaggatggaataagacaatacacatagagggcttggcacagagcctggcacagaggaagcatttcattagcgctgttattgttgattttaaaatttattattaaaagtcactttgacgcctataatcccagcactttgggaggctgaggcaggtggataacctgaggcgaggagtttgagaccagcctgaccaatctggtgaaaccttgtctctactaaaaatacaaaaaattagctgggcgtggtggcagacgcctgtaaccccagctactcgggaggtgccttgtggtaaaagatgggccaaggagtttttggttttaaagcgaaagcctgtaatcactgtgcctgctcacagggggattgctatggctaagttcatagataattgggtagttggctgaggcaggagaatcgcttgaacccgggaggtggaggttgcagtgagccaagattgtgccgttgcattccagcctgggcaacaagagtgaaactctatctcaaaaaaaaaaaagtcactttgtaagttgcaaagtatgactctactatgagatctttacaactaggaattaagccagttacgatggcccatgcctataatcccagaactttgggaggctgaagtgggaggattgcttgagcccaggagttccagaccagcctgggcaacatggtgagagcccatctcaaagaaaacctaggaatcagagcttctcatctctgggcctaaaacatctggtggagtagcttctcaggaactgtatactgaatgaatgagtgagatgacatttactaacagttttattaacttttatcttttatttacctatttgaccatctactgtactgacttaaatataaaatagcagtttttctctttcaacctttttttttgaggcagagtctcactttgccacccagactggagtgtggtgatgcaatctcggctcactgcaacctccgcctcctggtttcaagtgattttcctgcctcagtctcccaagtagctgggactataggtgcgccaccgtgcctggctaattttgtgtttttagtagagacagggttttgccatgttggccaggccagtcttgaactcctgacctcaggtgatccaccggccttggcctcccaaagtgttgggattataggtgtaagccaccatgcctgcaccagcccctccccgcccccttttttttttgagacagggtctcactctgttgcccaggctggagggcagtgccctgatcttggcttacttcagcctctgcctcccatgctcaagtgatcctcccatctcagcctcccaagtagctggggccacaggtgtgcaccaccatgcccagataattttttgtatttcttgtggtagagatggggttgcccaggctggtctcaaactcctcaactcaagcgatccacctaccttggcctcccaaattgctgggattataggtgtgagacaccatgcccagcctctttcaactttaaatcaagtatcagtcttagaatcaattctctgtagaatttgtcatatgagtcagtctgctctctatttctatgagtttggcttttttaaattccacatataagtgaggtcatgcagtatttgtcattctgtgcctggtttctttcatttagcataccatggggccaaggacattttttcttttgttttctttttcttttctttttccctgctccagctcaaaggatggggctggggaatctttagatgagtcgggggaaggcctcagtgagaaggtgactcttcttcacatacctgaaggcagtgacaggatgaggcaccagaataatgttgcaggcagagagaacagcaggcaggagtatgcttgaattgttcagtacagcagggaggccagtgtggctcttgccgagtgagtgaggggcccacggtaggagatgagatcagagaagtaacaagggggcctttagtggggccattgaaacagcttaggattttctctgagagagatgggagccattggtaagggaattacatgatttcactttttttttttttttgagacggagtctcgctctgtcgccccggctggagtacagtggcgtgatcttggctcactgcaagctccgcctcccgggttcaggccattctcctgcctcagcctcctgagtagctgggactacaggtgcctgcaaccatgcctggctaattttttgtatttttagtagagacggggtttcaccgtgttagccaggacggtcttgatctcctgacctcgtgatccgctcacctcggcctcccaaagtgctgggattacaggcgacttttttttttttttgagatggggtcttgctctgttgcccaggctggagtgcagtggtgcaatctcagctcactgcaacctccgcctcccaggttcaagcgattttcccacctcagcctccccagtagctgggactacaggggcgtgccaccacacctggctaatttttgtattttttggtagagacggggttttgccatgttggctggtctcgaactcctgacctcaggtgatccacctgccttggcctcccaaagtgctgggattacaggtatgagccaccatgcctggccgatttggtttttaaagaatcacttcttctgctggattgggaatagtctgcagagaggcgaaggcaagcagtgcttaggaggctaatgccatcatccaggggagggatgatggtagggttgagtaatccctggagtgtaacaaacactaaggattattttattttgtggcaaatgtcctaaagctttcttgaacagtaccaggttgctgggaatgtatagagacagcttacagagcaccctacagttttagcaagggaactttcacgtaatataaaggcatgcaggttgtactcttgtatagttgtgtgtacattggttgtttcctgtagcaaaatcatgaagagtatgaattctagagttagagtccctacattcaaatcatggctccaccagttactaactgtgtgaccttgggcaaataaattaccctaacttctctgagccttcagttttccctctagtaaaatggggacagtgggttgctatgaggagtaatgagttagtgcgtgtacaacatttagcattatactgatatataaccatggctcaataacatagtagctatcattatggatatgaatataaccatttgtaaaggtcaaggaacatctctatttaacttagtttatttatttattttttattttttgagacgtagtctagctctcttgcccatgctggagtgcaagggagtgaccttggctcactgcaacctccacctcccgccttcaagcgtttctcctgcctcagcctccagagtagctggcattacaggcatgcgccaccaggcccagctaatttttttttgtattttcggtagagacggggtctcaccatattggccaggctgctctcgaactcctgacctccagtgatccgcccgcctcagcctccaaagtgctgggattacatgtgtgaactaattaacttagtttatttagagccatagcatatggggctgaaaaagaactaagacacttcatttagtctaaccctctcattttacaggggagaataaaaactagagatagaaaattccatagccaaaataaaataaaataaagttatggtccgggtgccgtggctcacacctgtaatcccagcactttgggaggccaaggcaggcggatcacgaggtcaagatatcgagaccatcctggccaacatggtgacgccccgtctctactaaaaatgcaaaaaatagctgggcatggtggcgtgtgcctgtagtcccagctactcgggaggctgaggaaggagaatctcttgaacttgggaggcagaggttgtagtgagccgagatcacaccactgtactccagcctggtgacagagtgagactctgtctcaaaaaaaaaataaaataaaaaataaagttatgcggccagtgtcacctagctggtagcagagtggggactggaacacaggtctctggactcccagtctggtgctttctctgctatgccacattgcttccatagaaccctcagtgcagcaccaggtgggaataataataacaacaataaaggcttatttgactcttactttgcgccaggcactattctaagtacacatatttgctcattttatcctcatgacaaccctatgaggcaggtacaattattgtccccatcttgcggaagaggaaactgaaggagagagggataaagccacttgcccagggtggagaatgagtgtggtgtgggagacatgggcaggaggctgctgccccgttacactgcacgacctgcttctccctttatgtaacagggaaattgaatccagtcgttcaagtcctttttcagccttcaaatttgcagaccctaaatgcttttctattatcgggtcttgaataaataccattccacttcattaaaactgctgtctttttaacttgtcttcatcttaatgatcatctacaagaaagactatttgcagaagagcctagaaaccaagtcaccaagcctgtgagagattcctgaaatgttatttctggcttccatagcaaccctaacatagggcgttaagcttaacggagtcagcgagagcagctggagccgggcattgaagcgctgagagcgctgaggaaacaaatcgttggctcaatagttttccttttgtgtaatatactgtcccagtgtgtttagggagttacgacttctgccaagtaagaatggaggaaatgaagcattgtatcaaagtgtacagagtttccaagcaaattggaggatgagtacaagtctgtgtctaggggagtctctgcagaagatgagggtgggcctgcagagacgtaggggtggggaggaggggcagctctgctttccccaaccttgggtgactaggccttcaggtcagctttgtgaagaggactgagcatgcctggttgccttttctgttccaccccgtttgccgacctcagtagagagtgggggtgatacgtgagtgaggcatcaaagaggccaagatgctgaggatgacagaggcagatatgctgaggctgacggagccaccagggccagtgcaggaaacagagctctctaggtatttcaggaagaaaaagatttaacacggggaattcggttatatagttgttggaagggctggaggagtgggagcccagggaccaccacgcaagagcacctcactgggatcaggatggtgctgccaccagaactgacgtctgtgcagctgctgagcagacaccagaacacgaagtctggctgccgcaactaactggctttctaaaaccttgcttgctggcagagccaccatccaccccacttcatcctttgtgaatatattgaattggggttccccaattcttacccagaaccctagctgcctgaaagatagtctgggaaatatttgttttgtccttttagcttctgcaacgctggaagactcatggggagagttgggagttcatgccaagtgccaatggacatggacagcaatcgattttttttttttttttttgagatggagtcttgctttgttgcctaggttggagtgcagtggcacgatcttggctcactgcagcctctgcctcccgggttcaagtgattctcttgcctcagcctcccaagtagctgggattacaggtgcacaccaccacacccagctaaattttgtatttttagtagagacggggtttcgccatgttggccaggctggtcttgaactcctgacctcaggtgatctgccttcctcggcctctcagagtgctaggattacaggtatatgccactgcaccctgccatttttttttttttttttgagatggagtctcactgtgtcgcccaggctggattgcagtggtacaatctcggctcactgcaacctctgcctcccgggttcaagcaattctcctgccttagtctaccaagtagctgggactacaggcacgtgccaccacgcccagctaatgtttgtattcttagtacagatggggttttgccatgttggccaggctggcctcgaactcctgacctcagccgatccgcccgccttggccttctaaagtgctgggattacaggcatgggccaccttgctcagcctgatatttatttcatttgaaatttggattaaataggtagaggagttgaacaccaaatagagatgagttgaaagggcccatcgttgacctaaactatttgctccaccatctgaaagtcctttgggattaagtccagggttagataacagaggggcagaaactcaactcccagagacaaaggagtggccttaacattctctctggtgccttctctattagtatatacataaggaaacattaatttacacccaagagtaggctgggagcttggatgggaggggaagcagggttgggggtcaggcctggagagattggctttgggctgggccatagatggagaagactgaagtctgggctgtcaggaacccttagaataagcctaaaataggaagggcacatctaaaacccttcagtgctcctcgtttgtcctaataaaatccagaccttttttttttttttttttttttttttggaacagggtcttgctctgtggcccaagctggagagcagtggcacaataatggcttactgcatcctcaccctccagggctcaagccatcctcctgcttcagcctcccatgtagcgaggactacaggcctgcaccattacacccggctacttttttttttttaatctattgtagagagggggtctcaaactcctgagctcaagtgatcctcttgcctcagcctcccaaagtgctgagattacatgtgtgagccactgtgccctgcctgaagtccagacttcttatgcaggaggcacatgccatccacccacatggccctgtcttccccaacttgtcctttaggacccagccttgccacatcacctgtggttacctgggtgcgtgtgcatcccactctgttctggcctccagcttttgcatacgctgcccttttacctaaatgcacaccccagcttgttgcctggtcaacacctgctcaccttataataacatcatcctattataatactcatcaccttgtccagggatcttcccccaccccctatcttgggactggtgatctactccaggctctagtcactcgtccttttttgttgttgctttgttttttgtttttagagacagagtctctctctgttgcccaggataaagtgcagtggtgtaatcatagctcacggcaaccttgacctcttgggctcaagcgatcctcccgcctcagcctcccaagtaactgggactacaggcgcacgccatcatgcttggcttgtgaaaaaacttttttttttgtagtgatgtggtatcaccatgttgcccaggctggtctctaactgctgggctcaggcagtcctcctgccttagccacccaaagtgctgggactataggtgtgagccatcgtgcctggcctgctcatattttttatgaatcttaatgaatctgtcttctctacagggttgtaagctcctcccaggctgagactggttctcatactctatccctagcacccagcacaaagaggggattcctgcaatgtttgtacaactcaaccaaaccaaaatgatgatagaattgtctccgaagacaaattttgcctttgctggcacagggctgtggaaccttgtgccctgttatctaactggccccttcctccttgtgtacctacacctcctcccctcctccttccagggaaaggccctgaggcgctgtgttttggggcctccacctccttcctctcctctcttgcagcccagccctgtgttgctatttattcacaggtctctgctctgctctggctttcacttgctgaattctcagaaagcagatgaagcaatttattcagttaaagtgcccctgtgggtcaaatgccagcttgctttttaaaaccttcctatgctgctttttactttgcagagagcagaaattacctgttttgtttcctggtgctttctgcactctcttgtattgagggatggttgtgtgtctgtgtgtgtgtgtgtgtctgtgtgtgtattacaattttaacgtacatgtcatttctcaatttgagaaaggaagaaagatagtgagggggtttgatagagaatatcaaaattattttgtatgtattcagtcagctcattttttaaaagaaaatgttttaatatcactggctatggtttttattttattttattttattttattttattttattttttgagacagagtctcactcagttacccaggctggagtgtagtggcgcaatctcggctcactgcaacctccacctcctgggtttaagcaattctcatgcctcagcgtcccaagtagctggaattgcaggcacgcgctacaacacctggctaatttttgtatttttagtagagacggggtttcgccatgttggccaggctggtctcgaactcctggcctcacgtgatctgcccaccttggtctcccaaagtgctgagattacaggcatgagccactgtgcctgacctgactattgtttttaattttaactttaattttaagttcaggggtacatgtgcaggtttgttatgtaggtaaactcaggtgtcacaggggctggttgtacagattatttcatcatccaggtattaaatctattacccattagttatttttcctgatcctctccctcctcccaccctctgatgggccccagtgtgtgttgttcccctctatgtgtccgtgtgttcccatcatttagctcccacttataaaaaccactgtttcacagcttatttgtacttctctttatcaattaagaaaaagactgtttgtatagcaaactccgagagaggacgtgaggggtattttttggtgagacttgagcaaactgctttacgttgcaaggaaattcaattcattggaaactttttcctccaggactaaactggggcagctttcattttggctctctcacaaagaaaattgtccagggtctggaaaccacagttgttgaacctcatatgacgtctcttttctttcagctcatgcaacatttactagaggagactggtgtgatgtggcgtgtttttcctttccttttttttcctttccattttgctggctcgttggtgcacacttcctgagggcctgagagggctgtcttcctggaggaatttatgacagtcagcagggacaactgaaatttgagctggtgtgaacccataatccctcagggccctactggctggagtctctttagggagcatccttgctacccaaagatgcacacccattccccagcaccttcataaaacaacaacaaaatcttaccatggcattgccaagcatattttgcatacaaacttcccaggatggattctatctccatgggcagatggaatccatcccgaaagcatctttctctgccagcacactcacctgtctctgctctgcaaatgcccttcttggtagtagcttgttcaagggtacgcagagcaaatttggcaattctgaaatttcagcttttgtttgtgaacttcggctctgctcaggaagaacttgtcagaatgaaggttgacattcagcctgtatgtcgagcattcttgagagaagcacacggtgcctggcatcttgaatggcatcagctgcttgctacccagttctttgggacaagtgggtccatgagagaaaatatacagagcagggataagactgcacccgctctggcaggacagggagcctggctaccccaacttccttttcccaagccatctgctacttttcttcttctgcaaccaggcattcaaagcagggtgtatgtgggggaagaccctggaaatcacctccatctgggtgtacattgttacttttatcctcagtagttggtcaagaagtagagtgtattctctatatatctttattgggttcatccccacttattcagaagtagaatctctaggccgggcatggtggctcacacctgtaatcccagcactttgggagactgaagctggtggattgtctgagctcaggagtttgagaccagcctgggcaacatggcgaaaccctgtctctttcaaaaatacaaaaaattagtcgggtgtggtgggtgtgcctgtagtctcagctactctggaggctacgttgggaggatcacttgagcctgggaggcggaggttgtagtgagctgagactgcaccactgcactctagcctgggtgaggctttgtttgagacccagtctcaaaaaaaggaaaaagtttttagaaagttttagaaatactaatttttaaaaaagaagaatctctagcgaccgttcagtgtgatctggagttaggctgttctggttaaacgtagattgtgcctatcgaataataatttctcttaccctgcctagctctacagtcgcctctatacttgtctcaatgacccctgcactgtgagcttcttgaggccaggacctgacgatacagcactaaccattgtattttgcctgtggtgccttcagtacagtgccttctatgtgccggccctgagccaggcatcgatgaaagatgaataagtccaagtcatgacctcaaaggtggcttatagattgatgggacttgcaggccagtaaataccataagtatttgtggggtgacatcactgcacattaagttactcattgggcttactgtcatcacgacctggtgctgagaaggcacatttgaactccggtaggtgcagcagatgaatcactggggcctgagcgatgcctcccagggcactggcctgggcagagggtgaagtggggagatttgcacttaggcgactgtgtcttgagttgagctttatctcctgggtcacattccaggctcagctgccagtcaatgtgttatctggtgatggggagggtaacagggctcttcactcttggccacctactgggagcagtgggtaaaaatgcaggtatgagagtcagaccaacttggggtttaaatccctgttctgccaccactcattaatcccctgactgtgcacttgtcacttaacctccctgagcctcagcttcctcatctacaagtggagggtaacagtgcctatcttctttattttctgaacctaattgaatgccagatatatctgtcatgcatatgatctgacaatggaacagaatatttgcatcaggagacaaaagagactccaggctgtatgattgccatattttcaaggccactcctggtttgggggaagaagatggcaggacatcagaatggggtgccctgccactatcttcttttctagacccttggcagatggtctctcaggctcacataaccctagagacagagttctcaaatttgttgtgcttaagaatcacttgtagcaattacaaatgcagattcctgggccttaatcccagagattctgattccctgggtctagggtacagctggagtgcagtggtgcgaccacagctcgctgcagcctctgcctctcaagttcaagcgattctcctgcctcagcctcccgagtagctgggattacaggtgcccgccaccatgcctgctaatttttgtgtttttagtagaggcagggtttcactatgttggccaggctggtctcgaactcttgacctcaagtgatccacccacctcggcctcccaaagtgctgggattacaggcatgagccacggtgcccagccgtccccacctctttctgatgttatcgagctgtcgagtatcccagctgcaacctgttctttattgtgtctctgctgaccagcgttcccagcccattccagctcatggcagggtatctgcaatctttctcttccctgccctcccaaccccccacccacaagctttacctggaagctcatgtacacaccaaagggaataagcaaggacccagacaggcagccaggtgcctggcactaggccgggtactagggattcatagaagatactgcttgtggccaggtagctgcatgtgtgagatactggtggaagacactcagacagaggtaagcagggagtgttggggctcagaggaaggccactgaggccagtggagaatggcccattaaggaaaggttttcaaaataggtgaccacagggctgagtcttaagctgaacagggagcagagggcatgcctagcagagagggcgctgtgtagggactacagacaggcagtgtgacattgtataaggtatagggcagggagtggtggctggtggagaaggctgagttcatgagttcattctcccctgaacatcagcaaccttgccattagtgacccttgggatggtggcttttgaagaaattgctttgatggaatagctccccaagactcatggatactgggagtttatgtatgtatgtatgtatttatttatgagacagagttttgctctgttgcccaggctgtagtgtaggggcgtgatctcgactcactgcaacctctgctttccatgttcaagtgattctcctgcctcagcctcctgagtagctgggattagaggggcacgccaccatgcctggctaatttttgcatttttagtagagatggggttttgccatattggccaggctggtcttgaactcctgacctcagatgatctgcccacctcagcctcccaaagtgctgagattataggcgtgagccactgcacccagcccgatactaggagtttaaagctgtcatttctggttcttgggactcagatcaatgaaactcactaaaatattcattcatgggaaagttctggtagaaaggggaagattaaagtccatttttgtcaggagagtctctctctgggaaagtcattgatgagatgactggggcataaggtggtgtggtggtgtgtgcctgtagtcccagctactctggaggctaacttgggaggatcacttgagcctgggaggcggagtgattgggagtaattggaaagtgacatctggaagacaaatcggtttattttcataagctccctccagtctatgggtgatgggaaattggggtgctgtgtcaagaggaatcctgtggttggactttgattctgagaccaggactgattaggggtgtcggtcacagatgccagggctggggacatgggggtgacatgcaaggcttggacttgccatcctggctccatattttatcatgggaccagctgtctcccttcctttggtttatgcagttgatttcgaaccctacgtgcagggcttgacatttttaccaattacacttcatcttactagtttctactcattattccatccctcagaaaccctttctgggcctgtctgtgttactcagcttattaacagttcctcccagcatcgtatgcagtggtgtagggagaaccataaatgcctccagaatttgcaaaaatgtttggaaaatgttaccaagtgggaaatgatttgctaatgagttcacaatatgtcttagacccattaagtaatccagggtgtctccctaatatagtagaagcaagttttcagaatattccccagcggttttttcagaaaatgtgaatagagcacgactgagtcaaagaaagccctagctcatcaactgcattctacagtgtcaggcctcatgtgatgccgcagctggcgactgactaataagggaattggagaggggaaaattgattatttcctggacaaggaccatggtgccttaatcaagtgccctaaatgcaggggactgcaggggaagtcgcactgtggtaaaaaaaaacaaatatagtctaaattacatctgaagtagcctttcaattacccttaagcactgagagctggtcacagtctggaggcacacagggacagaagcacctgaggaggctcaggggccgcatctcaggtgtctgtggacatgcccctgagggagcacagtggtgggtgggatcccactgctgtgtcgcacggtcgtctttgctctcagtccatctgtctctctgtctctctttgacaagcccatgtagttcaagtctcataaataaaatgcgtacagccggggttcccaagccccatgctgtggaccgatctcagtccgtggcctgttaggaaccaggccgcacagcaggaaatgaatggcaggtgagcattaccacctgagctccacctcctgtgagatcagtggcgacattccgttctcacacaagcgcaaaccctattgtgaattgtgcatgcaagggatctaggttgcacactccttatgaaaatctaactaatgcctgatgatctgaggtgaaacagtccccctcttccccactctgtccctggaacatttgtcttccattaaaccagtgcctggtaccaaaaaggttggggactgctggcttatcggatgcaatttccttgtattctgatgtgctagttttatattcttatagtggaggatccataccgctttcacggttttatgagaaatatctcttacaatctttctatttgttttgctctgaccccatgcccacctggcagccctccgtcatgagtgcagttttacctggaagctcatgtgctgacccttcacatagccagccttgtctgcctgcccttatttctcactgaaaaagaatgttagcctttatagtcagacggtgtctcatatgattagctagtttacctttattcattttttcagacgtgggtaaaattgagtacttcaatctttgtcgcagagcaccaggctctaagaccaggttggtagaaggattctatttcatgtgccagttctgacaaattgtttattggtactcaaagtgccatgttgaaaggatccaggctgagggggacagggccagaattgattaacaatgtctgccagggactgaaaaaaatggcattgttaagcttgccttagagcctgagacagtcaaccattccctctctcctctaccaaaaggtagtcaaccactccctcactgtccttctctctctcagcatgtatcattagagacctccttccagactggcttgatctgtttatatttatcaacaacagcacactgtatctttttggtctgcctgcttcattgtatcccgttattgtgtccttttcacagtcaggagtcttttccttcctctgtatccccaggccctggcatacaataggtatgttgaatgactggctcacaacctaagagttctacctaattgttctgcatgcagggaatctgccttattagggtcagtcgtttgccttgctgagatccatactacagagttccgtggatcctcttggtctgttccatctaggaataaaacgtacattttgcatgcccttttttttttctttcttaaactcctgctagctcattacgatcatggcttgctgtctctctctctctgttcttctctcatcataaaacagcttcaacttttctccccagtgtccctttgaaactgttggtgagctagttttttctctgtccctttaggaaattttaatcatgtttttaatcatgcttcatagtgttttgggtcacccttcggtaatttttaaaatcctctggttattcctagttctaagaacaattttagctcttggcttactgctactctgtccagcattacccttgtcataattgttggtgatttcaagatccacatgaatcatgaatcatcctttaatagctttgagattcttttctccaatattcttgtcttccaccagatctcagccactcacttctctctctctctctctctctgtctctctttttttttgagacggagccttgctttgttgcccagattggagtatagtggcacaatctcggctcactgctatgtctagcctcccaggttcaagcgattctcctgcctcagcctcccaagtagctgggataacaggcacctgccaccacggccggctaatatttgtatttttagtagagacggggtttcaccatattggccaggctgatctcaaactcctaacctcaggtgatccaaccgccttggcctcccaaagtgcggggattacaggcatgagctactgttcccagctagatttcagccaccttcttctcttatcttgaccctataattacagtaactttaatcctgccataatctcagtttaaacctcctatcttcccagcttacctgtactagtattccaactccaacaattctgtgaccttatctggacttccagttaattgatcctgctattttttcactgtctttcacctcaattcctctatttcctgcttccccagctttaattctatagggaatcactatagtcactgtcaactacctttgcccctttcctgattcatcgttctcgtttggccacatgataacccttgttaaattcaacttttaccagccttccccccatatctgtgtagctgaatgtggctgtagcaaaacatgcaaccacctggattggtctcatgtaaatttcataattgcagcctttaagtaggcctttaatgtggcctggaaatcatactctagttccctaatcccttcactcttccactgtcctagaaactgttacagttttttttcacttgtgttattacatttttcatggttctcttgttaagtgcccacaaaccatctgctcgtgggaactttgctgggaattgatatggaacatcacattttctgaaatcaattttcctgggtatttgactactgtccagactgtagtccttctattccccacagcccctcaaagatcggtgacctctctctttccgtcacacctgtcccgtccttcattctccccctggcccttgaccgtactgaactctccgtaagcgcttgtcgaggagtaagaatgggaaccatcagtggcttgacttactgggctgctgctatccaggcaggcaacatctgttttcatcatattattaagtgtttttttttttttcagcacttggcaggaggtaggcaagtttgggccatagctttcaggccctgagtccaggcaaggaaagaactgaccccagagagccaatccagccctggtgcatcttgagtattctggaaatggcagatctaaaaggacaaaatcatttcatattcatcatgagtatagcttggtggttaagagtgcagactacggagccatcacgatgggttcagatcccagctcctctacttcctagtgataaaagaaaaaactcaaccaaattaaatttaaaggagtttaactgagcaatgaacaatttgtgaatcgggcagcacccagaatcacagcagattcacagagactccagtacagccacgtggtggaagatttatagacaaaaaaagggaaatgatgtacagaaatcaaaagtgaggtacacagcgggtggattggctacaggctggcatttgtcttatttgaacacagtttgaacactcagtagtgtatgaatggttgaagtacggccgctgggattggccaagactcagctattgttacaggtgcatactcctaagttaggttttcaatcttgtgtacttataagcttggttgcagtttttccacaaagactgaaatatagaagcatggagtcattctcaggccatatatacttcacttttatactagataggagaactcaagcaagttatctaacctctctagactcactgtcctcatctattaaagaacagtaacaacacctactttctaaggtgtgttctttcctactttctaaggtgtgtgtgaagaataaacaagccaacacctgtaaaccattcagaacaaggcctggcactaattaagtgctcagtaaatattagctataaattacgattattttctcttttgagtctcacaacagtattgtaaggtattattatccctattttgcagaggaagagactgagggtcacacaggttaaggagaggctcaagatcatttggacagaaagtggcagaggctgggcttgcatgggatcataggactctaatactgtttcacttaggatttcagagccccctttggtctccagatgaaatgattttacccttgtcatggagattcatattcattccttctccaaatgtgtcctaacttccccatgcagatggcaccaaatatttacagtatgattacacggccatgattgaatttagccagaacgggagagaggctgattagtgacaaggctgcaatcttgagaggaggaaatagttctgacgttgcacattgtcattctgctggagtaggaatgttgcttaaaattgtcctggctcagttccctttctctggaagagtaaaagacacgcatttgcccaatacatggactttggagtcaagctgacagtactggaagagctgttaacagagtccagattatcactttatggttagagggatgatgttttattatgggcccacaaactgtcctccaactgtggctgaaaaccctgtcatgagaggccagaaggaagatcattgtatgttcttctcccaggccaaggagacaggatgtccttcatcagaaccagttgtcagcataagaagaacacacaccaaggaaatccatttcctggaaacatctctcaacagttcccatgtggagaaactgtgaagcttttcacagcaaatgttttagagtgttcccaggtatttgcaaagctcctatcataatgctggctgtactgataatttcctaagggtgcctgccatgagacgatggaaagggcatcaggtctgaccatggtgagccatgagggccttgcagagatagagtcaactctctgggcctcagttttcctttctataaaatgagtgacttggactctgttgggacccctctgcctctaagattctactagtctgtgattccatgagtcaaacttcagaagtggttatggtccctcataaaatggcaaagatttgggtcctagaatctatgactccattagcaggaccacatctcctctagaacattttggcttcgtgcttgtcatcatctttttgtactaactgctctgattcaatctctttccctgaagacttgcttccaccagaattccatttaattccacagatgttgaatgaagactttctgtgtttccaactgcatgcctacaaagataaatgagactagtttcctaaccttggggaattcccagtgagatagcaaggtcaagactttatagaacttcttttctccagagagctctctatttctttgacctgtgtgtgtccctagaccagtaatattgacttcaccagggagcttgttagaaatggaaacctacagaatcagaagctctggggttgtggtgcactggtcttagttttgttctgttttgttttgtttttgtttttgtttttgttttcgtttttgagatggagttccactcttgttgcccaggctgcagtgcaatggcatgatcttggctcacagcaacctccagctcccaggttcaagcgattctcctgcctcagcctcctgaatagctgagattatgggcatgcaccaccacacccagctaattttgtattattattattatttttttttttagtagagatggggtttctccatgttgatcaggctggtcttgaactcccaacctcaggtgatctgcctgcctcggcctcccaaagtgctgggattacaggcatgagccactgtgcatttggcctggtcttagtttttaacaagtcctctagagagttgagatgcacacttgagtttgagaaccattgaactagccctttcagggacaagctatgagactgtggttctgagccctcaagggacccaaggacacattttgaagaaaattcagttacttgggctgccaggacttggtgttttcaactcagaattacagctttcttggaacctccaacaacattttgaacctttgtggcgtttttgtacatgtgcaggtgttgtggaaactacccatttgttttgaagggaaagaatccagtttagcacacaattctccatggaacttccaggcttccctttaaattgattgtgatgcttggatagatattgacaccatgactaagacccataataaaggcccaatccaaggaggctctgctacttccaaagatctccaaaggaagagagttctcagagtgcgagtcttgtgtgaatttccctcccttcaaaggtgccttaattaatatcctcctccatggcagggtctaagcctggcccctcttctcagcaggtaaagattattgggtcacactctccctgcagtaagttcagacatgaagggtcgggcaggtgtggctcttggagagggcctgcctgggtcttgggaatgctcccccttgtcctccttcctgggatctgcagatccatcatctactgccccaacccagggctatatgctaaaccacaggagccttcatgaaaattagaaaagcactcctgcctttttttttttttttttttttctgagatggagtcttgcactgtcacctgggctggagtgcagtggcgccatctcagctcactgcaacctccgcctcctgggttcaagtgattctcccgcctcagcctcccaagtagctgggactacaggtgcgtgccaccatgcctgactaattttttgtatttttagtagatttggcgcttcaccatgttagccaagatggtctcaatctcctgaccttgtgatcctcccgcctcggcctcccaaagtgctgggattacaggcgtgagccactgcacctggctgaaaagcaccccccttaaggtgcctcttagggtggctcagcccctggggctcagggcttggctggattccagttcctctcacctccttgagcaggtgcctgtgtgcagcaccaaccacatagccatagctgtaaccctgcccctacccagcctggggctggacatgagtgagggctgatggaggggtggggagagcctgtacatgcagccagcacacgtcgggagttcccaagtgctggatccttcattacatcatttccttaaattcttacagctgcccaacgaggtggatattggttgcacctctgtatatttttttctttttctaaattatgaaagatttcaaactctcagtgctcccatgttctcatctatgcaatgggtatgatgcttcttgatcctttctcaaaaacttgttctgaaaatcaaatcacaccaagtgacaaagtgctctggaaatgttaggtttcatatagatcttatcgctgaaccctcaaaggctcactttctggggcctctgttttgagacactcaccctggactcacccagccctcagcgttatgcatgggtatgtcagaacgttggtttcttgccaggctactggtatttgtgggtgcctcctcccctaaaatcattagacttgtgaggcggcaaggatgagttgtgtgtgcaggcactcagggacgagtcacagcctggcaagctggcctggacaggatgacttcacgggcctttcccacttctcatttttatgactagctttactgtttcattttggctttctctctctttcttgcagctgtggtgattaggatttagggcaagcatttgggatcccttttctaatccctttcaaatcctgattcagctgcaaagtccgggaagggagtagagaatgggggaggagggactcaccctggtgaaaggcagtagctcagaatatccgagaaactcccaacaggaatgcccagcctccacccactaaagctggagacctctcatctcatccaatatcaccctcgtactagaaacgcaaaagggatgagtttgtctatggactcaaacctttacagtcttcttgcttagaagcttaaggcataattatggtagtcatggtggtaagggacttaacatttgcctttttccaatttaactgtgtcctttgttgaaatatttcttagtcaggtccccttttctctatttccactactgtcctaggattagatctgagtccccctctcaatgagattagtccagaaattatgtataccatccatcttgcaaaccactgccagactctgttgacttttcattatgtaacttccctatgggagaggtgagttacataatatgatgctaagatgcccctcactggtggcatcatgtacatatttctcagtctgaaaggaaaggtctttttaaactggcttcaggccatctgtccaactaattcctgcctgcaactcctagtataccctctactacaaggtctcatcacttattctgttacccaccacattcattccgtcttgggctttggttcatgtgatccactccatgtgctccttctctctaatccaaacaccatgcatctataaggtcagctcacgtcccatttccttgaccccagcccattcatatccctattctcttagcagctattgtcaggatgacacagttttcatgccagttattctttcatggttttattagttaattctccccaggtagattagaagctccttaactttggaccctgtcctaagcttctgttatattctctgcagtgcccagccaagcttatgtgtcatgcagtaaagaataaaataattttgaccctgatcaggtgtttggttacataaaaactgcattggcaactttctagaaactaatatattcatttatcttgcaaaaaggattgctatctgattatagccagtagtcatgatcttccagccatgcacaaatatacccttataactttcatgagtggggaggaaaattgatgaaggaggtttcaaaggtgatcatcagccccaggatttccaacaatagccagtctgccctgggtccttaactctcttttaatgtttttattcttatttttatttttttaatgcagtctcactcttgttgcccaggctggagttcaatggcactctcttggctcactgcaacctgtgcttgctggattcaagtgattctcctacctcagcctctcaagtagctgggaatacaggtgccgccaccacacccggctaatttttgtatttttagtagagacagggttttacagtgttgaccaggctggtcttgaattcctgacctcaggtgatccacccgccttccaaagtgctgggattacaggtgtgagccaccacacctggcctctcttctaatgtatttgacctctcctctttccccagagagttcctgtgagaacaagcgggcagacctggttttcatcattgacagctctcgcagtgtcaacacccatgactatgcaaaggtcaaggagttcatcgtggacatcttgcaattcttggacattggtcctgatgtcacccgagtgggcctgctccaatatggcagcactgtcaagaatgagttctccctcaagaccttcaagaggaagtccgaggtggagcgtgctgtcaagaggatgcggcatctgtccacgggcaccatgaccgggctggccatccagtatgccctgaacatcgcattctcagaagcagagggggcccggcccctgagggagaatgtgccacgggtcataatgatcgtgacagatgggagacctcaggactccgtggccgaggtggctgctaaggcacgggacacgggcatcctaatctttgccattggtgtgggccaggtagacttcaacaccttgaagtccattgggagtgagccccatgaggaccatgtcttccttgtggccaatttcagccagattgagacgctgacctccgtgttccagaagaagttgtgcagtaagtcctgctcctttgtcactcttctagaggaaccactagaattcattcattcatcttcaagtgttcattctgtgttactatgtcccaggtactgtgctggcaataggttttcaacaaaggccaagataaacacaacgtgctccaggggcttacactttggccaagagacacatgtttttatttatttatcttttagagacagggtcatgctctgtcacccaggctgtagtgcagtggcatgatcacagctcactgtaacctcaaactcctgggcttaggtgatcctcttgccttagcctcatgagtagctgggactacaggtgtgcaccaccatgcctggcttattttttaactatttgtagagacaacgtttcgccatgttgcccaggctgatctgaaactcctggcttcaagcgatcctcctgcctcaacctcccaaagtgctgggattataggcatgagcacccagctaagacagacattaaatatataattatacaaataagtaactatagttgtcacagtgtaatggaggaagaattcaggacatgaaggagtgtgcaaccccaggaccttatctaggcctggatgctcagggagattgccctggggaagggacacgtaagcccaaaccacagaatgaggaagagtagatagacagagtttttcttcagcacatggagctgccctggaattccctaagttggaattcatgagttggagtacggataggaatggaagggcagaaaaagtaacataatctctccttggatggtgtggaataccaaggcatttttgccccatggtggtgctggcaggggatgttttctcagctgacaaagaggtccagcgtatacagaggaccaaggtgtggtcctggcagctccccacctgttaagattgtaggggccactcctcacctgccaactctttctgcaggaagatgcctctcggagcccctgagctgcattcttctatgttggaagctttctttcctcttttgctttctaaccctcttttcacagggcttctctctcccttccttcccacgcactttccagttatctctacccctgctgctgcccccactcttctcagcaggtcagcctgcattctccccagtttcctgcctctgcggctgcctttttgttccttcctcctccgggagggcagggggccagccgcccaatccaggaaactcgcatcctgatttggtaaacaatgtcccaccctgacttgtccattcccagtggtccctgtcccctccagctaccatgaatctttggtggggaaataaagggaaataatctatttttaaatatctatttgtaaattatctatatgtaaatatctatttgtaaaatgtaaaatatcttcctagagcagagtggagaatgagctttagagccagactcagcaccaactccccaggagagggcacccaggagggggttctcagaatgtgacatattctagacctctaagatatagcccccagcgaagaacaatgtgcttttgatgtgtattaaacaaaatcccctgctgagaactaacttcaaaaagcacagagatctcatttgttcttgactccagaatcaaaagatttacttaagaaatcaatgccatgaagaaaaaaagaacctttttccttgccatgccacttggaaagtgttcagaagtgccatttccctggcactgcagaggctgtgttgttgtggtgtgttgtggcctaagtcagctggaacacttcaatcagcagaacacactgcaaacattttcaaggtttatgactttaaatgacttctgcagaatttatgtttcccctttcctgaaaatattaaaagggaaattggttctgtaaccattttgacagcttattcatttgtgttggaaaattttaatggaggggttctttttataagccttctgtatttatcagaaaatggaaagataacatgataaggctgaggagctacacaatgggactgaccgcccccctccccccacccccgcaatcctggtgtcgaataggatataccaatgtggacttgtctgtggaaaaaccatctctgtgtgctttctggcaaggcagcaaaatgaaaaggcagtttggacttttcctcccttcatcttctttgttataatctggaagctctaagaaaacattagcgttatcccgcttgttcctgtgcctgagaaatgaatcccctgtgagtccccccatccactctgcaggagacagggctgctgtctctcactgcactgcactgcccggctttgctcagcagactcagcagccgtcttgaaaggctgaagaggccccagggcctctttatcaacttcatggtaaagactgtagtaactaacatttataaagcactttcccttatgttatcgcagaaagccccaggaggcaggcagcacactcttgccactctctttttacaggttaaggaacttgctaagtgaatcacctgaaaaacaaatagccaagagatagttggatgctaattccaaacctcttgctcatttcactcctctgcatgttgggaattacaaattcctcttttaaggtaaaccattttctggtggccacctccacagtccagcctggccaggtaaacctactttgcaattggcattcacctaaaataggtgaaactctgaaggcagccttcgtaggaggaagaggagctgactctagttgtacaatcttgagcaaatcctttgtgctctctgagcctcagttgcctcatctgtaaaatggggattttatatgcagaaagtagatgagtgaacaggtgttgtaaatggtagagccctattcagtgtgcactgtgttatgtattattacaatcaaatacactgaggaccgatgggctaggcagatggcctcagttttgatctgcactcaaatgatcagacaaaaatggtgagcattttccaagttgcagatgacatctctgaggtttgggaagtctcatttgttccttaaacattcattgaacctgtaaaccaaaaagtatctgagacaagtcccaatcaatgtaaaagtttattttgccaaggttaaggacatgcctggagaaaaggaacacaaaatcacaggaacaatctgtggtctgtgcctttttccaaagatgattttgagagcttcagtatttaaaagggagagagggagggcatggtcacattactgaatccacatgttgcaagagaaaaggagcaggtaggggaacagtcaattatgtattcctctagtgctcagtaaatcaacactttacataagataaggtgaacatagagtagctacttatgcagatatttaaccttttatctgtagctatctgcttaggaacaaaagcaaaggcagtttcttgcattactcagcttttagcttaatttttttccttttggcatagtgatttgggatcctgagattttattttcctttcacaaactgtaccccaataatagctaatcttgtcctgtgctaggtactttcaaatacagtattccacttaatacttaaaatagccgtttgagataggtactatcattatcttttttttttctttctaagagataaggtctcactatgttgtccaggctggcctcgaactcctgggctcaagcaaccctctcacatcagcctcccaagtagctgggactacatgtcactatacctggctctattatccctattttacacaactggaaattgtcagggtctgcctgggggctccaggagagctttaaagatgaggtgatactaataatcactaacatttcttgatattaatgtatgcatgtgttgtttcaggctattagtgtatgttaactcactttattcacacaacaaacctgtcaagtagatgctcttatagttcccattttatggaagaggaaattgagaaccaaagaggttaaataacttgtccaaggtcacaaacctgtaagtgctggagcttgtttttttgtttttatttgtttgttttattttgttttttgagatagggtctcactctgtcacccaggctagagtgcagtggcatgatcatagctcactaccgcctcaaagttccatctcagcttggactacaggtgtgcgccgccatgactgaataatttttactttttaaaaaagaaacaatgtcttactatgttgcctaggctggtcttgaactcctgggctcaagcagctctcctgcctctgcctcccaaagtgctgggactacagacatgagccactgtgcctggcctgtaagtggtagagttgagacgtgagcctaggcattctgcaggcagaactgaaaatcaatgctacatctgcagattgggacaggttctgtctgggtgtgatcaaggcaggacctttatcatacagtgaggaattgattagactctgcagccagacctcgctgggtgagagtcctggcttttttctctttggctgtctggctgtacaatcttgagcacagtggaggctttatacttgcaggcagggacttcccataccagccacagcaaggggaatcctgaggttgcattctcaggccacccttgagaccaccagggagaggccaggtgccctgtgaattgaggtcctgtctacaagatgaccaaaccccacacatcctggagtctgccatttttgccacccagtaagagaaaacatggaatctatgggctgaaaacgctgtccccagtgttctggtgattcttgccacctgggcgagattgcttttaattaacctctaggtgctgactttatcagcctcatctggtattttggagcagggagccaggctgttcctaccctaatagccccaccccacccaggccaggcacaatttaaggccctaatagtattcctaggacacacccttcatgaactggcctgggcagtctacactgatggcacccctttgaggtcctgatgtgaagtggggaggctggactgacttcacaaacgttgagtctactgtgcccagtaatacaagacctccagcccacctccctacactgaccactcctttagtcattcatacaatcattaaaaaaaggactgttcttatttcctagtcaacaaatccaatcccaccaatgacttaggctgctgattagttattcctccccgctgaacacaaggccttggctgagtgtaaacccagagggccttctgagaaatgaggctcataggactgtttccagcaggccggtggaggaggcaaggctgtggtctccccttggctctcaccgcaaaggcccatcccacagagggcaaggcatgaggcctggatgctctgaaagtcactcagcactcacccacagcattctacagatgggaaagttttattctagtttagtgaaggtgtttgagattcttttggttgaaagtgtcaggaattccatttttttctaaaaggaggggggagtgcattatattatctatggaaataaggatggcagttgtgagagtcctgctttcactgcatctcccctccactcctctccttctccagtccacagtcaggaagcatggccccaccagcccctgaggctcacttgttctcagtttgagcctccttttattcagttctggttcctaaatgccagtaaaggactctgattgtcaaaccctgtaccaaccaacagtggccaggagtgagactacctcagaccaccacggcagctccccgatgcaaggtgtctggagtgagaaggaagggcagtttctagaaaaaccaggtaccagattaaataataggtgtctgtactgaggtccctagaggctgtccatgcctttactctacaggtaaagaaatagcctacaagagctacctgatttcccagaacttccctcacttgttcgaggtagaggggaactagagcacagtcttctagctcccaatccagtgccttttccattacaccaagttataatcttttttagttccagtttctcttatggcacatggccaaaataagccttagtaacaagctgtcattctgaaacccaatgcaatagttcttttaattccccctccccactaacttttttttttttttttttttttttgagatggagtcactctctgtcacccaggctggagtgcagtggcacgacctcagctcactgcaacctctgcctcccggtttcaagcaattctcctgcctcagcctcccaagtagctgagcccaccaccatgcctagcttatctttatgtttttagtagagatgggattttgccatgttggccaggctggtttcaaactcctggactcaagtgatctgctcacctcagcctcccaaagtgctggtattacaggcatgagccaccatgcctggcctaatttccgcaattgataggtgaagaaagtggagttcagagaaaccaagtcatttgcacaaggtcatagggagtggcgaagctgagccttcaggtggtctatttccggtagccatcctctccccacgatgctgcctgctgcccgccagatattttctctgcctcacatctcctgtcttcttattttgtctgttagggtctcaccaagaagacaggcaccaggtacatcacttgggcctcccactcatgacagtgggtgactgccgtgtagttggttgcctacacactacacttccttaattatggagagagacagtgacatgctgtgagtgccttagaaatgtcctctgcccgtgggtaatttgactccagcagtccaggaaaagaagagagtctttcaggatgcaaagcaaatgcaaattaaaagtgggataatgattacccctcaccatacgattgtcaaaacttgaagtttgataacaccaagtactgaagttttgaggggatgggaatcgttaggaccatcgttgctgacatgagctgtcttggaaggcaatcaggccatatctgtttaaagtgagacccagtcctagagaaaacatcgtacatgaattcaaggggacgtgttcaggaatgttcatcacaacactgtgaaagtgaaaacttggaaaccacccaaatgcttaccaatggggaaatggccaaataaaatgaggaaagtcatatgaccaatggataaaacaattgggagggataaactagatctaaggttttgattaaatctttaaatctaaaatacagctagttttcattattcacaataattatgttttataaagtcactgcaaacactgagttagagaatactaaaccattgctccatatattcctgatggaatatagggttaggttcctgcaatcctctggtgacaatattttttgtcaactaatcaatacatagccttgttttatgtgtgtttctgtttaaaaacatcttattttttgtttgtttgtttattttttgagacagagtctcgctgtgtctgcagtggcacaatctcagctcactgcaacctctgcctcccggtttcaagcaattctcccgcctcagcctcccgagtagctgggattacaggcacctgccaccattcctgactactttttgtattttttttttttagtagagacagggtttcaccatgttggccaggctggtcttaaactcctgacctcaactgatccacccaccttggcctcccaaagtgctgagattacaggtgtgagccaccatgcctggccgaaaacatcgtatttgatatataccattgattcattaacatcagacccacagccaacggtaactcctgactgaatgaaacttacctaacacatgttttccctgtaaggcacatcgcagcctttctgcactgaggaacactagacggcgcatcaccattttaaaccgcaaaatcacttacagaaagcacagaaatgaaaaaacaaacaaacaaacaaaaaaaccacggtgctaagtagactgtgaaaaggatgcttgttcacagaatgaaagctgaaaaagaaggcagagtggctccttgttcaacctcagctgagaacatctgcaccaggcaacacatttttttgtagtctcagctacttgggaggctgaggctgaggcaggaggatcactggagccccggagattgaggctgcagcaagctgtgactgtgccactgtactccagcctaggtgacagagcaagagcctgtctcacaaaataaactaaatttagagatattttaaattgagtgctcatgcactctgagcatgtccactagtgaccgtgaaaacgctgtgagtattggtttgggcttacaaatacattttagtgagtaggcaaattcacaaatatggaatctgtgaagaatgaggatcaactgaacatgtcttcacagtttgatatctctgaaactggggtgcattttagattccatgaaatacagtacatgtatcaacattgatagaatctgtgattaacgttgagtgaaaactgaggtgaaggtcaatgtatataggatgaacctacagatgtaaaataagacaaaatgccaccataattctcctttgctataaaatggttagcaggtatcttcagcattccccaggcactattctcaacactctaccatctccattaatttaacctttttgaggttcttatgaggtaggtgctatttttattctcatgtcttataaagaagttaagaaaattgcacaaagggctgggtgtggtggctcatgtctgtgatcctaacactttgggaggctgatgtaggagaatcgcttcagctcaggagtttgagaccagcctgggcaacatagtaagacatcatctctatttttaaaaatgagaaaacttctattttatttaaaaataatgataacaataaaagaaacttgtacaaggtcacaaaaaaagctgtttgtttcaccctgaagtaaaaatgactgattggatctacaaactttcctagtgatatttgtatcctaacaggaaccaaaacacagacaatcaaactcagaacagtacattctaaattgtattgttgtgaaatgaaacagctttacttccctagttcatttattgcccaccatatttcttactccaatgtaaagagacataaacttcagatggatttaatcacagctgagttttcacaagtgctggattaatggaattgttctaagcttttgagagctccttttattttagcttcataaaaatatatttctacatatagacatcttttttgtttatgagaacacttgcataacttgttatgtttgtactgttgcttgttaattttaaatacaatcaagttacattgagtaaagtcataaattaggacattaaaaaaagagaatttttatgagctacagacagacttatgcaggaaccaatgtaccagaaagctgaggtacttcaagaactaaatgcagagggcaggcgtggtggcttatgcctgtaatcccagcactttgggaggccaaactgggaggattgcttgagcccaggagtttgagaccagcctgggcaacatagtgaaaccctgtctctacaaaaaaaattttaaaaattagccgggcatggtggcacacgcccatagtcccagctactcaggaagctgaggtgggaggatggctttagcccaggagtttgaggctgcagtgagccatgattgtgccactgctctccagcctggaagacagagcaagaccttgtctcaaaaaaaaaaaaaaaaaaaaagaaagaaagaaaagatgctaaataggtatcttaaattgagacataaagattacagaaacatgaaacgtgtgagtgcattttttactccaaaattgtgtgtatacttttgcatattaaaaatttacgttactcttgaaacatgattttgagaaactgttggttctttaacacattcttgcttatttaatagcttttcctccagccccattgctgcttcctaaaaatccacacttaagtcaaagtcccctctgatgctggcaaacttttctgattccccagcccaccacatgggtattattaagttgaattggaaatttcttgcttttttttgtagatcaaaaccaatcaagtatcagcaatttcatatagttcagcctaacactgtttctctttgattttccatggccctttatctggccctgtcttgtccaccttggactgtgagcccccttgagggtagggactgcagcttatttctctgagtcctgcccagaggagagagtaggcactgaataaatgcttgctggctggaatggagtgagaaagggcatcactgttgacttaccttcctgtgtcttccctttcagcggcccacatgtgcagcaccctggagcataactgtgcccacttctgcatcaacatccctggctcatacgtctgcaggtgcaaacaaggctacattctcaactcggatcagacgacttgcagaagtaagattgctttgctgatgtatttgtggtttcttcctattccctcatcctctcccttcttttatctgggctcattttattcatctgtgatgcctcacccaccccagttatcatcccttggggacagaaataaagtttggtattttctgttgaccccatcacagtgcctagtccagagctgggcacatagtaggccatcaggaagagttggagagataggtagaagcaccatctcagaaatagcctctttggatgtgtgaactggtctcctttacttccaagcttgttctttagcagggactactgaagagccttttcatccactgtctttattaactgtaccctaaggaactgtttccatattttattatcttctataaagtgtggatttaggaagagttgttaacctcggctgggagtgattattcaagttctgttttagaggggtgcagggacccagttgctttggtgtgggacactttataggtgtcctagattttaaaaagggggtaaacagatgtaagatattagaactcgcattctcttttttggctaagtgccaaagactagacagtatactgatatttgagccagcacgaggtagtctaccccttaaaggacagaattactcatacactgagtaccgtgtccttactttttaaagttatggataaagccactgagttaacctacagatgaccaggctaccaaaaacaagtcatgaggaagaccagcccacatggaagcaaataaaactcagctaatctgacacttagttcgtgcagtgcataactgttgccatgtgtaattgttgcagtgtgtcattgttgcaatgtataattgttgttatacctcatggcaagcaattaagcattaatggaaagcagtttgcacaaatggctgtaattagtgtcacatttatagaggccaaccacctttttcatgtttcttctcactgtttttcagttttggggttgagtggttggctggagttctccctgcccctcaagattaggtaacatctacttgaccctccgcttctgtgtggcctgtggaaacccaaagccctctggactctgaatcgcaggggtggggtgggcggtatgtgttcttaggctcctctaagaccccaggatcccaagttgagtgcagcctgaatcatcctcatcttccggttgaagatctgacgcttcctcaaaatccataacaaaaactcactcccaccgaatactcatgggtttcatagagtttcctaaagaactgggggagcctgggaaaggtcatctcacacactgctcagcaaacaacctagagatctctttagacacccccctctagacacctccacctcttcaggtgttctacctccccacaaccatcctctggaggcacccttcctcctcttcaggcatcctcccctctgcccggatgcttctctgtcccatctcagcttcccaccatcttgcccactcccttcctgccctttctccttctccttctctgtctccttctccttctccttctccttctcctcctcctccacctcctcctcctcctccttcttcttcttttcctttgtttttttaagacagggtcttgctctgtcgtccaggctgtagtgcagtggcacaattatggctcactgtaccctcaaccttccgggttcaagcagtcctcccacctcagcctcctgagtatcagggaccacagctgcatgccaccatgcctggctaatttttgtagagatgaggttgctcaggctgctctcgaactcctgagctcaagtgctccatctgcctcaacccccaaagtgctgagatttacaggattgagccgctgtgcctggtgcccttctcttcttaggagcacaaggaattcctctccttgtctcatgtcccactgagtgactgggatctgggaatctgctgatatttattttccgtgggctggcctagccaagccagaggaattctgacaccagcaaataaaaaataaagtgttctttccctaattttatgagcaaggccttcccccacacagcagagtttgccagacccctgcctggtcctgccacaggccctgatgtcccccagatctcaagtactgctctggccttggattcctcctgcctagggatgtgccacaggagaatatgaagcagaccctgcctggacttcagacagactgaccagggggaggggcagggaggtccaggcggaggagggctaggagctcagggcaggctttctcaaacttcagtgactaagaatgagccaggaaactgacttctgggctcacccgcagagatgcagagtcaacaggtctggattttcaatgaaccgacgaatgactgccacactttgagattcactggcctcaggcagtgaggggtcccagggaagggcttagcagagctctgctgtcccgtctgacccagctctccagtcaccctgaagcagttaaaccatcttaaccttcagccagacttagcttaataaatgtgcagtgataaagaacagctctctctctttcagaaggggataatactaataactcttttgctttcccaaaattggtgtaccaggggccttggtggaagaacaaggccttcactgtctgcagatctgggcttgaacccgaccttatcacttaccaactatggctgtctcactctgagctggttatttaaacttcttgactctcagtttcctcgcccataagaggggacgggtggtaacaaatcaatacctgtctcactgattatgtccttgttaggccctgtttttggtctaggggacagttaaaagctgtgccaagtgaaggctgtgccatctactgacccctgctgatgagcagggacctgtgcctgccaacactgagagaaactcacagtgggcctggagaggaggcatgtactccacttctggaagctgtttccacttaatttccatgtcctgggcgtagctggataatctcccagatgaaaagccatgtgggtgacacctcctccccaaagcacctcttactctctaagaagtgcttgccattcattcttccatacaatcattgattggttcatttattttttcatttaacaattgtttttgagcataaaaatgtgccaggcagcatgcaaagtactggaaataaaatagtgaataacacagcaatattctttcttttttggagctcacatttttgcatgggagtgaatcaaataaacaaccagggtaattgcaaccaaaagtgactgcaatccacgtccacctcagtgtgcaacacatgaggtcaagcctaactatagccacttgttaggtgtttaccatgtgccaggagctttcctgagtgttttatatctgctgtctcatttaattctcacaatgagctcttaaagtgggttttatcactctcattttacagataagcaaaataaggaacaaaaagtttagacgatttacccaagctcacatggctagcaatgtgatcaaaccagaatccaaatcctgttatgtcctcgctcttggccatcatttgagactgtcccatgaccctagaggaccccgacatggcagcaggacaacccttcaatcagaaaaccttctccaagccgggaagacagataggttcctcagcccactaatccaggggagacttagaactaattcaggactaacattcaacagattgttacttccccaagtccactgctaattgctgtggtactgtcatcacacaaaataatagtgggagggcctcttcagcaactgccttcaaatacacacacacatacacactatagaaaaaaaaaaaaaatatatatatatatatataatctccccaccattgtatatttgtaatttgtgtggagagggaaagcagacacagttgatccacacattctttgaatggtgatggaccttggctattagacttctggcttcctctcttatggaacttcagaattctgtcccctcccagtgtcccagaggggtgatggttcttacagaatcaggttattacaaaacacctgaatcccatattcagacagcttggatcagcggttgagctgaaatcctacttgtctataatttccacttttatcctatttctgctatctgaagccatataccaaaaagttatttccttatccaaataaatagagaaagcccttcaattattatacagtgttattcccacacactgaccccattcctatcaattttctcttcttcaggggagaaacacatcttttgatgacctagttttgggtctcttcactgtccaggtaaccctcttctgggtggatattagttgtctaaaaagggcctttccattcgaagactagatcaaatgcattaaagaattttagcttccatcacttcttggccttttggctaagatcaaggtgtagaattttatcttccaagttgtgtctatatgggcaattttgaacatactggacctcaacattgtggattccttctgcctttcaaaaagtcttccctgtcaaataccattatatgagatatatgcaagagcatcagcataatactagaacaatggaattttatgttccttccttttcccatttaaaaaaaatggggggaaagaaaacctcatgaagtgtgcccgtcttcacatgctatttccccttatccttccccttcccagaattcctgtcctactaagaaagaactttatcttgtttctttttcttgatatattttcaaaataaggaattttccctttcttctggaacatttaatctatctggaagctgatgataatgcagcatttagaaaactccatttggcagaaaatgtagactttcttatccagcttaaattttttttcttctctcaagaacgataccaaatgcattttactgctttcattctttggaaatgttcccaacattatttttcccaagctacataagtgatttaatagatttatgttagagtttaaacaaggagcatgacccagaaaaaccactgaattattagagagagataactataaccaacattctttgtgaatttagatgtgaaaattcttaaaaatttagcaaatagaattcaacaatatatagaaagaacaatacatcaagaccaaatggagtttattccaagaatgcaagtttggtttaacattcaaaaatcaatcaatataattaatcatagtggcgaggtgtggtggctcatgcctgcaatcctagcactttgggagactgagttgggcgtatcacctgaggtcaggagtttgagaccaacctagctaacatggcaaaaccctgtctctactaaaaatacaaaaattaccctggtgtggtggtgcatgcctgtaatcccaattactcaggaggctgaggcaggagaatcacttgaacctgggaggtgtaggttgtgagccaagattgcaccactgcactccagcaacagagcgagactccgtctcaaaacaacaacaacaacaaaaagccactaaaactaataaatgagtttagcaatgttgcaagataaaaagtcaatatacttaaaaaattacttcattgtatttctgtacactggcaacaaaagtcagaaattgagattttaaaataccaggtataatggcatcaaaaatatgtaaattagggataaattttaaagatgtgtatgatttacacattgaaaaatataaaagatttctgagattaatttaaaaaaaacctaaataaatggagagatataccctatcatggattggaagacttaatatggccaagatgtcaattctttccaaattgatccatagattcaaagcaatccccttcaaaatcctagcagacctatttttttagaaatcgacaactgattttaaaatatacatgaacatgcaaaaaaactagaatagtcaaacccagtcagttctcattattcccagtagttatcatccataaaatatccataaacactaaattgcaaattctgaatcattgctcctagatgaaatacagagttgggttcctgagagcttccaatcacaacattcatcaatcaatacataaacttgtttgatgttctgtttaaacacacgtttttgagtatatactgttaattcattaacattgaaagctatcgttcatattttgaatgaagtacttaggaacaatagacagcagatcagcattactcttgggggccattttcaacagcaaaatctccaacaagaagtacaaaaaggcaaaaaatgtggcactgcatagaccacagaaaggatgcttgttcatgggatgagagctgaaataagaagacagaacgttgccttgtttgaccttacctgggaatatgtgtcctgggtgactcaaattttttgccactctgtgtatgtccatgaatggctgagaaagtgtcatgggtattgacttggggttacaagcaaattttagcaagtaggcagattcacaaatatggaatctgtgaatcatgcacattaaacaaagctttgaaaaagataaagttcatctttaaattttgtttaaactacctgatttcaagactaagtataaaacaacagtaatcaagacagtgtggcattggtataaagatgaacatatagagcaatggaacagaacagaatcgagaaataacccatatgtatgtggtgaaatgattttttgacggagtgggaaggcaattcaatgaggaaacaataatgtcttcaacaaatggtgttgcagcaattgaactgccatgtgcaaaaaagcaagcaaacaaacaaaaggaacataaatcttgtctttacctcataacatgtataaaaattaattgaaaatgtattctaagcctaaatgcaagagcagacactattaaataccatgatgaaatggtagaagaaaaatcttgatgacctcaggttggcaaagatttcttaaatagtacacaaaaagctacaaaacataaaagaaaaaaatcaatatatttaatcacaatgaaaacatttgctcttcagtactctgctactaaaatgaaagggcaagccacagattggaataaaacatttgcaaaacatatgtccaacaaaggactttagaatataaggaattcttagctcagtaccaagtaccaagtattcagtaccaagaagacaaacaccaccataaaaatgggcaaaatatttgaacagacactaaaccatggaagacatatgggtagtgaagaagcacatgaagagatgctcaatgttatcagacaggagatatcactatacctccactagaatggatttttttttttttttttgagacagagtcttgctctgtcgcccaggctggagtgcagtggcgtgatctcagctcactgcaacctctgcctcctgggccaagcaattcccctgcctcaacctccaagtagctggatctacaggcacgcaccaccaagcctggctaattttttttttgtatttactagtagagatggggtttcaccatgttggccaggctggtcttgaacttctgaactcagatcatctgtccacctcagcctcccaaagtgctgggattacagtcttgagccactgtgcctgaccagagtggataaattttaaaagattgactataccatgtgttcgcaaaattgggaactggaatgctcatacatcaccagtggtcatgtaaaatggttcagccactctggaaaacagcttagcggtttcttacaaagttagatatttacctatcatgtgacccagccattccacttttaagtatttactcaaaagaaataaaagtttatgtctaaaaaaagatttgaacacaaatgttcacatcagctttacttgtaatagccccaaactgaaaacaactcacatgttgattaacagatgaatgggtgatacactgcaatacacgcatcctgtataatactcctctgcagtgaaaagaatgcactattgaaacatgcagtagcctggatgcatctccaaatcactatgctgaatgaaagaaaccagacccaaaaaaaccagaacataccatgtggttccatttgtataaaatttttggaaatggtgcctactcagtaatgacagagagcagattagtgggtgcttggggccaaggagtggggagcagcagggagagggattacaaagcagcatcaggaaacttgggggggtgatgactatgctcattatcttgattgtggtgatgatatattgataagcccgatttatcaaactgtacacttgaagtatgtacagtttattgtatgccagttgtcactcaataaagctgacattcattaatcagaacaaggtttcggaagtaagtagtggcgctggaccagactgcctttctggaatagtttgtttgtggcatcagtggaggatgagagaaggaatgtaagcagggataaagtatggagcaatttgattctcaagctaagttccaacagtgtcctttgttgagtaggggaattgaacacagggtgtcaagggcaaaaccaggtcattttagtaaattggggctggcaataatgtatgtgctgtattagaggtagagagtggggcagggatgccttcactcatccgctcattcattcaatacctgtggattcccctctatgggcctgatactcttatggggtatttttcttacatattagggacccaagaaacattcagatcttggcttcccttttaccccccacacagagagcagaatataaaagatggaatcagagaacaattctaatcagtccagtcaattcagtgtatgtttcttacgcccgcagaattaagtaggagaccacggcaaccatcccagccccagggaggagtttatgacatcagataggtgatggctggtgggttcagagtaattaagactgatggataactgcagagaggaaatctagttttcagggcaaacagatgcgtccaagagagagcccacacacgtggttggatgcagctggagatggagaattccagttcaaggaaaaggcctgggcagtatgtgtttggtggtggtcgttgaccctgaaaatagatggaatcttggagggagaaagcgagtgtggaaagtgaaggtcaggttgtgagctctggggcagcccacagtcagaggatgggtcaaagctagaagggcgagcaggccgcacgcacacacacgcaaagcagctgccttcactgacaatcaatggcagccacctgagctgtggctgagctgctgtgagccgaagcagtgggcttgctaaatgccgtcatccagcttccccttgaccctggctgtcaggcctgggtctgggagcttagggatcattttgtgcagtctgctcaccctctggctgtgccagggcacaggattttctacaaaagaaggaatctggggtgagtagagccccatgggagaactgagctgactaaatgtgagtggagaaatgccaattatgaaaaaaatgtacatatcaggggaacatgagcttgaaccttgcacagcttttcctccgcttggctgtttttatgaggacccaggcaagtggttctcaaagtgtggtccccccggaaaacaatatcagctttgcccggaacttactagaaatgcaggttcccaggcttaccctagacccactgaatcaggacctctggaactggggcccaggaatgtgggttttcccaagccctccaggggatgtcgatgtatgctgcagtttaaggactactgacttagatgttttaaataagatctctccctggcagcatccactcaaaagggggtttatattaagaacataatgtgacaacggtttggaaattgaaaagcactctacaggagtaggacattatttttgtttgtttattatttttgtcaacctcattcactcagatttcactgtattttagaacttgtttcagagattccccccttcctccttttcccttccccgaggaaaaccaaaatcttgttagtgaacaggagaattgattgaaaaaaaattcaactgctgcgggaaaggaggagactaggcacagctggagtttgcctgaaaggataattttctcagtgacattgggtttgttttgtttctttcagtgtagaagcacgaggctgatgactcatttaccattggaagacttcaaatccaaactgcagttgtcaaaataagattagtgctttcagacatgatgaaagagagggcatggtctcgaaaaggcaagcttgggttttgcctgcatttgtggagccctaactcatagcaagctttcctgtgggagtgggcagagaccccatcgtttacccagttgagtgaaatggcagccctaataacccacttctccttctctcttgctgtgataaacaatttctgatttctacatctcagattaaataacagcaagagctataaaaagtagagggtgtctcctaaaggtgttcatttgctttaactccaaagatgagattaaactgtcattggtgtcaacagcgtgcagtgcagcttgtctaaaattctgaaacgttggtgaaaccctttgatttagccctggatgatggccatagcctttgccccatgctccgtgctcccccctcagttctgcctccttccggtgtaagcagatgaaagtttccaagttctctggactgagatgcaggcaccagggtttctaaaggaaggcacttacatctagggtgcatgggagtctctggggaaactgtggttgggtttgagcacagctttggggctcttggcagcaaatcttcactaattagtttcacctgggaagactgagttatccctcttaaaattctccaggcactgaaacaagcgagcagattttgctgactgtcagatacatgctaatggtagctccctggcaaggtgtatctcaaatttggccaggtctttttgttatgaaattccaaattacctactttgctgtatcacttcaatttagcatagaactcaaaaaccaaacttggccagagataaattttagaacgttaggatctaatattcatgtttgtagggatttttttttttttttttttttttttgagacaggatctcgctctgtctcccaggctggagtgcagtggcgcaatcatagcttactgcgacctggaactccctggctgaaatgatcttcctacctcagcctccctagtagctgggactacaggtgtgtgccactgtgcctggctaattttttaattttctgtagagacaagatgtcgttctgttgcccaggctggtcttgatcctcctgcgttggcctcccaaagtgctgggattataggtgtgacccatcgtgccggcccatgtttgcagcttttataggtacccaataaagtgaaactattagaattgggatgtgagcaaaatttggttgaagttcaactctctgccatgcttaaataggtatgtgccactgacacttttcttttcccccttgatttaggaaaggagaaggatgctaacatttgttgaatacttactgtcagccctgcacttcgggaggccagggcgggtagatcgcttgagctcatgagttcaagaccagcctgtccaacatggtgaaaccctgtctctacaaataatacaaaagttagctggtattttgctgagcgtggtggctcacgcctgtaatcccagcactttgggaggccaaggcgggcagatcacctgaggtcaggagttcgagatcagcctgggcaacacggtgaaaccctgtctctacttaaaatacaaaattaggtgggcatggtggcacatgcctgtaatcccagctactcagcatgagtactgaggcatgagaatcgcttgaacctaggaggcggagaatgcggtgagccaagatagcgccattgcactccagcctgggcaacaagagtaaatctccatctcaccaaaaaaaaaaaaaaaaaaagttagctgggtatggtggtgcgtacctttagtcccagctactcgggaggctgaggtggaaggattgcttgagctcgggaagcagaggttgcagtgagcctagattgtgccattgcactctagcctgggtgacagagccagaccttgtctcaaaaaaattaaaaataaaaaaataaaataaaaatatcttctgtgagacagatgctttgcccatctagattatctcactcaaccctacaaataagatatttaacctttttatgaaaactgaatctctcaaaagtcccttacttgaagtcgttacccagctggggccaagtctggctccaaagtcgatattcttttcacctgcctgcctcacccctaccctttctgaggagacgtaactgacatcctgccctcccccagtggtggctctcttcatcatttttcatgtcacctctttcaggtccaaataaaaatttggagaaggtcaaaatcatcttttcagttcacactgttaaaaatggaagcctgctctctcaccacgctcaactcccctttcctgcttataacgtatcacagatttttacctatttgctttgtttactatcaatcttctatcaggtatgtgctgctaaatgtttaacaatcaggtctccaggagacaaaagctctgatttgtagatttgccaatttccatggtgtaaatactcccaccgtggacatttcaagctaccaacgtggcctctttgaatgcagctgtgggaagagatgcacatcattgtgtgagtcagtacgagctgcctctagcacatgactggcccctcactggaccatcagctctataagggtaggaatttttctgttgttgtccactgattcactgttgttttcccagcactccgaaccattccatcgttgaatagatttattaattcagtcatccacaaatcagccacatggcagatgctagatatttgaactagcatgctgagcaagacaagcactgtggctgccctatgtggcaggtgaaatagacatgaaataattagttgcaaattaagcattaaattataattgtgttgaggattacaaatggaaactctgagggaggacttcacccctagtggcaggtcagagcttcctgagaaagcagactttcaggtgagtactaaaggaggtatgagagttaggtaggggaaaaggaggtcaggaagaggcttgagcattctaggcagaaggaatgacctttgcaaaggtcccaagacatgaagaagcttgatttgaaaatggagagggccatgtaaatggagcagagaaaataagaggaggcttgagataagactggagaggtgaaggggtgggtcttgtagcccccttgaccatcacattagagtttttggactccatcctaaagcagtgataagccattaagggttttaagcagaagagaggcaggagcagattactctggctacaggaggatgctaggctgggatgaatacaggaaaaccagttaagaggttgccatggctgttcagccaacagatgatagtggctccatggtggcaggggagatgaagagaagtaaatccaggattgactgggtctgaggggtacaggagagggaggaatcccatgactttcaagtttctgttcccatcttcgaccccagggtaaaagttagctattctaaaaattcatctttgctaaagagaaattaaagaatacttcagaatcatccccagctgtcccatttctgcccagtgacatttattaattgagacagagctctaggctgcccagcaagggaggctgtcaagtcaacaatagatggctactaagcaccaactgtgtgaagtgcatggcattatacaggcaccgtaaggaacaccaagacttagagacatggctctgtccttcacagagcttacaagagtaggtaagagagatgagttaggaacacctgacaaccctgtgcttgtgtcacatgagcatgagttcattcatccattcaacaagtacttgttgagcaaggacaaagtgccaggcactgtgctagataccgggatgcagtggatagcagggcacacaggttccctaactgtcatgacagcttttctggtgtccatagctgggggctggctctgagatgtcattgtgttcttgatgcaggacaagtgagccccaaagtggggcttagcccatgagggttcttggctttatccaggagagaattcaagggcaagcagaggtagatgtaaacagctttattgaagagacggtgttacagccctggcagtgttacgcctccgtgactgctcctgcagagcagggctatccttataggcagagagtaggtagtagctcagggcagttttacagtcatatttatacccacttttttttttttgagatggagtttcccaggctggagtgcagtggcgcgatctcagctcactgcaacatctgcctcctaggttcaagtgattctcctgcctcagcctcccaagtaactgggattacaggcacctgccaccacatctggctaattttgtatttttaatagagatggggtttcaccatgttggccaggctgctcttgaactcttgacctcacatgatccacctgcctcggtctccgaaaatgctgggattatgggtgtgatcccagtggcctatacccacttttaactgcatgcagattaagaggcagtttatgcaggaatttctagggaagggatagtagctcttggtttgtcaggtcattgacacggagggggtggttactcccaggtgttgccatggcaatggtaaactgacatgtcacactggtgggtgtgtcttatggaaagctgcttctgccccagccctcaatttgatcctgtgtccaagccctgcctctggagttaagctctgcctctggagttgagtcctgcctcctacctcactctgagccctcttctggtgtgtgaatacctcttgctgaggatgaggagaggcagagagacttggagagaattttgttcccatctcagtcatcttctgaggaccccacatctaatggaggagggtattcttaggactttagggccattcctcctgggaggcagggcatctgggcctttttcattgttcattcagcaaatgaactcttatggagaccaaatacatgtgctaggacactgtgctagactctggagagtcaaaactgacccgcttataatggggcagatagccgtgatcaagtccttccaataccatgggatcagtgccgaaatgctagagcggagccatgtctatagtgctgtgggggcccaggggaagaagccttaactccagccaacttgaaggaggcttcccacaggaggtgacatttgactggggttgtgagccattcatgggggtcaccaggtggagaaggtggaaggctgtgccggggcagggggagctctggacacagtgcttcttatccttcagtgaaatcctcctggcctcagagagaaagaagggctgtttttcaaaagcataaggaatcatccaaaaaacatctgtatttgtttcaaaaggaaatggccactgccagaaaaacagcaaagttgttttgtcagaacccagtctgtatttattcctttgtctttgtttaattagattaatccctgaatggtttcccttgggtcggtacaaatcgctcgtggccataaatccccaacaattctaaaaacagtaagaaaggacaatccgcatgaagccaactggcaagcttgctgtttgtgggacagttctgggatgcgagcagtaatcttgcacccgcacataggtgtttggggttcttttagcctcttggagaggggagcaaggacaacaatcactcagatttgtttagaagaggaaagctgaaccgtagggtctcatcattaaagggggagactgactcctggatctgggcaccttccccagggaggattgtggggactttttatctgttaggttcaatgacattcagcctggctgcacactggggctacctgggagctttgacaaacaccactgcccaaatcccaccccctgccagtctgatttaattgtggtggggagtaccttggcatcaagattttcaaaggtccctgctgcttctgtagatgggagcttgcagttactcacagactcttctgcggatatcccagtctgtcctgaaaggaacaagcatatccttgcctttctctacctaccctgtgcagggaagccttttagaaaaaaagattgttccttcaaggtcctggttccttgcttttgaaatggtactttcaaaagggttcttttgtaacaggttgatttttttgtcttcctccattattataaaagttcctgttagaaaatttgaaatcagacaattataaataaaagaatgaaaaatcacctgtattcacaccactacttggtaaccatggtaggtagagttcctgccagacccctgatggggcaaggcagcatctgcagtagagattgggaggacccaggtggagaagctgctgccacccttccagagctggttccagcatgctggagcgtcacctcccagccatcaggacttcatgcagggacactgcccacccacttagggagcttagagtctagtaagagagacacagtacatccatcgctctataaatacatacgtagttaacattatgattcatgccaggagggaaaagtgcaggggtgggctgacagctgatgggtgaggccaaaagtgtaaagaatgtttaaaggtcctcatagcaagaggttaattttctcatcaccattcaggcaacccaaagctacttcagcccggaactcagaaacctactgctgttcccaagaaagcaatgcttttcattgaactttgctagaggtgcttaaattttcccaggcctgagaggatctgtggtgctgccagacttatccttccgaagcacaacttgggtgaaattgctggtctccctttttaaagtttttcccttgagtggtccccattgcccgctgattggagttcagcctatgcagcctgtgtgcagagatccctctgcctctggtgtcaatggtctttcccatcctctcttctgctacttcccctggaatttccagagcagaattcagctgccacgcctctcctgcttccctcttctgtttactcacgcgtcccaagcctggagtgctgtttctctttctccatacctgccagcctttcccagtccttgctagacttgcagtaatctgtcccaattctgaactcccatagttttcttggcacttctcttagggattcttatcatgtcctacctcgcatgttagttatttaggtggcatctaacaaccactctggcctttctgttcctcaaataggatcagtttgttcttcaggacctttgcattcactgttcttttggccgaaaatactcttcctaaaggttcatgttattaactcctagtaggatacaagctgcgtgacagcagaaaccccttgtctgttttgttcaccatgatatccccaatgcttgggacatagtatgcgctcaaaccgtatttattgactaaatgaatgaatatcgtatgattcagacatttcttatatctggcctagctcatttaggttttgtatttctttgattactcactacgatttttgtattagctgaagttttcttccggttatgggtgttttccttacatctgaatccactgaaaatctacattggactttctggttggagttctcaattggaaatgtgagatataaacttactggtgagaggtaaaagaatctgtgtctataaggcttttttttccatctactttattgatttgggagtgaaacttcttttaggagtttaaaaccagaattcttatttgtagactcttagacctaagcgtttttaaaatgtgatgatgtaagttttaatgtttaaaattgtttaatgcatttaatagagatgttgaatcaaatcagcttttatctttttaaaaatcaatttggatattttatatttatgtaaaagcataataaactatgaaactcaaagatctagaagatgatatgaaaatgtagccattggattcaggaattaatcaagctttctaggtaattaagtttttttaaatcatacctgttgtagtgatagcttttttttgtttgagacagtcttgttctgtcgcccaggctggagtgcaatggtgtgatctcggctcactgcaacctccatctcccgggttcaagccattctcctgcctcagcctcccatcttctgagtagctgggattacaggcgcgtgccaccacgccaagctaatttttgtatttttagtagagacggggtttcaccatgttggtcaggctgatctcgaacttctgacctcagatgatcctcccgccttggcctcccaaagtgttgggattacaggtgtgagctaccacgcccggccagtgatagcttttaaccagagaaaattctctttaatatattcaacccctttaatgctctctgattatctccagttttaatggcaaaatcaatggtacagctagctgtttcatggtatccaagctgttctccttgctgggaaatagtgttagagactgagtcagtgatggatggaagatgcctttaatcttttcatccaccaacatattcttagttctgttgcagtagatgcatactgcaagtccattcctacgttgcatgtgaataaacaggcagagcttagcacttagtggacatgtaataaatatttgaccaaaataagaccacgaatagacatgtatctatttctccctggcaatgtttgttacctctacctaacctcttttggcttctccattttcctcgtttgttattagaatgaatacatagagcacaaagagggttttcaaagagctttgtctcattccttcttataccagcaacagagtgagattctgtctcaaaaaaattatttaatgtatttcaaagtaattccaactttgaaaaatgtggtttttttatgttatttatttattttgagacagagactcgctctgtcgtccaggctggagtgcaatggcacgatcttggctcactgcaacctccgcctcctgagttcaagcgattctcctgcctcggcctcctgagtagctgggattacaagcacacaccaccacactcagctaatttttatatttttagtagagatgaggtttcaccatgttggccaggctggtctccaactcctgacctcaagtgatcggcccacctcggcctcccatagtgctggaattacaggcgtgagccaccgcatggctgaaaaatgtgtttttatatacatgcagaaactcacctggaaagaaaactcaccaaaatgttaacagtggttgcctctgggtagtaggattacagatggggggattacaggtgaattttcttttatctatttttttatgttttccaaattttctactatgatcacgtatcaaaccttacaatgtttttaaaagttactttggtgagggctctggagttccctgttgcctcaccctgggctgggagcattctcaggtgtgcctgacgttgtgttctaacatcgtgactttgcctcagtccaggatctgtgtgccatggaggaccacaactgtgagcagctctgtgtgaatgtgccgggctccttcgtctgccagtgctacagtggctacgccctggctgaggatgggaagaggtgtgtgggtgagtatccctccagctgggcttggtagggaaggacaagttaagcatggtgaggaggaggggagactcacgtgtacctcccacatatttgtttcctcacctttgggtttccacaaagtgctcagttgtttggtgtagttgttaggcagaatttgaactttaaaggcttcatttatggctgaggtcagcgttttcttattctgggtctccagtaaaaggaacacttatgataatccatgcaaatataactgtgtgttactgcatctcttgaaaaggatcgggtggattttcttcaactttggaggatatgtttggaatggcctgacttatatatagctcaggtgttatacatgaaatttacttgggtgggttgctgagtgacacctcaaagacaacgggcagccttcctccctaatgtcacctatagctcagtgacaggccaaagtgactgccaggtgaaagagcccagccatatgggctcagcgtaattagacggcgtggtcagaggaaactagcagtagcctcaaaccctcaaacacaagcccaggtaatgaggctcaagggcagtgcttgatgctgcagacatcccccctgtttatctacaaagcctttgcaacttaacatggtctcattcctccttataccaacaaacagtgcctggtggatagtaggtgtttcataaactgaactgaatacttatgaggcagaaaatctagaaggaaaagaacttgactgacatcaaaactggaatgtaaattttctgctaaatcctgcattttgtcttccgtgttctattgttttcaggaccctattttattttgcttcgcacaaacagggtatgcttatatttttgcacatagaatttgcattttccagcacaccttaattcttagctagggatgtggaaggcaaaacaaaacaacaacaaaacaaaagttaggtggtagcctgcaattggcaggtgagtgatgagagtatcgtgggtttgtttttacacactgataggaatgaaagcaacctctgcctctgactctcatcaaagggccacaaatgcagctggtctcctgggccttagggttgtttttcttcttaatctgctggtggtggccatgatagagtggcagggttccacacccactaccactagcaaaaaagaagccaacatatatacccatggttatttttgcttcattaatttttattatgcaagtaatacccgttcatagagaaacttaaacagatgagaaaaatcactattaataggttattgtattttctaccagactttctccatataaatatctactttaaaacattttgttggacaggtgcgatggctcacgtctgtaatcccagcactatgggaggccgaggcgggcagatcacttgaggtcaggagtttgagaccaacctggccaatatggcgaaacccggtctctactaaaaatacaaaaattagctgggtctggtagtgtgcccctgtattttcagctagttgggagggtgaggaagaagaatcacttgaccctgggaggcggattttgcagtgagctgagattgtgccactgcactccagcctgggtgacagagcgagactcatctcaaacaaacaaacaaataaacaaaaaacattttgtaaagatttaacaaaatgaggtcacactgtctattttgttttacaacctgctttttcccctctactatttgttaaatgggtagaaactctgagtgctgtttggtcaggaggaaatcaagccattgtgagttaggctggtggaggagcttcaggaaacaggatgagggtaatgggttgattaggacaaggggagggacagtagaacacagggcttgcattggtcacagggagtagatggggcaggaagcccaccttggcccatgggaaactggaggcccctgaaaaacccatttctctgagtgtttccaaataattacctgcttgtccgtgtgtagtagagaacctttgtatctctgaggattttgctgtaacttttgggatttgacatttattgaagagctacaagcgtgggagggtagatgctgtcattgccagagagctttggcgtgctgtttatcggagatgggcgtttctctgcggctgcttgactgcatataagaatgtctgcattttctcagtggggatccaatccaaagagtgggaaaatgggagagactgcatcccattgcaacccaggtctcctccgtcagatgatcctagcatcaccagccttaccaccttttccccaatgccctttacagcggttcactaagcactcgatctgttagaggctgggagtgagatgattaagcaggcagtacttttgttgccagtagcctttcttagggactccagacaaaatcctacaaggttagttgctgctcaatagggctatggtgagtacaacgcaaatgatagagaaaatattggccacggaaggtcagagagagacatcctaatggctaggctggaagatctgagtgtggaaggaagggtggcaattggacaaatgtccaaggcagggggagagatgaagggcagtgactgtggaggtggcaatgctcttcaagcattagggctaagtctggcctaggagtggcagggccagctcctgggagctggtaggtcagagagagactgttacagtgaaaaggccaaactgaaagttaaccaggtggcctaacctgagggccagaaggcgcttatcaaagatggagactccaggtaccagacttagagcaggaaatttagaggagaggctggtgagaactctggacatactccattagtagctgatctggggtgccctgtgtgtagatggccagggaacattaagaacagagtgattatgcctcccagttaatacaggacaatcccagtttatgccctgttggcccaattcttttttttttttttcttttttttgagattgagtcttgctctgttgcccaggccatgatcacagctttgcagcctcgacctcctgggctcaagcgatactcccacctcagcctcctgagtagctgggaccacgtgtgtgcaccactgtgcccagctaatttattttttgtagagacagggtctccatacattgtctaggctggtctcaatctcctgggctcaagtgatcctcctgccttggcctcccaaagtgttgggattacaggtgtgagccacctcgcctgatgccatttctttttatttttagacagggtctcactctgtcacccagactggagtacagtggcgcgacctcggctcactgcaacctctgtcccccaggctcacatgatcctcccacctcagactcccaagttgctgggaccacaggtgcataccacacgtctggctaattttttgtatttttggtagagatggggtcttgctatgttgcccaggcaggtattgaactcctgagctcaagtagtctacctgcctcggcctcctaaagtgcagggattatagacatgagccactgcgcccgactgaccccatttcttacccagctggcctcatttcttgatggcacatcttttcactttgaaaggggttccagtttggatgataaattacataatcaccctagttaaggctgtccaatttgacttaaactgttaagttcagcagagaattcctgtatacatgaagtaggagatgaagttgaagacagcagaaggaactggattgttcagggctttgaaaatcagacgtaaagcctagattttatctctgaaaaagagccaccgaagggtttatatttgggtgacaaatgcaaagcttcatttttaggaaactcaacctcatggggaactgcagggtgtattccaggagaaggatggcaagaagtgggaagaccagataggagattgtagcagttatcgggtgagagaggataggaaccagccaggatttgaggtgcaactgtaggaaaggagagggagacagtaaggaatgaaagaaggtgctgtacataaagggaacaaggagaagtcaaaagtgactctaggccaggtaccgtggcacatgtctataatcctagtactttgggaggccaaagtaggaggattgcttgagcccaggtgttcaagactaacctgggcaacatagtgagacccccatctctaccaaaaaataaaaaaattagttggacatggctggatgtggtggctcatgcctgtaatcccagcactttgggaggctgaggcaggcagatcacctgaggtcaggagtttgtgaccagcctggccaacatgatgaaactccatctctactaaaaaaaaatacaaaattagtcaggcgtggtggcagtcacctgtagtcccagctactccagaggctgaggcaggagaatcgcttgaacctgggaggcagaggttgcagtgagccgagatcgcaccattgcactccagcctgggcaacaagagcaaaactctgtctcaaaaacaaaacaaaaatattagccaagcatgttggtgcacatgctggtggtcacagctacttgggaggctgaggtaggaggattgcttgagcccaggagatcattcaaggctgcagaaagtcatgttcacaccactgtactccagcctgggcgacacagcaagaccttgtctcaaaaaaaaaataaatgaataaaattgaaaaagactccatgatcttgagcttccatggctgtgagagtgatggcaacagtgatggaagagtgatggaatcgattttcaaaaagataaggccaagcgtggtggctcatgcctgtaaacctaggactttgtgaggccaaggtgggaggattgcttgagaccaggagttctagacaggcctgggcaacaaagcaagaccctatatctacaaaaaaattaagaaattagctgggtatggtggtgcacacctgaagtcccagctactccagaggctgaggtgggaggggtgggaggattgcttgagcccaggatgttgagactatagtgagccatgatagtgccgctgcactctagcctgggcaacagagtaagaccttgtctcaaaaaaaaaaaaaatgttggggtgataattagtagtcattgacaaggtgaattttgaattcaggttagacaccacaaggacacgtcaagaggaagcagaaaactcggcattaacatgacagagagagtagaatcaatgctgtagtcaggaagcagcatagtttatttcttaacttccagttattttctattttaaatatttatgtgtcagttggtttgttttgagggcatctagacctttaaaacagtgctacctgagctgaaatcccaactctgctacttgctaggtgtgttaggccatttgcgttgctataaaggaatacctgagattagctaaaagaaaaggtttaattggctcatgattctgcaggctgtataggaagcatgacaccagcatctgcttctggtgagggcctcaggaaacttccaatcatggtagaaggtgaaggcggagcaggcatgtcacatggtgagagcaggagcaagaggtagggggaggtgacacactcttttaagaccaaccaaatctcacatgaactaactgagcgagaaatcacttatcaccaagatgataacactaagccattaatgagagatccacagctatgatccaatacctcccactaagccccacctccaacattgggaatcacgtttcaacatcagatttggaggcaataagcatccaaaccatattattccactcctggccccccatatttcatgtccttctcacatttcaaaatacaatcgtgcctttgcaatagttccccaaagtcttaacttgttccaggcttaactcaaaagtctcaaactccaaagtctgaagtgtcatctggagatgagttccttccacctatgagcctgtgagatttaaaaaaaaaaaaagaaaaagtttttacttccaaggtacaaggtgttataggcactgggtaaatattctcatttcaaaagggagaaattggccaaaacaaagggcaataggaccatacaactttgaaacccagcagggcagctattacattttaaaactccaaaacaatctcctttgactccatgtcctgcatccaaggcacacaggtgcaaggggtgggcccccaaggccttggttggctccgcccctgtggttgcagggtatagcccccaaggctgccctcacaggttgttgggtgcccatggctcttgcatgctaaggttgcaaactgccagtggctctaccattctcaggtctggagggtggtggcccccttctcacagctccactaggcagtgccccagtagggactctgtatgagagttccaaccctacatttccctttggcactgacctagtagagtctctctatgaggcttcacccctgcagcaggcttctgcctggacatccaggctttccaagacatactctgaagtctagggagaagctgccaagcctctttcatgcctgcattctgtgtgcctgcagacttaacaccacatcgtagccactaaggtttatggtggcttgtactctctggagcagcagcccaagctgtacctgtggccctgtgagccatggctggagctggagcagcctggatgtgaggagcagtgtgctgaggctacacagggcagtagtgccctggacctggccccccaaatcatttttttcccctaggcctctgggcctttgatggggagtgggtgctgcctagaagatctctgaaatgcctttgaggcctttttcccatgtcttggatatttgcacttggctcccttttagttacactaatctctctagcaagtggttgctccacagcctgcttgtattcctgtcctgaaaatgccttttctttctctgccacatggctaggctgcaaattttccaaacttgtacattctgcttcccttttacatataagttccaactttatttctttgctccagtatctgatcataggcttgaatgctttgctgtttagaaattttttccatcagatagctaccttaggtcatccctcttaaattcaaacttccacagatccctagggcatgaacacaacccagctaagatctttgctaaggcatagaattggtgacctttactccagttcccaataaattcttcatttctatctgagatctcatcagcctggcctttactgtccatatctattagcattttggtcacaaccacttaacaagtctctaaggagttccaaactttccctcatcttcctgtcttcttctaagccctccaaactcatctgacctctgcccattgcccagttccaaagctgcttccatactttcaagtgtgttaatagcaacaccccactctcagtaccggttttctgtgttaggctgcttgcattgctctaaaggagtacctgagactgggtaatttatttgaaaaagaaagagtttaattggctcacagttctgcaggctgtacaagaagcatggcattggcctctgcttctggtgagggcctcagaaagtttacaatcaaggcaaaagccaaagggggagcaagtatgtcacatgacaaggacaagagtgagagttgggaggtggggagatgccacacttttaaacaaccaggtctcatgtgaactaactgagcaagaactcactcatcacctaggggtggtgctaagccatttatgggggatctgtccctgtgatccaatacttcccaccagggtccacctgtaacacgggggatcacatttcagtgtgagatttggagggcacaaacatccagaccgtatcactaagcacatatctttaagtctaatttctgagcttattttcctcacccataatgtagaatagtaatatatacattgtaaggttttatgggattaaataagatagtgagtgacattcccaatatactctaagaacttagcattattattacaacacctactattatcgtaatttcctgtatatagtgaagtatggagtgagaagagagtgaaggactgagccttggattgcagtcacatgtagggagcaggaagtaggggcaggaaaaatattcatgaagaagtagcttaaggctgggggagagagagaagaatcatggaacatgataggaagataatttcttggccaggtcaatattaatgtcatgcttcagcatggccaaaggtaacaggacttagagaaaaagccatcaacttgagtcacagattcaccgctgcaaacatttcagaactctgccagggactttgctaggcttgaggagcacaaaggtgaccaggaggccattgagaatggcaaagggggcatgggtaaagggcagatttcaagaggcagggagtgggtgacaagaaagtgtgggcagcaggttcaaactatttatttaaagaaatttggtagaagttaagcatgtccagctgatgcagggcaggcaagtcccaaagtggagcttagcctacctgggttcttggctttgcccagggaagaattcaagggcaagccagaggtagaagaaaacagctttattgaagaggcagtgttatagctccatgactgctcttgcagagcagggctaccctgtaggcagagaatagcagcttaggcagttttgcagtcatatttatacccactttcaattgcaggcacgttaaggggaggtttatgcagaaatttctagggaaggggtagtaatcgttgggtcattgcccaatgatagtaagggatggtaactcccaggtgttgccatagcaacagtaaattgacatggtatactgattgaagtctgattgaaggctgctttcaccccagccctgttttagctagttctcaatcaggtccgatgtctcagccccacctctggagtcaagtcctgcctcctacctcacagctactagtgaatttatgcagtagattttcagtttcaacactttcatagctactgctatgaaaagcacttcttttgttaccaaaacattaggggttcagtctaggtcctgttgcttgttgcacagaaagccaatcactgagacaacaagtattaccaggaaagaaggcttcagtcaggtgccatagccaagaagatgggagatcagtctcaaatccatctccctgactgactaaaattagggatttaggctggatgtggtggcttatgcatgtaatcccagcactttgagaggccaaggtgggaggatcacttgagaccaggagtttgagaccagcctagacaacatagtaagactcctgtctctacaaagaataaaaaaaaatcagctgggtgtggtggccaacacctgtagtcccagctactcaggagggaagattgcttgagtctgggaggttgaggctgcagtgagccatgattgcactactgcattccagcctgggtgacagagtgagaccctgcctcagaataaaataaaataaataaaataaaaattaggggtttatatagcagggaataaatgtaaacatatgggggaaaacaggaattagggaggagtatggaagaggagttggtcaacacgcagcaggtggttggttaggcagtcataaatggggaggggtctggcatgtcattgtgcagatgcagtgatctggtaagtttcagccccttgatactgtcagagagtcctgacggtttggttcttgagaagggttctcagataaaacaaatgtaactttctcaagtttcaagactggaaaggtaaatttctatgtttattcaaaataaaccataaacatcagttctgtgggacaattgggccggtttcactttgattcatccctgaattattactgtgacctgcatgaaagttcagttcttagtcatggactcagcatttttttatagatttccacacatttgagtaagtggaacgttcaattccagcaccagagttccaactccctgacagctcatttcaccattgagagtcctgaatttattccgtattcaatggtggattgctgactaagaacctcctctgctttagtggagtccctgaatttataattcatcagctgccactaaagtcatgttcattgccatccaaaactatttttcaaagaccatttatctagatttctgaacatgaattttctgctgtacttactcacctggtgtttacaaactgtcttttattttggggtaactttggtcctgtttgcatcttatctacccaggcagattgtaaacccttgagggcaaaaccacttgtacttttcatctttcacagagtggacttgaaatacattttcttgaagcactgactgaggttgattgcaatctcatgcattcatgttttgtaaaaaatatttcccccattgactggtttttaaattataaagtcatttttgcttattaaaaaaaaaaagtcaggccaggcatggtggctcaagcctgtaatcccagcacttcgggaggccaaggcgggcggatctcttgagctcaggagttcgagaccagcctggtcaacatggtgaaaacctgtcactacaaaaataacaaaaattagctgggggtggtagcacacacctgtagtcccagctattcaggaggctgaggtgggagaattgattgagcccaaggagatatgtgccaccacccccagctaatggaccaacaccgtctctaccaaaaatatataaagaaattagccaggcatggtggcacgtgcatgtagtcccagctacttgggaggctgaggtgggaggatggcttgagtctgggagggctgaggttgcagtgagccgtgatcatgccactgcattagagcctgggcgacagaatgagaccctgtctcaaaaaaaaaaaaaaagaaaagaaaagaaaagaaattttctctgggttttaaatcctgcatttggaattccagttatgccttggagaagagaggttttgtgagtctgactctgtgtgtgtgtgtctaatgtatgctcagcaagtaaattggttctaccatttctctaaatgacaaatttggtttttcttactttgttatcagcaaactttaaactccaaatgctcctctttaaaatatactatttctgctaatgccattcccttgcagacggagtcctgctgagaaaacgttagaattggaccaggttataaaacagaaatcattgattttagggttttattacctgcagcaaggtatcatttattcttagagacagtggagtgatttctcacatgttgggcagagaatgaatgtggcaagactgacttctgactctgggatcttagcacttgtgatctggagggctaaagagctacagctggagaattactctttccatttgtaaacaagaatgtagacattttaggcataaatgactgagaacagattttgttgaagtagatgagaacttggaacaatagagccatcattgagttatacaagaggtcacctccatacatctgcctccctaatcttgacctctctttttatgagtacaattttgcaaccaagaaagttatgcaaacaacccaaaccacttggcaaataacattagagctgaatgccctagaactctcttggccttaaaaaactgttagattcacatgcctggcagtgggttcttccatgtttaaccactgcactgatggcctcatctgccgtctccagaagcctagcagtgtgtcagtgggtggatttcaaattgagatgggatttgacaccttggagttttacagactggagacttgggacccaggaatgcgtgaatcctgccttgccaatcacatcctcccccttagttccccagagagctgtgtacacaaagaacaaaaacattatgagagtcaagatccagagaagctctcttatctcatgaattgggcctgtggttagctgataaatggaaaacatcattcagagaggggaatcctaaaaaactatatatgcaaacccaccttagtcattttatttttatttaaaacacataaatgtatacttagtaaaaatcacttttatgcttttaaaaaatgctaattttaagttgaagaaaaaagtatgatatttacaaatctttttttttttttttttgagatggtataattctgttgcccagattggagtgcagtggcatgatcttggttccccgcagcctcaatctcccaaactcaagcaatcctcccacctcagcctcctgagtagcttggaccacaggtgcatgccaccatgcccagctaatttttgtattttttgtagagatggggtctcgctatgtatcccaggctggtctcgaacccctgggctcaagcagtctgcctgcctcggcctcccaaagtgctgggattatataaaaatcttttttgcataaaccatacccataatgtgttgtctatgattttttagttttggtttctttaaattggaacaaggatttcaagacatctgtaaagcagtctaacagcagaactcttgtaaattttaatgggaaatttcccaatgttttacatttgtttcatccatgcctggttctatagcaattttggttagcaaattgctttaattttttccaaagctttcaacaaaatttttatttttaaaaactcagtttcttttagtgcttatattttattggtttttattttatttatttatttattttgagacagaatttcgcttgttgcccaggctggagtgcagtggcacaatctcagctcactgcaacctccacctcctgggctcaagcaatcctcccacctcagcctccagagtaaatgcgacaacaggtgcccaccatcatacctggctaatttttgtatttttagtagagatggggtttcaccatgttggccaggctggtcttgagctcttagactcaagtgatccacccaccttggcctcccaaagcgctgggattacagatgtgagcctttttgttttgttttgtttttttgttttgttttgtttttgagatgtagtctcacactgtcgcccaggctggaatgcagtggcacgatcttggctcactgcaacctccacctcccagattcaaatgattctgctgcttcagtctcctgagtaactgggattacaggcgcctgccaccacgcccagctactttttatatttttagtacagatggggtttcaccatgttggccaggctggtcttgaactcctgaccttgtgatccacctgccttggcctcccaaagtgctgggattacaggcttgagccaccgcgtccagccccagcccagtttttataatatttaaattacttacaataacatgtacaaatgacacatacaggtttggaaacaaaagcaaccttgactctaacaatggctcttaagttttagcgtgcctcagaatcacctggagggcttgctcaaacacatattcctgggtcccactcccagaacttctgatcagtaggtctgggatggagcctgagaatgggcattactgacaagttctcaagcgatggttgatgcagttggttcacagaccacactttgagaaccaatgtttataagaatacatctcagtcaatggaaaaagtacacaggtgtcctagagcccatgtgttccaccaaggctgctttatcagcatacaacccagccaatgtgaggcgtgtacaggtgttttaaaacacaggtgttctaactgccttgagtgtgtagcatgccctgggttatcaggattcatatggtcagagggaatgaaagcgttgcttgatcaggagttgcttaaggagtgatcagttaaaagagcatcttagtacaacttttttcttgaaacacccgagccaatttggatactctattctataacattctggaaaaggggaaagtttggagtatgtggcttagattcaaagcctaagccaagccttcaacacctctctaaattattacattagtctaaattacggggccagcataattatgggatatccctctgagagacagaaatggccgggctcagattataccccatggtgtaagagaggacattcaagagaaaaggtagagtgtgagtttctgacttttaggtatagagacctgaccactcattgttgcagcaccatcaatgtcctacaatttggaagtcagatcagcagctcctctctttgtaggggatactaagaagtgggtggccatagataggactggctgactgatggcaggcacccatatccaggattgggagattttcatcatggtgaatcaagcccagcatgaggaagttgaagctggggattgttgactgctaacacgggcccaagcaggctctggcatggccaactcctgtgacaaacagactggaccgtgtgccagggtttagccttcctcgatctcagtgttcccagtgtcaccattgattcttttgatgatcccttggttcttgagaaatgagaaatgaactattagaaggatgtggtgctagctcagtctttatgttatgactcaactctagcaaccagctgatatccaatgacgttgagatcctgagatgacatgaatgccctatccccaacataatggcttgtgaattaaacctgcaaatactaggttctactagaactctttagggagctgaagttacaaaaacaatatttagactgaaacttttttttttttttgagacagagtcttgctctgttgcctgggctggaatgtagtggtgcaatctcggctcccgggttcaagcagttctccctgcctcagccttccgagtagctgggattacaggcacctgccaccatgcccagctattttttgtatttttagtagagacagggtttcgccatattggcaaggctggtctcaaactcctgacctccggtgatccaccctcctcagcctcccaaagtgctgggattacaggcgtgagccaccatgcctggcctagactgaaacttaatgaaactttgaagcaaaagaataaacgtaacacaggttattaccctttacaaatcttcagtgtccctttgcatctttttattgctatgctaaatatgtcattatcttctccatgcatggttttgctttttaaaattttacatatgtattacttttgtagattctatttccttgttattatttacacacttttgatattaatataatcctaaaacattgtagggagtacttttttttgaaaagggactggtcttaagctcctgagctcaaatgattgccctgcctcagtctcccaagtagctgggatttccaaaaacttttttttttttgagacagggtcttgctctgtcaaccccagagttgaccctaggtgcactctctttttctcatttcacctctaatccaacaggaatcctgttagccccaccttcagtatttaccaggtgtattagtttgctagagctatgctgtggtttggatatggtttgtttggcttcaccaagtctcgtgttgaaatttgacctctgtggccaggcacggtggctcatgcctgtaatcccagcactttgggaggaggctgaggccagtggatctcttgagctcagaaggttgaggccagcctggcccacatggtgaaaccccgttcctactaaaaatataaaaattagccagatgtggtggcgcacacctgtagtcccagctacttggatggctgaggcaggaggatcacttgaacccaggaggttgaggctgcagtgagcagaggtggtgccactgcactccagcctgggagacaaagtgagaccctgtctcaaaaaaaaaaaaaaaaaaaaaaaaaaaaaaggacaagaaatttgattcccaatgttggaggtgggacctgctggaaagtgtttgggtcgtagggacagatctcttcttataagaacaccagtcatattgaattagagcacgccaccctaataagcacattttaacttggttacttctgcaaagaccctatttccaaataaggccacattcgtaggtaccagggtttaggactccaacatgtctttttaggggacataattcaacccataacttccagaacaccactccccctcatcccctgcaacatcctggtttaagcctccacccttcctccctgggattactggagtcactttcttactggttttctactctcagatttgccctgtcagtctattcttgactcatgggtccagaaccctgcagtgactcccaactcattcagactaaaagctgaggtccttgcatggcccatgggtccctcctgactgcccccttctcatctcccacctctctccctcctccagccaccctggcctctttgctgatcctccagcccaccaggcagagtcccacctcctggccttcgcacttgctgtttgttttgcccaagataccctctcccagatatcctcacggctcgtattttagtcaacactcttcctaaccacccaccttctcagagaggcctctcctgaccacctctattacatcccacctgctacccactcccccactgaccctactcctattcattgttttgcttttctccagaattttctttatctcctaatagactatgctatttacttattttacttcttatctgctccccactcccagcatcattatccaaatatacgctccttgggggctggaattttggattattttcttacttgttctatccctagcacctaaaacaggacctggcccatagtaggtactcaggaactaatgaatacatttttgttcattacacatatttgtgtaatgaacacatatttgtggaactaatgaaacaaatgaaatatttgtggaacacaggaacacatttgtggaactaatgaaaaatcagccagtgtattttctcatacattgttaaatcatttacccttattcaatgttcatcttattttctaggattttttgttgttgttgtaaacaatgctattaatagtttattgtatataatttcacccttttcctggctatttctttgggtttcacgtccagggtgaacattgtcaaattgccttccaaaaggatctttctcaatttataatgcccctaccattaataacgctgctgcctttctaccactgggttttatctcatcttatttttgccagtttactaggtgtaagtgcaccttgtgatgattttgatttgcaattctttaacttttaaatacaattgttcacatgttctttagtttacttcctatatcttcctatatgaattgcctgatatagactcctgattttttttgaggggggcagagaccttgggttcataactgtttatcctactcttttggggggcaataatattaatcctaattaatatctgttatcattttgccctcatcctaccattcccttttcctctgtttgcatttctaattctgaatgtgttttattctctccagctgtggactactgtgcctcagaaaaccacggatgtgaacatgagtgtgtaaatgctgatggctcctacctttgccagtgccatgaaggatttgctcttaacccagataagaaaacgtgcacaagtaagttacacacacatgcacacacagagaaatatttgctgttactgctgtggtgactgtgaccatggaactctctcaagtatagattagcaatataattatgtcatgggggtctaataccttttgccccattcctcctctgtcaggactttcatgacttggcttaagaccatagaccactgtatctcaacatcactattcaaggaatatgatgaaggcaccatgtgtaggactgttccttcagcatctgctgagcatgctgacaatccgagcaacttacttcctgctaactcagcctgactgtgcccatcagtactaacagggcttgagatgttttcattgaagctttgtggcttgtgggctttagctctgactccacgcgagaaaatcgctgagccaaaaagaatcataagtgatttcttctggtggaccgcagtttgcaaagaactgctcatgttttgtttgagctatttagttcaattggattttaactgtatacataaaaatcagaattaatttcagctcccaaaatttgaacataaaattcgataaactaaagatgatcattagttttgcaaaaaagataataactagttacaaaaagattccaaaagtgttctattaaatataaaggtacatcaggagacttaagggattgtgtatggattattatccttctatagggaggatcacttgagaaaagcttgcttgttaagtattagggccaagcatttataaaaagtggactttaataacaatctagaatagggtaaggcacctcagagacatgcatcagtgagaaaacaggattttaattcataaaaagttcatgtacctacaacctttctaaaatgtattcactatgtaaaacaggatacatctgcacaaaacctttttcaacataaacttacttcctactcttcaatacctaaatatcagcagcttacaaacaccagagctggaggtttgggtgatgtatggaactataagggacacattaggtcaaaagcatacatttctggagccccaaccatgtgccaatagaaatgagtacggcaaggtccttaagggagaagataactgtggctgagtcttggaggtggagctgtcattcactaggcagaaaagggtgaggtgggggttccaggagaaggaaagaagttgaagatgtgaaccaagcagagaactgtagtctccatgccccgtgcatgactggcatatacagtggtttatttgttttgtttattgaaagagtaagtaaatgaatgagtgggctgctgtgtttgtggtctcccttcccttctgaatattctgaactgtaaaatagcagcctgtgctgtcgtcgtggttggggagttgtggttgttgggctgatgagtcagtgttcctcatcaaagaggaggccgtgggctgccagcagcgggccttggttctaatcccagcttctctgctttttctcttggtgatcttgggcaagttacttatgcctcagtttcctcagttacagtacaggatgataatgctgcctactgcatagcattattctttccttttttttttttttttttttttttgacactgggtcttactctgtcacccaggctggagagcagtgatgtgatctcggctcactgcaacctccacctcctgggttcaagcgattcccccacctcagcctcccaagtggctgagactacaggctcgcaccaacacacccagctaatttttttggtattttttgatagcagtggtgtttcaccatattagccaggctggtgtcgaatccctgacctcaagtgatccacccacctcagcctcccaaagtgctgggaatacaggcatgagccacagcacccggccatagcataatcttgaatactaaatgaggctgggcacagtggctcacgcctgtaatcccagcactttgggaagagaagcaggaggattacttgagcccaggagtttgagaccagccctggtaatatggagggaccctatttctacaaaaactgttttttttttaattagccaggtatggtgacaagtgtctgtactcccagctacttgggaggctcaggtgggaagatcactagttgggcctgggaggttggggctgtagtgagccatgatggcaccactgcactccagcctggaggacacagtaagaccttgtcttaaaaaaaaaaaaaggctaaaaagggatgatgtgggtttcaaagactttatttattatcattatgtttttttagaaataggatcttactctgtcacccatgctggaatgcagtggtgcaatcctagctcattgcagcttccaactcctgggctcaagcaatcctcccacctcagcctcccaaagtgctggaattatggtcatcatgagccaccacacctggcctccaaaactctaaaaaaatgagtatttaactgtgcatataccacgtgcctgggctacatttaaaggtgcaaaaaacattcaagatttccactgcaagctggtgagggaccttagccatagccacactgagtagctgagtcatggtgccaggagttatgtgaccaagggcctacagtgtgatgcagccaggaccacagcaggagttagaggaaggagaccagttagaccagaacaggtgagatgctgccttgcagggatgaggactggagaaaaacacatatcctagccagtctcctacctgcctctccagactgcacacactggctggggtcacctgatttccaccccagcaccagccctagttcccagagtggcaccatcttccccaccctgtggctcagcatgcctcctgtcccagatccccagcccagggtggtgcaggcaaggagggtgttggagccctggaatcagaccctggaagtagataccgcagcatagtgggactgggagaggaggtttagctaggagccacgggaggggctgatccagctgtgaggtctcaccagctaggcagcgagcccagcagtgcagttgtcagaatcaagatccagaagtgggccgccccaatgcgtgtgcagggaagagtgctgggagactggagggttcgtgcaggcagcctcagggcagtacatcccttagaagagccctcttcccaccatgcttggggtgggcaggagccagacccaggaggagggagacaagaggaagaaaggagacagagtacttggaaagctaagagtagaaaataaggcaaaagcccagtcgtaagaatgaaacactcaggagtgctccagatctgtggcagggacaagaactgagaaatagagactagttaaaattacagaaacaggatagaggcagaagctcagaaccgaagcagccaccctgttttagtgagtaccaaggcctcccaccagcttccagccaagtcggcctggttactgctgtgatgttgaaagatttttttttaaaattctacttcttatacacttgcaaaaaatgaaagaaactcagtttctcaaatttcagcctatatttttaaccaaaagtatatttgaaagcgaatacaattagtaagtgtgcaactattatctcaaaaaggtagactagtcaatgtaataaaccaagcatggttaatttatgattaagcaaaaatgtacataatagggctttatgttcatgaaccagtactataatttgaaatatgtaagtggtgttcaaaaaagcaccacctttatatcaatttcttaccctagagcagcccatccaaatctagacgggagaaaggtggaaacacacaggtaccatcagtttgcaaaaagttagcaagacttttctttttctggtattgttataaaacatacataatagaaaatttaccactgtactcattcagtggcattaaatacactcacattgtgaaaaacgcatatcctagcctgtctccttcctgcctctccagaccacaccccctggctggggtcacctgatttccacccagctgtaactatcctcaccatccatctccagaacttttcatcaccccaaactgaaacgctgtacccattgaacaataactccccattgcctgccctgtcaaccaccattctactttctgtctgtgaatttcaccactctcggcacttcatgtaagtgggattatatggtatttgtcctttgccgtctaacatatttcacttagcataatgtcctcaaggtttatctgtgttgtagtatatatcagaatttccttcctttttaagactgcataatattcaattatatgtatatatcccattttgtttatccatctgttgatggacgtttgggctccttccaccttttgcctattgtgaataaagctactataaagatgagtgttcaagtccttgctttcagttcttctgggtttttatacccagaagtggaattgctggtcctatggtagcaagactttttgagatctagattgaaacccttattcttgagccaagcatgagaaagaacactctcagatatccagggtcttttcaccagaaagatctatagaggacttcagtctgctggacagggattcatgtctttggtagcaaggagactgtgggctttgagtctaatgcttaatcatctaatgcctgtaaggatgaataaaggcaattgtggacaccatcttttgcatgttgccatttattattttcgtgcttggaggtcattatactcattgtttttcagtctccagtaataacttggttgacatttccatccttatttttcaaataagaatgctttgcacagagtaaggcactgaatgaatatttttgtgtttgcactagaaacaaaacacagaaggaagtaaactttttaaagtagagatggggtctgctatgttgctcaggttggactagacctcctgacctcaagtgattctcccagcttggcctcccaaagtgctgagattacaggatgagccaccattccggaaataattttatactgaatcagcaatagaagaactacaaagtatcggttgtcaggtttcttggccagagcatagttaacatactgagtgccactaccttcctacagcctgtaatatgccacttttgtgactccctatgtggataaatcaaacactttcagctggaagaggctttaaagttcaacctagttcttgcccaactatccatcctacaatattctcactgtgccatcatccaacctgcatttgaatacccccactgacaggatattcactataccccatggtagttcattccactttgtatagctctgactcttagaaagtgattccctagactgagctgatatctatttccttgctcttagaaatgaacaaaacaaatttggctacttgcgttctttgtggccactaagagtgagtcatatcagagtaactttatttcacttagtagactagccaggcatggaaaatgtagtagtgaccatctaaattttaataggcatttgaccaatttgtgtgtggaggaatttgtgctcaatgaatgattggttggtttgtaactggccgaatgtctgtaaccacaggatgctaattgttgaactgagatcctcctagaaggaggtttttaaacagcttgctgggaagaagccttatggagggatgagagctatcttccattcatagggtcccccgtgtttcttcatggtgtgcaatgtgtatgtatctaaactctcaaaaacacactccagtaagagtaataccaataaccttttattcattccacaaatatttgttgagtatctactatgtgtcagatatgattgtagacactgggcatgcagtaataaattaaacagaccaaaaagaaaccccaccaatatctgtccttatggagcctacattctattggagcaggataagagaatactacaggtctcaacagcaaagtaatactagtctttgattaaagatttgaaggcagtgagagaaggaggaaacctttgaggcagaggtagaaatgaaattctatgaaataaaatgatctgtgatactatcacacagcaccagtacaaaatggatatgttttagtccatttgtgttgctataaaggaacacctgagactgggtaatttataaagaaaataaggtttatttggctcatgattctgctggcgggaagactgggcatctagtgaaagcctaaggctgcttccactcacagcgggaggtgatgtggagccgacctgtgcagagatcacacggtgagagaggaagcaagagagaaaggatgaggcggtgctctttttaacaaccagctctcatgagaactaacagagcaaacgtactcattactgtgaggacagcaccaagctattcattagggattccccaccatgacccaaacacctcccattaagccccgcctccaacactgtggattaaattttaacatgaagtttatgggatcaaacatccaaactgtagcagatatgcacacctgaagctatatatatttattgtttttagcaatgttccctgattatgttcttctccaaatcacaggacacttcccacattgttcttttttgtatattatttgggccgttttccatggcaactagtttcacaaagtacaaatgtacaaatgtgtacatttatttttagtactttttctgattacaaaagtaatacaggttcattgagggaaactggttcctatagaagtgaaattctatgaaataaaatgatctgtgatactaccgcccagaaaaaaccactgtttttgtgtttgttttgctttttgagatgggtttctcaccatgttgcccaggctggtcttgatctcctgagctcaagcagtccttctgccttggtctcccaagttttgagattataggcgcacactactgcacctagctgataaccattgtttatgccaatttggaacatttctctccagtctttttttaatgtatgtgtatggatttatttttatagagttgagatcatgcagtataataataaatcataagcattttgacatgtcacttaaacgttatcaaaaacattttaatgtctgtgtaaaattctattatatgtatatgtcagaatgtgttcaggtttttttggctgctcaaataatattgtgataaacattcttatgcttgaatctttttttctgatcattttcttaggaacacaacaaaaaaggaaatttattgagtcaaaggcaattaacattttaagtcttttgatacatattcaaaattattttctaaaaacgttttaccgatttatactctaccatcagtgtttaagggggcaatttttatttttaaattaaattaaattatttatgatttcaataggtttttggggagcaggtggtgtttggttatatggacaagttctttagtggtgattctgagatttttggtgcaaccatcacctgagcaggatacatagtacccaatgtgtagtcttttatccctcaccaccctcccaccccaagtccattgtatcattcttatgcctttgcatcctcatagcttagctcccatttaaaagtgagaagtgggatatttggttttccattcctgagttacttcacttagaataatggtctccaactccatctaggttgctgcaaatgccattcttttgttcctttttatggctgagtagtattccatggtgtatatagacactgtattttctttatccacttgttgattgataggcattgggactggttccatatttttgcaattgcaaattgtattgctataaacatgcgtgtgcaagtatctttttcatataatgacttaatttcctctgggtagatactcagtagtgggattgctggatcaaatagtagatctacttttagttatttttttttgagacggagtctcgctctgtggcccaggctggagtgcagtggcgcgatctcggctcactgcaagctccacctccagggttcacgccattctcctgcctcagcctcccgagtggctgggactacaggtgcccgccaccacgcccagctaatttttttttttttttgtatttttagtagagacagggtttcatcgtgttagccagggtggtctcgaactcctgaacttgtgatccgcctgccttggcctctcaaagtgctgggattacaggcgtgagccaccgcacctggcctacttttagttctttaaggaatctctacattgctttccatagttgttgtactagtttacattcccaccagcagtgtaaacggaatttgtccatttcatcttaacacatggacacgtgatagggagcaacacacaccggggcctgtagcaaggagtggggagagggaaagcatccagaagaacagctaatggatgctgggcttaatacctgggtgatgcgctgatctgtgcagcaaaccaacatggcacacatttacctaacaaacctgcacatcctgcacatacaccctagaacttaaaataaaagttgaaggaaaaaaaagtgtttcttaagggagcaatttttaaaaatgttgctgattttctaggagaaaatttcttcttcttgcttttttatcatgtctttaatacctgttcttcataaaattatccaattatatatatctaatttataaatgtatgtttattggtgttattatttgattaatgaatattttccagtataagtgattgtaagggactcttacaaatttcatgaagcaagggactgtgcctctttgttcaacactgatcctagtgcctgtcccatggtaaatgctcagagaatatttactgaatgaatgaatgaacagggaagttaacatgtcttcatatattagacattcaagagagagggaataataaagatctgagctaaaataaaaggaatagaagacataaatcaatagagataattggtaaaaaccaaaatgtgttttttttagaagattaataaaattgataaatgtctaaccagactagtcaaggaagaaaaaagagagaagacacaaattactaatatcaggaatgagaaagtggacatcaatacatatcctacaaactttgaagcataatacaggccaagcatggtggatcatgcctgtaatctgaacactgtgggaggccaaagcaggaggatcacttgaggcaaggagttaaagaccagcctgggcaacatagagcccatctccaccaaaaaaaaaaaaaaaaaaatatatatatatatatatatacacacacacacacatatgtatacacacatacatatatatatatatatacagaaaaatcataaacaagtttatgccaataactatgacaacttagatgaaatggacaaattccttgaaagacacaaactactaaagtttacccaagaataaatagaggctgggcatggtggctcatacctgtaatcccagaactttgggaggcttaggtgggaggattgcttgagtccaggagttctagatcagcctgagtaacatagcaagaccccatctctacaaaaaataaataaattaactgggcatggtggcaagtgcctgtagtcccagctactcgaaaggctgaggcaggagggttgcttgagcccaggaggttgaggcttcagtaagccacgatcacaccactgcactccagcctgggcaacagagtgagactctctccccagaccgaccaaaaacaaaagaatatagtctgaatagatctctatctattaaaagaaatggaatttgcactttaaaaccttcccacagagaagacttcaaacctagttggcttaactggtgaattctaccaaaaatttgaagaaaaactcatactaattctacacaaattattccaaaaaattgaagaagaaagaacaattttcaactcatcctatgaggctatcagtaccctgatacccaaaccagaaaagaaagacataaaaaaagaaaactatacacaaatatttctcatgaaatacctgcaaaagttatttaaacagtttctagcaatcaaatttaacaatatattaaaaagtacaatacatcacaaccaagtgggatttattccaggaattcaaagttggcttaacattcaaaactcaatcaatgtaattcataatattaacatattaaaaagtcaaaaccatatgagccatctcaatagatgcagaaaaggcattggataagatctgacattcattttttctttaaataaactttcagcaaattaggaatgaaggtggccaggcgtggtggctcacgcctgtaatcccagtactttgggaggccgaggcgggcggatcatgaggtcaggagattgagaccatcctggctaacacggtgaaaccccgtctctcctaaaaatagaagaaattagctgggcatggtggcaggcacctgtagtcccagctactcgggaggctgaggcaggagaatggcgtgaacctgggaggcagagcttgcagtgagccgagatcgtgccactgcactccagcctgggcaacagagcaagactccatctcaaaaaaaaaaaaaaacggaatgaaggtaactgcctcaatctgataaagtgcatcagtgaaaaaactatcagctaacatcatacttaatagtgaaagacaatgctttctttatcagatcaggaataaaacagaatgtccactcacaccactgctatttaatattgtactggaagttctagccagtgcaataagacagagaaagatcaataaatggtacctagattgttaaaaaaaaacaccatctttattaacagataacatgatcacctgtgtagaaaatccaatggaatctattaaaaagctactagaactattaatagcaagtgaatttatcaaggttgcaggacacaagatcaatatacaaaaataagttagttttatatacttacaatggaccatcaaaatatgaaatttaaaaaaataccttttcaggctgggcacggtggctcatgcttgtaatcccagcacaatgggagaccaaagcaggtggatcacttgaggtcaggagtttgagacaagcctggccaacatggtgaaagcttgtctctactaaaaatatgaacattagccaggcatggtggcaggtgcctgtaatcctagctacttgggaagctgaggcaggggaattgcttgaacccaggaggcagaggtttcagtgagctgagattgcaccactgcattccagcctgggtgacagagcaagactctgtcaaaaaaaaaaaaaaaaaaaaaaagacaagccactcaataaaaatgggaaaaatatttgaatagaaacttcaccaaagaatatatagagatggcgaagaagcatatgaaaatatattcaacaacattagtcattaggtaaatacaaagtgaagtcatattgagataatcatacccactagaatgactaaaattaccaagtgatgatggggatacggagcaactggaactctcataaattgctggtgggaatgtttaagcagttaagcatacatgtcccatatgactcattcattatgcaaaaggaatgaaagcatatgtccacacaaaaacttgtgcattagtgttcatagctgctttatttgtgatagccccaaactgggaacaggtaaccagcccttcagcaagtgaatggataaacaaattgtggtataatcacatagtgaaatactactctgcaataaaaaggaacaaactattgacacacatatgaatctggatgaatctcaaaataattatgctgaatgaaagaaaccagacaaaaaagaatacatactatatgattacatttatttaaagttccttggggagataaaaaaagaagataaaaaataaaattctagaaaatgcaaactgatttatctggatagaaggtaaatggttatttgggactggagagagtggggaagaatgaattagcaagagacaggaggaaagttttgagagtaatgcatatgcttattattttgattgtggcgatggtttcatggcaggatacatatgcaaaatgcatcagattgtttttcttgagtatgtgcagtttggtttttgtcaattatacctcaaaaaaactaaaaacaagtagaagagactgtattattccaaaatttctatgtcataaaacacaaagagaggctgtggaaatgttctggcccatcactatcctatgggacactctggttgatggaaattctctgtttgcatcatacaatacagtagtcaggagccacacgtggccactgagcacttgagatacagccagtgcaacccagtaactgaatttttgtttcgttttgttttgtttgttagagacaggctcttgctttgttgcccaggctggactgcagtggtacagtcatagctcatagctcactgcaatcaccaactcctgggctcatgagatctcctggcctcagcctccctagtagctgggactacaggcaggtgccaccatgctcagctaacttaaaaaaattatttttctgctgggcacagtggctcacgcctgtaatcctagcactttgagaggccgaggcgagtggattgcctgagttcaggagttcgagaacagcctgggcaacacggtgaaaccccgtctctactaaattacaaaaaattagctgggtgtggtggtgtgtgcctatagttccagctactcgggaggctgaggcaggagaattgcttgaacccgggaggcggagattgcagtgagctgagatcgtgccactgcactccaccctgggcagcagagcgagactctatctcaaaaaaaaaaaaaaattcttttttcagaaatggggtcttgctatgttgctcaggctggtctcaaatttctgggttcaagcaatcctccagcctcagcttcacaaagcattgggattacaagcatgagccaccacccctggctgaattttaattgttatttcattttaatcaattttaatttaaatagacatattaggcagcatggttctagattaagggagactaagcagatatgaaaacgagatacaatctctgaccctagactagatcctgtactggaaggtgaaaaatgctatgaagaacataattaagtcaactgacaaaattagaatatggatggtagattaaatataagtattgtatcaatgtaaacttatgaaatttataaccatactgcagttatgtaagagaatatccctcctcttaggaaacacggactgtttttaagggaaaggaccagaatgtatgtaatgtaccctcacataggtcagagagatgaccaagtaatcacaggaatggggtaaaatgttaacaaaggtgaatctgggtaaagagtatttaagtgtttcttgttttatttttatgtttgtaactttttgtaagcttgaaattgttttcaaagaaaaagattttttaaatgcctttatatatgactatggtattacaattatattgtttataaagactcccagtgttttaaagctacattatgaagcatttatggacaaaataatacaatgtctgggccaggtgtggtggctcactcctgtaatcccagcactttggaaggctgaggcaggtggatcacgagatcaggagttcaagaccagcctggccaagatggtgaaaccccatctccactaaaaatacaaaaattagctgggcacagtggcaggcgcctgtaatcccaactacttgggaggctgaggcaggaggattgcctgaacctgggcggcagaggttgcagtgagccaagattgcgccactgcactccagcctgggtgttagagtgagactccatctcaaaaaaaaaaaaaaaaaaaaaaaaattactcaggcatggtggcatgcactggtaattccagctactcaggaggctgaagcaggagaattgcttgaacctgggaggtggaggttgcagtgagcctagattgcgacattgcgcttccgcctgggcgatggagcgagactctgtctcaaaacaaacaataataataataataataataataataataataacaacaatacaatgtctggggtttgcttcaaagtaatgtgggatcttactatagagagtggggacatagctgaaagccaagcagccatagattgattctcctgaagctgggtgatatgtacatggatttattatactactcagtccatttttgaaattggacattattgtatattttgcttaacatttccataagtttaaattgggaaaaattggcatctcactcaacattttttcctttcaagaatattgtatatctttcccttactcagtttgtttcctctggtatggactgggaactctcatttataccaaattatttgttaggaagattatttatgcagttcaaatgttccttaaaataataaaaaccctcatcaaaacaaagactccttttaagattccatcagtggtcatttatttcaagcaattttaaacaatgtgtccaagttccactatgggaaaatattttgctcagattctgcaataaaagtttctttccatatttaaaaatacttatacaaaaaatacaaaaaaaagaaaaagaacaaaaacaaaaaaataaaaatacacaagtaaaatttcattatgaaaaatttcatgaaatacttttaaaaaaatattttggtttaaattaatgtatccctagagatcacattctctgtgaatcttgaggtaaaaatcctatttatgtgcagctgagcccaatgaggtaaccaggaggtgttttgaactcagagtatttatgcctttcactcctaggccttatttttcccaggatatgattttgtgtcttattgtttggctcattgtttgatgggtttaagtggtttggagtttggctttgggaacgtttaattgttttaattgcttaaattcgataaaacactcagctaaaccattctcagcctgcagtctggcaaataccccatcttcattttagtggctcttacatgaatcaagacaaggaaagcatgttcacaaatttgtttgttgcataaacgttttgtaatatgtcaggaagtttgtctttgcctagcagaagagtccaggtataataataataataatagaagaagaagaaggaaaggaagagagaaagaaagaaaaagaaagaaagaaagaagaaaggaagaaaggaaaggaaggaaggaaggaagggagagagaggaaggaaggaaagaaagaaagaaaagaaaagagggaaagaagaggaggagggaggggggaagagggaagagggggaagggaaagaggaaggagaagggggaggaagggaaagagggaggaggagggaagaaggagaagaaggaaagaaggagaagaagtttctcttaggagaggccatatctctaaacatggaagtagctttattgggagaccccttcatggtgtgactctttgaggtgtgggattttacctgtttgggaaaatgaagactggaaatccctggttttcctatgctagctttattgattggtttgccattcttgtgatttttccttcttgccagagatagactactgtgcctcatctaatcacggatgtcagcacgagtgtgttaacacagatgattcctattcctgccactgcctgaaaggctttaccctgaatccagataagaaaacctgcagaagtaagttacagtgggagttggagaagggcttgttctgctaaatgctcctctagttagttttcctttccgtgcaaatcttaagcaagatgtgcttgtattcagcattgtgtctattaacattattctcccctttattttactttttggctcactagatcctattatgtggatgatttttaaatattgaataggtctggccattagattcaattagccaagtggacccaagctgaagctcccacctatgtgaaatgcaggtgcagtctccctcccccttattcccatagcattggggtcttggaaaaagaaaagaatgggcccagagatgagaggtagaaggagttggtttcttctactcctacaagataagacacttgacggatgctaagagggaggacattgcagctttattccctttgataggaaagaagaagaaaaatgagactctaggacatcccagcaatattcaaggggtacagggtgtcagcgggttgatattgtggatgtactgagtgcctcaaatgcctgtcatctagcacatcaaagggcatgattggggatctgagcacaggccccagagggcacctgcttaagacaaaccattcctgagagactgctagaatggacggcccacaaggacagagacgattatctttttctcgctgctgaattctcaaaagctcaaagagtgcttggcactcatagatgtgcacaatgtttgctgaatgggaatgagtaagtgaatctttctatgatgtatcatcctggagaaattgaagctattttttttttaattcttcaatcttgttagaaagatagccttttttaggcgtgcaagttgtgaattttttttcagaaagtctttccctagttagtccacacttatgcacactgaattgtttggggtctgctgacaatgtcattcgtagaactctctggagcttccattgagggatgtaattttctgtatgttccttcacccatttcttcctgatggtgtgtacagcagtgttctgcctggcaagactgcgttttgaaaggtttcacatatatcttttttgaaaagcaccatgagctatttaactgaatccagatgagtcacattctgctcatagcacagattaactttcatactcattctagcaagtgctaaactgtgtatagtggcagatggttgcaaatcccggattttgaaacggagcctgtcttataaaactattctcactgccttgtgagggtacaaaccctgcacacattcaagcattaaatgaaaattttaatggagagcattcagaatgtgaaaacaattagataagctatttttcataagaccacacatgcctgcaataggtcagagggccaacttttctggtctggccactcctctgtgctatttacaccttttgctaggagtgggtgtgtgagggactggctgcacccaggggaaatcactcccaggtggactcaaatttgcagacccaaagctcttcagtgggcggtgattagatctggttcagctcagatgctcattgcaagcttcctcatgtgttactaatggaggggaaaaaggaaacaagttaggcttggggccatgggcggaggacattttcttgacgttctgcatgtcttaccaaccatctgagtcccttaatttctgctactccctccacacccttcctggagaggcacttggaataagagaagatccaatgcaatgcaggcatcattatcatgggaaggagaagactgagaaaggaagagcgagtagagagggagtgaccgttttggagtggtctgagcgctacagattggtccccaggtgggcctgtttgcaagcaagctgtggccccgaccagagtccctaatgctcatccatgtatattcagtgggtatagcccctctttagccagggttcttactttttcatccaagaaaaatgaaatttgttcctaaaggccagtgtcctcatcagccctcgcccaacgtcccgcctcatcgttacattttccattgtctttgctgtgaacccaaccctgactcctgaggtcagcctgcaggagcggcccctgacttcatgcttgcactcagtccattagggcagacagctgtaaacggaagcgagtgctcactgtctctctggagcattatgtggatgaaggaagccaagaaattgggtttaaaaatctggagtccgttattagaagcctgaggtctcttgagtgatctgagcattacaaatcttcagcccaggatacagccatttacgtttaataggaggttgatggatgtgggtaattttcaaatctaatatgaaatctatttttaaaggaatttgatgtcatcgaaattaaactgggggaaaaaagatcaaggcagaatcctactgaagaaaagattcttggccaggatttgttcttgctcctcatctgggcacaatttctcctcatggagagtgctatcatcagtttaaggcatgaattattaaggcagtagtgcaaagcacagaaactgcgactgccttgcctgcccaggtagagccctagggccaaatcagatgtgggttcatcccctgtgctgggctccaggatccctgattctggtaccatgatgagtgctctcaaaaattggtgtgaagcccacgggttcgactgagccaagagacgtgacgtccaggcttggcaatgtcactcatattggttatgtgaccctgagcagctactttctacttctcaggacctggatttcctaaactgtaggaacaggacttcctgccttaacaccctgttgcctctccagtttttttgaaacttactatctgtgcactcagctggtatcaaaatgtactacctggggtcactgatctttcatggtttcagtcttacctgctcagggctccaactctttcacaagttagcactcagaaagatcgtttgatttgttttctgacagtcctgtcatctgacctcacagagctttagtggacactctgggccttaccagattaagttgtgtccatcctgtgggtgccatgtcagagcacctatcatggtaccagatacaggatgcacagtaggtcctcaataaatatttagtgaatgaataagtgagtgagtgaatatctgagaagcacacacatgaggaaatatgacaaaagggtggtgagaaggcaaagagccactgttaaacgtctgctaaaaagaaccatttggagaaggttttttttttttttttttttccagacagaatctcattctattgcccaggctggagtgcagtggagcaatcttggctcactacaacctctgtctcccaggctcaggtgattgtctcacttcggcctccctagtagctgggactacaggcgtgcaccatcatgcctgactagtttttgtatttttagtagagacggggtttcaccatgttgtccaggctggtctcaaactcctggactcaagtgattctccctcctcagtctcccaaagtgctgggattacaggcatgagccaccacgcccagccgaaaagggtggtatttgaatagctgcctgccagattgctgggtgataacctctttaagaatctaaatggttttcagttgaattatctcatgtgtaaatcattctttaaaaaaaaaatcttgctgggcgcggtgtcacgcctgtaatcccagcactttgggaggccgaggcgggcggatcacaaggtcaggagatcgagaccatcctggctaacacggtgaaaccccgtctctactaaaaaatattaaaaaattagccgggcttggtggcgggcgcctgtagtcccaactactcaggaggctgaggcaggagaatggcgtgaacctgggaggcggagcttgcagtgagccgagatcgtgccactgcactccagcctgggcgacagtgagactctgtctcaaaaaaaaaaaaaaaaaatcttgcttgaaacattatttactaatttattttaattttttaaaaatgtttttctttttatatttttattgtatgtgctgctgaagcgagagcttcagcatatttttttatatttttaaaatttttaaaatttttttttatatttttaaaattgttacaacatagttgtacctctttttggtatttattttttaaaattgacataaaaattgtatacttgtatacaatatgttgttttgcaatacgtaaatataaatttttcttaaagacaacattggcttttttagtgtggcaaaatatatataacataaaatgtaccattttaaccatttttaagtatctagtccagtggtattaagcacattcacattgttgtgcaaccatcaccaccttcaatctccagaacttcttcaccccaaactgagactctatacccattaaacaataattccccagctcctcctcctccatctcctggcagccaccaatctactttttgtctatgaatttgactattctaggtgcctcatataagtggaatcatagaatatttgtccttttgtaaccagcttatattgcttggcataatgtcttcaaggttcattcagttgtaggacgtgtcagaatttccttcctttttaaggctgaataatattccattgtatctatacatcatcctttgtactcatcctttgatagatccctgggttgcttccaccttttgacttttatttattaatgcagctatgaacttgggtgtgtatacccagaaatggaattgctggatcatatggttaattctatatttaattttttgaggaaccgccatgctgttttccacagtggctgaatgctgggttttaaaaagagagttgactaaagatcatttcacctttccctgatggtgtaatggagtgattcctataggcagtagactgcgggcccttcctgttctgtgtttgtctgtctgtctgtgactggtgttttattgccaggcctattttcctccatcaaagctcttggcttgtttcctggcactcagttatggcctgcacaggtgaggctgctgatgagtttcaggtagatgaatagaaactgcacacagctaacaatatcctgcctctcctcacatgggagtgagctccagagagagtgccaagggtcagtgacacagcaaggtgatgtcttttcttctacaccagccctgcatgttgtgaccttctctccatgcactctgtctgcagccattctgctcatactctgggcatgaagcaagctccagccaccagtcacctgggagggcacgtcacggattctttttttttttttttttaattttttaatttttttaaagacggaatctcactctgtcacccaggctggaatacagtggcgcgatcttggctcactgcaacctccatctcctgggttctagcgatcctctcacctcagcttcccaagtagctgggactacagatatgtaccaccatgcctggctgatttttgtattgttagtagaggtgggctttcaccatgttggccaggctggtcttgaactcctgacctcaagtgatccatccgcctcagccttccaaagtgctgggatacaggcatgagccactgtgtccagccagatcctttaagagaccctttgaggggtccttcaggtctgggtcccattcacatttccatttttactagcagtggatcttgatcaagttattaacctcgctaaacccgctaaacctcaattcctcagctttgaaatatggataacaggccaggtgcggtggctcacgcctataatcccagcactttgggaggctgaggcgggtggatcacaaggtcaggagatcgagaccagcctggccaatatggtgaaaccccgtctctactaaatatataaaaattagccgggtgtggtagcgggcacctgtagtcccagctactcaggaggctgaggcaggagaattgcttgaacccaggaggcagaagttgcagtgagccgagatcacgccactgcactccagcctggatgacagagcgagactccgtctcaaaaaaaaaaaaaagaaatatggttaacaatcacacatatcttgcagggtcaaatgaagttatgtttgtaaagtggttggcacagcatctggcattcagcaggtatttaagaaatggcagcagctatgatgctatgattatcatcactaatgtaactatcagactgccactaatagtgagaaaaataaagatggcatggtccctgctcgtggaactcagtctagtgaaagaaacagactttgaagcatcacagatacaaaacatactacataaccattgtgatgaatgctacgaaagagaggtcctgtagaaagaactgacttcatctacgaggtcacaaaagatgacaaaatgatgttgagctgatcgtgaaggaagatagaggttagccagtgcagcaaggagccactgagacaagagggtgatgtgtcatatctttaagtgatttgtggatgtgagcttcgtcaaataacttttgggcagatacatggtaaaaataaaatctagtcattactttatgatttcagatcatttcccctgtatcagttatggtgctttttgttcacacaaaaccggaaatccaattaatggtgttttaagtcagaaggacttttattttttacctgacaagtccaaaggtggttggtcctatggatggctcagtgactcagtgatattatcaagaacccagactctttctgtctttctattctggcaaagtatgttgcatttacattttcatccttgtcacctcttggttacaagatggttgctgcagctaccagcatcatatccttacactacaagactcaaaggcagaaaggacagagagcagagaaaagcatttctctttatacacttttgtctttttttttttttttttttgagacagagtctcactctgttgcccaggctggagtgcagtggcacaatctcagctcactgcaacctctgcctcctgggttcaagcgattctcatgcctcaggctcccaagtagctgggattgcagacgcatgccaccatgcccagctaattttgtttttttgtttgtttgtttttagtagaggtggggtttcaccatgttagccaggctggtcttgaactcctggcctcaagtgatctgcccaccttggccttccaaagtgctgggattacaggcatgagccactgtgcctggccacctttgtcttttcaggaagaaaaatctttcttgagggcccccagtaagcttcttatgtttcattggtcagaactagggcatattcccaccccttgaccaatgactgacaaagaagaacatggttgccacgctggcttagaccagccatgactcatgcttgggggtcatggggtaatggttattggcaagacaaccaacagtgtctgccacatccccagaaaaagaacaatgctgtgcagttaaactgatccagcccagccaatgaggtcggtggtgaccttttcccgcgacaccagtctcataaagcctctccacaagctcattttgtgtccttttccagttctctatcttccctggagcctgctatgtgtggggtcttatggctttagcattttctaccaggaaaggaattgcttattggctcctggttatgacacagtttccatctgctggcagaaacacagcatggatagagtgaccttaccataggacagaattgcagtagcctggggcagcatcagagatacgcctcctccagtcccatgatactatgccagcgtggtctcaacagagcaaggcgaagcatttagatccttcttcatgaaactgccaacccctgcatccctaaatagctggatattttgcaagatcaccttttgtttattttgccttgtgccgtccaatgtcactgtcagatgtcactgtagacagaagctctctacatgctttgagcccaagtgatcaggttaacctgagagagatactggattttcttagcttttccatctttcttggaaggaggtaggctggggagcgtggctctcaccccagctctcagctctttggccactgactcagttcagctcagctcaactgagccttggcttgctctttggccatcaaagagggaaaatgctggagaatccacaggtatacttcaggtgccaggccctcttttaaacaagctcctggagagcaggagctattttctctgtgtcctgtagctcaccttgtttcctgaagatttagtgaagtttgcctgcctttccacctctactgcaaagtcttcttcaagacataaccctggccttgtcacctccaccaacattctcacctctagtcacctgtttagagccttcactgatccatcctggggcttgcaaagcccgcacgtccagtcatgctcaggtgggccagctccctctgcctcccagcctcatctctctcctcacactccagccatactcagctcctcacagctccccaggcatgcccctcgccctcatccccaggcatttgtgttcactgtcccctcatccctgggcgtttgtgttcactgtcccctcatccccgggcatttgtgttcactgtcccctcatccccaggcatttgtgttcactgttccctcatccccaagcacttgtgttttttgtctcctcaccctcaggtgtttgcgtttgctgtcctcgagtcctcatgttcttcttcctgttgagctcccttacctatggaactcctcctcctccctggggcctcctgttggccttatctcttcttggaagaccctctcaccccaggactcagtgaggcccctgctctgtgctctgcattgtcttttagttgctgtccttgtctgactcctcaccagagcctgaacccattgaggcagggcctccatctcagtcgtcattaaatctctgaatctagctcaaggcctggcacttggctggcagacaaacgaatgaatgatccgtcccggcttgcctcagcaggcagcacccaccagccctctccatgggggctcatgggagccccgaggggctgccatcagccctgggagaggtccagagtctgaaggaaggtctgcccttcttcccctcagggatcaactactgtgcactgaacaaaccgggctgtgagcatgagtgcgtcaacatggaggagagctactactgccgctgccaccgtggctacactctggaccccaatggcaaaacctgcagccgtgagtgtaccctaggggtggggtgctgatggaaggtggggtccactcatgggggcgggcgggttcactagcaaccagttgtttctggagcccaccgggtttcctgatggtctgtcaggtgtatccttccttatcctcagtttcatcacccatagaatgtgactattaatactatcggcctagccaacttgggttgcaaggattaaaagaattaataggaataggctgggcgcggtggctcacgcctgtaatcccagcacagggaggccaaggcgggcagatcacctgaggtcaggagttcaagaccagcctggccaacatggtgaaatcctatctctactaaaaatacaaaaaattagctgggtgtggtggtgggtgcctataatcccagctactcaggaggctgaagcaggagaattactcgaacctaggaggcagaggtgcagtgagctgagattgcgccattgcactccaacctgggcgacaaagcaaaacttcatctcaaaaaaaaaaaaaaagaataggagtaaaatacttagaacagcactgctaggcataagcactcaataaatgttaactaatattagtatttgctgttaagtgtatttactaggtcagacaggtctaatttcaaatccaacctctcccacctactagatgtgtgtgaacttgggcaagttatttaacttctccatgctttgatttcccatctatgacaaaaagcaaaactaatagtcgtattattcccacagggtttttatagggagaaataggagccattttgatatgttagcctggtgcctggcacagggtaaacttccaatcaaggggaactgttcctatcatggagcctgtgagaggggccagtgcctggcgccagactgggacaagaggccggaggggacagaccttggaaagcaatgggctgcagaggctgatctgagagcagaatcaagaaacatgggattttctgagaaggcttgtcttaattttcttgtgtcagagccacaacaaagctccactgggtgatgtaaatgtatgggaacttgcaagctctgccagctgggcggctccatggttttttatgaggcaccatctccacaggtcctggccagcaggataggagcgcctgagtgtggtgatggaccctatgcccttggcatgcgggagagggggcccatctccatgacatggcctatgcagaaggggccctttatgtgcctttccactcagcaagccccacatctgctccctttggagaaagagatagattgtgagtgaggacagtgcagctgttgagccctgggctccacgctgccagcagggaagtttcccagatgaaataagaggtccagggcagtcctcaggaaagcgtggctcctctagtgtccagagagaacaaagtgcccggtaaaggctttctaaggactgatctcagaggccaaagggcttttgaactggaaagtggtgccaaagtcagtgcctgctgtacgttgcctctgcatgtctctgagtccttttgagaggccagcgggaagcgggtctcccattcaacaggagatgccctggtgaccatggatctgtgtgtatcctgcctgtttcccggagtgtcaggtctgccagctgatggccctggcaattttcccagggcaggtggtcctgacctggctgagcccacgcagatcaccagggacatggcttgactgcccctcccagcatgcttccgggggccagaagagctctaagaacggaccacaagagatcgggaccctcccttctctctgggatctagtcaactctaagaaagtacaaaccaagctgtttctgtctcgcagtccttagagaaagccacaggcttctgctttctcagaggaatcagggagcccaggccataaagacagcaagcaattctgaggcgctcactctgtgcaggcaatgccctgagcacttcccatgcataaactccctgcatcctcacagccgccctactgggcacccacattcttgtcgctatttaaacaagggcaaactgtgacacaaagggattaagtcactgtcctggggtcctgtgattaacaaatggcaacactaggatgtgaacacaggcatgtagctcccaagatccagcaagtgttcgcaggagatgcatccaccagtggaatgttctggaaggcactggtcccagactctgcgggagtcaagaggcccacttggcagacctgcaccaggcctccagtgtctgtccagtctctggaggtgcattttctccataagggaaacctgggaagcagcctgcagggctgttagtgggagctgttcaccacagctgtgtgttcattagccttcggcacttgctgcccggaggaccagctgtgcagcattcggatgccaggataggccacacatgcagtcccaggctttggtttgttttttaatctggatgtcctgataatgggggtaaaaaaaatagaaattgatttcatggagaatgacaactctttttcattttcaattagaaatgaaactatatgactaattcttactcagcactacttgataataatagtgtgttcattaagtggttgctgtatgctagctactgttctgagcgctttacataatcaacccctcttattctcaccctattcctataagaaagcaaccatcaacatccacattcacaaatcaggaaacgatggcaaagaggccgtgggactgcccagcatccatagctaggaagtggcagaggtgtgatttgaacccaggtagtttgatgccagaacctgcattctaagcactactctattagctgtgtggctttgatcttgaccttcctgagcctcactttcctctctgtgaaatgggaattgcacctgctctcagaggtgccctgagactgtggattctgtgcgccatggccctggcagagtgctgctgtcgtcaacaccagggacagcattccccagccattggagttgtatgctttaaccttcaaagaaagaaatgggaaagaaggctgggcatggtgtcaggcacctgtaaccccagctagctactctggaggctggggcaggagaatcgcttgaatccaggaggtggaggttgcagtgagccgagatctcgccactgcactccagcctgggtgaaaagggaaagaaaaccaacaagccaggctgattttctagagggatcagtgatgtggggtagaatgacaccttccctgtggcttgttatgcctccggttttgtttttgaatcttggttgctggtggggtattgccccctcggctcctctatgctttcgcgtgtgtgaaaatgcaggagtggaccactgtgcacagcaggaccatggctgtgagcagctgtgtctgaacacggaggattccttcgtctgccagtgctcagaaggcttcctcatcaacgaggacctcaagacctgctcccgtgagtccctccgcgctcctctcataggggaaggtttgcaccaggagtgaaacctatgtgactgcagagggcacaggttgtacttgggcacccctcccctgccccttgctctgctccaggagatagtgaggatgtccactgggactgcatgccttcgagggagggcggggtgagcatgacggtcacttgatccaatcactgtcgcccagaggtctcactgataaagggctgcctggcttttggttttgcaggggtggattactgcctgctgagtgaccatggttgtgaatactcctgtgtcaacatggacagatcctttgcctgtcagtgtcctgagggacacgtgctccgcagcgatgggaagacgtgtgcaagtaagtgtctgaaggacaagcaggacctgcacaggtgttccgtgggtgccggtgtgggtgcgctgccgacgtgtatatgtgcctgtgtgtcctgtctccaggctttgctgggcctgcatgaatgtgtgtgacagcatctcttagccattgagccttggtggctgcttcaccaactcccctcaatcttccttcccccgtgccctgaagtggctttttgctgtttccacctccctgtcattctgaagctggacagagcccttgtcctcagctctctctgctctacccccagccagctagtatggcacatgaataataataatgtggacccctcactgactgctagctgcatgctgggcactgtgctaagcacacatgctgttgcattcaggggacagatgaggaaaaactgtagctcagattaagtaaagagcctaaggtcaccagctagtgagtggtgggttcaaactctgctggctgtgattccaaagtcagtcctgggagaagaggatgctcctgagaaacgctttgccctgctttctgaccccggtgatctcacagcacatggtgaggctggcagtgatgtgtcctgggtacatatttccttgcagctggtcccaaatcttgtctcaattaaaaaaaaaaaaaattgctcccagacctccttctctcctttactgaagaatgctggtgtgtttgttgccctgaaatcctgtttcgaagtggaccaagataaagaatcgaaatatggtcattttgagagaaggaatcagaaatgaaagaaaaggaccaccatttatcttccccagcctgctggtctttctggttatagggccaagttccctgaccactggtataattgtaggcacaacctaatttatccactttttatatcatctattcatctaggcagatgagctggctgcacagctgggcgtgcctctctatgctgcctgtgagaaaatatttccagtttgggacagatccttggatcttagcaaatgggttatccatgttatagctttcggtggctccctgcccagctgcctcccagactgctgctgcagccagctcagggagggatcgggcacagggggtgcagaaagagggtgggtgtgttgaattgcatcgacattgacagcatgccaaagccagatgtaaggggtttgttggtttgtttaattctccatcattttagattattctgagaataagaggagtcattcttctgtccacctcgttcctgtaataatcaagaactgactacaagatggttgtaggaccctacgaaattctcatgagcccttctaaacaaatgcagctccatctcctttgaatcaggtgccccttcctctcccctgcccaggtccacatctggattttgacctgaccacttttaagtgttgcccattttctcatttaaagtgggtttctaaccaatggcacagtggaaccatctacatgagtaaatgtccaacaatgcaatgaatagtgaattttgttatttatatgtggttgtatctagatgagaacttgtgagatagtcagataagtgagaattgtcctcaggaaccgtataggagagatgcatttcacccaccagctgatacatatgcattgagctattcccctaattgaagactttctgcctgtcccagaatgattcattctgactgtcctgtcctgtaataatgggctaggttttcagcgtggccacagctaactgggggttgggatgtgtgttccccagctctactctcaatgacaaagggccagacgacatgactgcacctatttggtaaagccttttggggggcagtcaggcctggctcagcagataagagtgtccttggctctttatagaggcagcctccacttagagctttgatagcaagtggtcttaagaatgtgtcactcaccttctggaaagttctctgaagtgtggaggggttccaggggccctgggatgagatgggcactgctgtgcccctacctcttcaggcaccttgggttctctggcctctggagcgatgtcccctcccttcctccagccccctgaccgcaagctctgctttcccagattttccccagaggcctttttgcctcgggcagttagatgcacagactcagggtgtggggggtcggggaggggatggggcgatctcttttaccagctgcagctgagcagactccttccctctctagacgtttccctgagattgaccttgtgcaagggcatcccagcaccaagaaagactctataggcctgatgtgcatggaccacactgcccactggcctgcaagctgctggaggttggaggtcagaggccaacatgaaatgactgggagcgtgaatggacagaggccacctgtctttttgccccacggcccctggcacagggtccgctccccgcttgataaccttcagtggctctccactgtctcccagaataaatttccattgcactccttgatttggcagagtgcagaaccccctcttccacttctttagcctcaccccaggccctccctgaagccgcctcctgttctttagccaaagtggcaagtcccccattctctgaacaggcctggtgccttccagcccatcccaatgtcacccccatgggtaacctcctctcccacctgataggctctcctctcctcctcccaccccaggctctgctggggcctctctgcagagctctcctgcccagcctcaccctggggctctctgtgcacatgtctgagaaacagtgtggcagagcagaaagagtactgaactggaagcccaaagactgggtttaaatcgtgtcgcttctaccctaggcaagggaattggccctcttggggtctgactgctcatctctaaactgagaatggtcgttgctgcctttcaaggccactgtgtggttcagggagactgctgttgcagtgctatgtgaacttgtggactgccgtgacccctaaggaattcctcttcctctctcccctcccagcatcagaaccccctgcactgaggagactcagaaggtattgctgcctggaaacccatctgccagggccaggcctgctctccttggaggggccccagagacacacaactctggaagtgggctggactcaggagtccaagggctgtcctatgagggaccctcccttctgcaagcggaggacaccaacggggatcagagccgtcagcctagggcactgggggatctctgctggtgatactcccagtccaactaccacaggcagatctgcgagggcctgttaggctgcctgaggccctgagcttggccttccagggctgaggcaggcctaggcgaggctaggggagtgtcttagtctactcgggctcccatcacaaaataccatagactgaatgttgtttcttaaccacagaaatttctttctcacagttctggaggctggaagtccaggatccaggtgctggcatggctgggttctggtgagggccctcttcttggtttgcagacagccagcacccagctgtgtcctcatattgcatgggttgtagggggtgagagagcaaaagagtgcaggcaagttctctggtgtctcttcttataagaacactaatcctatcaggtcaggatcctgccctcacaaccccatctaaacctaattacctcccaaagactccacctctgaataccctcacatcagggttagggattcagatgtaaattttgggggaaacagtctgtagcagggagtagggggaggggaccaccctcactctcatgtattcacattacaggcttgatgcaacagaaggaaactagagattttcccttattttgtgggaaacggacacatggaggaaagtgatgcctccaagctggccctggtcggggagtcagtggcagagccaggaccagagccgagtcccctgattttaggatcttttgcccagtgtgagatgccctggaaaagcacatctcagttcagctgcttcttggtttgtctgagaaaaagcctatattaagttagcaaaggattggctgctgctagttttattacgagaaaagccaggaagcagtgtaattctatctgtcggcttctggttactgtcttggcagatggccactgtggctttctctctctggggttggggttggttttaacaacgtcttatgtggagccccagacgcaggattgctgtctgtcatcacggcagaggtgcaagtccacagaacacgttgccccactgttgctgcgccacagacttacgtgactcacctgtgtcagcgtgcagggctgctagacagggaccctaaagacccgtgctacatcctaaaacttctaatcatcctgagcacacgctgcagaatccattcacgatgagggtttaattaaacacataggcctgggtccttatgtgtaaaaggaggagaatccttctttgagaggaaaaatgttttctttctccctcttgagatttcttacatcctcccacctatttcacttaagtgatggctcctaatggagtctgtctttactctcctctctgggtttgaatctaggtacttccttaagcgcttggttcctttaccctcgttctctacaaatatttactgtgtacctgcattgtgcggggtgctggggatctctggggttgatgcagattcggtttgtgccctgacagtgtttaaagcttctcggggaagaaggatagcagagacagcgtccattccttatggtgagagtggtgatgtgagaaggatggagccgtgggagcaccccctagtctagagaaagagaagtttaatccaacacccagaggagggggctgtgggagcctcccctagtctagagaaagatgtttaatccgacacccagagagtgagtacagtgagccagccagagatggaggggaaatgcttcactaggggccagagagcgaactgcaggaagttctgtgctctgagtacggggtactgaatgcaagagggaggcggtgggtgagaaacgagcctggggacgccggcgggacacatcacccacctacagccttcagagacttcctggctggcctctcttgagaaaatgatttttgtctagtttgtcttctgagaatctgccaggctgcctcagcacactcccttaagctaggatgatctgtggatgtgcagctggaccagggacacggaggtctatttgaatatagtcccatctctgcccccaggacagctaagaccagtcacctctgaaggttcagggacattgggaaagtcacttcccctctgaccatcagttttctcatctttaatgaaggggttggactagttcatatccaatgagttgaacttccagcacccaaacaaggatattgcctggctcagataagtgctccgtaaacacttgctgaatgaatggacttactgtggtgcccaccatagtctcccaggctgaagacacccagtggtactgagtcaggggtggtggctctgtttgcctgttaggggaccactgaagcattttcctataggggagtatctttgccctgggtagaaactgactccaagttggtttccagacttggtggatagaaagctagcgcctatggtcaggaggttaactatcatccacctttggcattctctaatttcccatccacggttctttgaatttataagtggcccagaacatccctgaagggcagaaactggacattttgctgaacaaatgtgagtcgtgcattttgcaaggtgggtgtgtgggagagagtgggaagcctagctggccacaaacatccacacatcccatggggttcttatttaaaacatctgcacaaaacccctgtgaggtggatctaattaccctcaattttcagaatagcaaactgaggaaatgtttccttttgttcaacaggtctttcctagggatctgttaggtgccaggcattatggccactgccaacatctcacctctgatgattcgttgaaatcatctatggggctaggaaaaagtctaaaggcccaggcagcatcccagaaaccctgaatcagaaacagaaacagagactgtcttacattgttggtgagagtagagattgaaataatctctttggaggatgacttggaaatatttatctgcctttaagtattcataccctttacctaggcaattctgcttctggatgtgtaactttcaggtatgccttcacattgtacataaaactacatgcacaagaatatccattgcagataaggtgtggtggctcatgcctgtaatcccagcactttgggaggctgaagcgggaggatcacttgaggccagaaatttaagaccagcctgggcaacatagtgggaccccatctcaacaaaaaatatgaaaattagctaagcatggtggcatgcacctgtagtcccagctactcaggaggctaaggtgggaggatcacatgagcccaagagccaaggctgcagtgaactgcgatgacaccactgcactccagcctgggcgacagagcaagcctgtgtctcaaaaaaaagaaaaaaaagagccttagctgaagctaggaggacaggactgggcacaagggaagctccaggaaggaagggcttaggggtctgtctggattatggcttgacaaggttgacgtgaaagagctatagctattttattaccatggaaaatggagtagtagtagtattataaattcacggtagggggaaaaaaaaacacctcacctccatggccatccagttgtctatatcatggatcactcaactctactttccactcttacaccatgtgaggaactatcccaaaccatcaggaaatgttctgcattaatagtgagtctagaatttgctgagaaaagcaagtcatgctcagggcaaacaggagggtccaactcggctttgagcctcctctgcagctgtaattgcagttatcaaacttttcccattcttcaaagattttggcagtgcttctccccaaagaaattcccttcacatttgaaagcttgctgtagaatatagcaatgtagtatagtcagaaaatacggggatttatttataagattacaatttttgtctggttctttctcttgttaacaattggtcttgacaagccatcagccttcccaacccttagtttccctagctggtgagtgagaataacaacagctgccttaactaacccaaaggtggttctgaggagtcctctccagagagatactgcaaagatgctttaccaaaaaaagtgtgtggtttgtgcctgattataaaggtcattatgtgctttggggcctttatttaataattccgattcatgtccattttagaaattctactcaatctgaaaggattgagttaactttcagaaatatgtagggttcttataaaaagtcaccactcacctatcctcagtattaagcttttaaagtaacagcctggttttcacaggttcacaaaccttctagtcccccagaagccacccagccctgtaagatggcaatgccatccttcagttgctcagtccagcaacctgggagtcttccttgactcttctgtcctatccatatgggctctttgtattaatccatgaacaaattttatagattctaccttaaaatacagccagtctgaccacttctcaccagcctggtctgggccaccaagatctttgcacagggctgctcccaggtgtccaagctccattctgtgcagagcgatcctttaaaaacaaacccatatcatgccactccactgctcaaaacactgcagtgactgcccttctctttcagatctgacccccactgtgaaccccacatggtctgccccagccaaccttgctggcctcatcccctgccaggctcccggatgctccagtcacagtggtctccttgcctttcctgaaacacaccaaccaagcagctcccgttgctgcagtttgcaaatgctgttctttcttgctgataatgctctttcccagacaccaccactcacttcctgtctttctgcagggctctgctcagtgtcaccatatctgacacaccatataatataacaagccctccctactctccagcccagtagccactctccatccttctatcctgctcttcctccatagcactttttcccacatgacatatcacatatttgtctgttttccacgcatccctcttctcctgacacctgctgccaaatgtaagcttcacaaaagcagaaactttgtttcgttcattgctatatccccagagtctaaaacagtgcctggctcattgcagggactcacaaaatatttgtgaactgactgaatacatgaatgaattggttacctaagtgtaatatatacatacatacataagtagatatgtaaataagttgatattatagttacataatagccagttaggttaatcttattttctaatatttacaagtaatttatctctcattctgtaacttgtattctcatgttttttgttcatttttcttgtggagatgatttatattgtttgatttttatgtgccatgtgtatattaagaatttttgctcactttgggagtccgaggtgggtggattgcttgagcccaggaattcgagaccagcctgggcaacatggtgaaatcccgtctccacaaaaaattagcctggtgtggtggtgcacgcttgtagtcccagctatctgggaggctgagatgggaggatcacttgagcccgggaggcagaggctgcagtgagttgagatcacgccaccacactccagcctggatgacagagtgagaccctttctcaaaaaagaatttttgctcatagacatgctttatattctgaaatgtgtactgtaggataaggcactgttttaattcaaagtgtctgaaatgtcttttatgattgaataagccactaatatatgagtcattttcttcttctgtttctctaattcccatttgattctcagaattggactcttgtgctctgggggaccacggttgtgaacattcgtgtgtaagcagtgaagattcgtttgtgtgccagtgctttgaaggttatatactccgtgaagatggaaaaacctgcagaagtaagtttgtactggagctggctcctactactatgccagaccactgtgtgaaatcgctatccttatctctgtatatatcagttcctctcagaagtcaatgccacacagcaaaatgtaatgtagtgtcctggataggaccctgaaagagaaaatggacattagggaaaaaataagtaaatgtcaataaaatatagactttagttaataatcatgtatcagtatgggtttatcaataataacaaatggaccatactcatgtgagttgttaataatagggaaaactaggtgtggggtatattgcaattctttgcgctatcttctcaatttttgcgtaaatctaaaactgtcctaaataataaagtctattaaaaaaatggacaaacaaaaaaagtcaatgccagagctactactgaagttcttcacttatatgctctgtggcaagaaacagtggtttggcagtatactctagtggaaagatggacagtcagaaatccaagattcagtcaacctctgtctctgccatttattagctgggaaagttgcctaacttctctaagcctctctgcttatttatctttaataatgttgttgttgttatttctggtagcacaaatccctcccaaagggcaccttgtgatgaagccagttttgcctttcagaaggcaaagcctcttagatggggctgcagccagccagcccaggacaagcagccttagagtgaattgctggtgtaaatctcaagacacatctctgaataatcaaaggggagtgtgtgaccctggtttccatccatatcagttatctttttctcaacgtctcaaagcactttataaagagcaactcatgttgacacttttggaagaaaagatgggtaactggaataattactctctcattttttggacagcacagctaagactccaagaagttaagtgattctcctaagtcatacactatgttaggcacaaagccaaagttagatttcagtgctgctaatctaaattgaggtttaatctcctaaggaatcatatcaagtgtttccattctgatatcagaaactatgtctacagaaagttgatgatggactgcattttaacactaaagtagtgctggtgaacgatgatggtgaagacagtgaaacagtttgaagggttagcccgaattagagccgctaaactttgttctcaattgtaacttcctgccccatggaccactgagctcaggtggcagatagaatccagtagctgactccagtggatgggtcctccaaggtgaagtccatgtgaaatgtatgttgttgaaattgttgtaacttgctctcctgtcttcagggaaagatgtctgccaagctatagaccatggctgtgaacacatttgtgtgaacagtgacgactcatacacgtgcgagtgcttggagggattccggctcgctgaggatgggaaacgctgccgaagtaagtagcctcgaggtggagaagaacttttccctctgtggactcagacagttagagaagttcatttaatccttaaagtcctcctttattaccactgtcacaagtgtcagttcctgccttgggtgctctgaaagtgtttagctagagatcagttcagtagccccttgctttttcgggaatttctcagtcaaggcctgagttttgggttctttgcttctcttcattttctgccagccatcagccctttccacagtagctgtgtgggtgcccggaaactcgcacagtgctagtcactggactgaattagaacctctgccagcaatcactacaaggactgaaggttaattacagagctttctcctcttggcagaccgtaaaagtaagggcaaagggtgaaagggtgtattcgtccattttcacactgccgataaagacatacccgagactgggcaatttacaaaagaaagaggtttgatggactcacagttccacttggctggagaggcctcaaaatcatggcagaaggtgacgggcacatctcacatggtggcagacaagagaagagaacttgtgcagggaaaccccctttataaaaccatcagatcttgtggagacttattcacaatcagaatagcacaggaaagccccgtccccatgattcaattacctcccaccaggtgcctcccacaacacgtgggaattgtgggaactacaattcaagatgacatttgggtgggacacagccaaaccatatcagagggatttcctgtgggttttttctattatttttatcatttgcttctataggtcacccagaacaggctctgagagtttcgttagaaggtgtattccccagagttctccagagaaacagaccttctctatgtatatcttcatcttctattatatataaatataatagaagacatatatataatatatatatgtcttctatggtctgttctatcttctatttatatatatcatagaagatatatatatatatacacacacatatatatgtgtgtgatgtatatatgtatactatggtctgtttctatcttctattaatatatcatctccacaggaaaaatggacatacacacacacacacacaaacacacatatattgtgagggaggaaaagattggttgattttaagggattggctcacacaattgtcaggggctggcaagttctaaatctgtagggcagcctggagacccaggcaagagctgatgctgcagcccaagtctgaaggcagtctggatgcagaattcccttttcctctgaggacctcagtctttttctctttaggccttcaagtgattggatgaggcccatctacattatagagggtgatctgatctgcttcactcaaagtctactgattaaatgttaattgcatctaaaaattagctcacagcatcatttagactggtgtttgaccaaacaactgggcactatagcctagccaaagtgacacatcaaattaaccttcacagtacccaaaggaacagagggatgtcatacgagctcagtgaggtgggcattaggagagtacagagcagggatttttccccaccatgagattctgagctggtaattccctattttggggggaggggtggttgacaaagtctacttgcttttgtgacactttgccccagtgggcaaaataaccctttttcaattaagtcaaaataagttcagttgctttgaggttgatttttgggaatttcctcacagactcctttgagataactggggatattccacaagccaacaaggctgggttggagggatctcaatacctcgcttcttcctccaggaagagggactcctacctttagcaagaagttctgtgtgaatgactgacacctaggatgcctgtggtaccctggcctaactctgcagggattcccctcacaactgcaggtccagcttcacactgcagtggccctcttgtggagattttgtctataattctgcccattgtgcctgtctgcactgcttgttcatgcttttctttttgtttgtttttgttttgagacagggtctcactctgtcacccaggctggagtgcagtggcactatcttagctcactgtaatctccacctcctgggctcaagcgatcttcccacctcagcctcctgagtagctgggactacaagcgtgcaccaccacacccggttaatttttgtattttttgtagagacatggtttcaccatgttgcccaggctggtcttgaacacctgagctcaagaaatctgcctgcctcggcctcccaaagtgttgggattacaggtgtgaaccaccatgcccagccctcatgcttttctttctgcaaacatctgcacactcacacacacactgtttattcattcaacacatttattgctcagtaaattgaacacaaggtacaacttctacctctggaatttgatcctaaatcagatttcaccattcctgcttcctagagggatgtgttctcactgattccaattttgtgtgaagcctctccttttaaggggtaatgacaggaaagagccataggctctcatgctatggaggagcactcgggagacagctgtgtcatcaacctgccagatgaccgtgggcagcagtgaagctctctgagtatctaattcttcattgataccttgagaataattatccctgtcttccttgtctcacagggtgttgtgagggttaaagggctgtaagtacttcgaagagtttaaattacctcacacatgagaaatgttcattagacaatctgaactggagtgtttgggatgtctgtggcaaaagaaattagaagctaaagcacatctaataataggatagtaagtcaaggacacctaatcacccatcgtaccattcagactcatgggagctagagctttctgagaggagctttttccccatcctgagtatgagactgcaaaagacattatgaaggaggtttgaagagaggtgtgttttctttaaaagagattacttccacaatctctactcacatgactattcaattcacctcatttctacactgatgggattgttcaactccctacattttcctcagggaaggatgtctgcaaatcaacccaccatggctgcgaacacatttgtgttaataatgggaattcctacatctgcaaatgctcagagggatttgttctagctgaggacggaagacggtgcaagagtaagtgatctgaacttggctctctgctttaattttgttttggagcaactgctttttggagtattttcaggcaacaaatccctcacctctgcttctcccataaatataaatgcatatgcacaaatacagaatggggaagagagggcttaactgcagcacctgtgaaaacactttcggttttaattgacagtaaattcattatcagccaagaggctagggtgatcgtaggctgaacagcaatgtctgcatgagggaggtggagagagctgtgctctgctctgtgctggagaattacattcagttctgggcatggtactttaggaaaaaagagatggatcaacagtttaaacataaaaaaaaaaaaaacacaaaagagcaaaaggagtcttgagagaattattttttaatctgagagtagagaagatctttctaaacatgacatgaaatttaaaagccataaaagaaaaacaaaggaaaatatctagtaagagagtaaagctgtgatacctttttttaacctattagttaacctattagttaccagagatcaaaaagtttgattccttatgttggcaaaggtatattgtagtagggaattataaatggatcagtgagtgtctgaattggtataacctttcagagggcaatttggcaatgttatcaatccagttctagaagtttatcttacagatacgtgcatgtttacaaagccatgtatacaaggatattttatacagcactatttgtagcagcaaaaaactggaaacaagctaaatgatcacccatgagcctggctgaataaattaaggcacatctatgtaataaaacatgatgcagctgttaaaacaacaagcagctctggatgtatccccaagatattttaagagaaaaaagcatggtgctgaatgttttttatagtatgttaccatcgatatattttgtaaaacactctaacatacagtctctctttctctatatatnnnnnnnnnnnnnnnnnnnnnnnnnnnnnnnnnnnnnnnnnnnnnnnnnnnnnnnnnnnnnnnnnnnnnnnnnnnnnnnnnnnnnnnnnnnnnnnnnnnnnnnnnnnnnnnncacacacacatacacacaccctttttctaatatttaagttttgttccaaatgcatgtattattttttagaaaaaaataagataaacacgatttagaaagaattaagcagcatgatcttgtgaggaagttcagtattatgttaagcagaaaaaaattaggaaactggggatctttgtagaaaaaaattttgaggtaccaaataccaatgtgactgtcatctcactcatgatttgtatgatacccccaccccaccccaccctaccctggaaagaaaggacacttggagaagctacagcttagcacgaggacaaagaagctttctaccagggaagctgcatgcctaattagttcagagcataagcttcagctcagacagatctggatttgaaccctgattcatactacccgtgtgaccttggtcaaattatttaatctcggccgggcgctatggctaacgcctgtaatcccagcactttgggaggccaagacgggcagatcacctgagatcaggagttcgagaccagcctggccaacatgacaaaactctgtctctactaaaaatataaaaattagccaggcgtggtggcacgcatctataatcccagctactcaagaggctgaggcaggagaattgcttgaacctgggaggcggaggttgcagtgagctgagattgctccactgctctctagcctgggcaacagaggaagactccgtctcaaaataaataaataaataaaataaataaaatacaaaaattagccgggtgtggtggcatgcacctataatcccagctacttgagaggctgaggccaggagatggaagttgcagtgggccgagatcgtgccactgcactccagccagggtgacagagcaaggctctgtctcaaaaaaacaaataaacaaacaaaaattatataaactctttgagtcccagtttccccatctataaaataaggataataactcacaaagccatcacaaggaatacattagatcgtgtatccaaaggtgctgaacagccgggtgttgtggctcacacctgtaatcccagcaccttgggaagctgtggtgggaggattgcttgagctcaggagttcaagaccagcctgggcaacatggtgaaaccctgtctctacaaaaattagaaaaattagctggttgtggtggtacgtggctgtggtcccagctactagggaggctgaggtgggaggatcacctgagtgcaggaggttgaggctacagtgagttgtgattgtgccacttcactctagcctgggtgacacagcaagaccttgtctcaaaaaaaatttttttaataaaaaataaataaaggtgttgagcccagtgctcacacacactaagtgctcaaaaaatgatcactattacgattcacaatagtaaagacatggaatcaacccaaaatgcccatcaatgatagactggataaagaaaatgtgatacatatacaccatggaatactatgcggccataaaaagaaatgaggtcatgtcctttgcagggacatggatggaactggaagccattatcctcagcaaactaacacagaaacagaaaaccaaacactgcatgttctcagttataagtgggagctgaacaatgagaacacatggacacagggaggggaacaacacacaccggggcctgttgggggtagtcgggagtgagaacatcaagataaaaagctaatgcatgtggggcttaatacctaagtgatgggctgataggtgcggcaaaccaccatggcacacatttgcctatgtaacaaacctgcacgtcctgcagatgtatcctagagcttaaaataaaattaaatttaaaaaacaacagacaggccaggtgtggtggctcatgcctttaatcccggcaccttgagaggccgaagcgggcggatcacctgaggtcaggagttcaagaccagcctggccaacatggagaaaccctgtctctactaaaaatacaaaaagtgtccaggtatggtagcgtgtgcctgtggctctagctacttgggaggctgagacaggagaatcacttgaacccaggaggtggaggcagcagtgagccaagatcgcaccactgcactccagcctgggcgagagagcgagatgccatctcaaacaacaacaacaacaacaacaaacaaacaaaatgatcactattgtaatcatcaacagcagaggtgtccaaagatggggctttcgtggtaaggtgacaaattcctcatcaggagaggcattgaggcccaggccgaatggtcactgggtgaggatgctgtaaagaggatgtaagcaacagcagggctggagtagatgatctttaaagggcttatccatgcctgaagttctagaactttctgaaaattacgttctgaaagcaagtcacagctccattccagtcttatcaacttaactaccaaaaagaaaatgcccaagaaaagtgggaattaacctctggcaaaaaaatagtctaataagtggggctgtccttcctgtgtctgaaagcaaatacctgggccctgctctccctgatgcttttccactctactttgttttgtgtttcctggagaagccttctggatgccattctatgtgtgggggttgcaagtgctagttttgttctgtaagaaaaatgtgtacagaaaggaggagaaaacagactcactgctggaaaattatttcagtatttttgaaatctgctgaagagccacatgcatgctgcctgagtctttttttggttcactcaggaacagactatgaatgtaaatgaagctttgagttggccttttcctctttcactaataaaagatcgataggttgagtgatgaggaaaagcacttaatggagaaacagaagaacccaatcccccaacatgtgcgcactcacgcacacacacacacacacaccacacacactatgacgttaagcattttatactggccaggcatagaaatggttttgcatgtgtgtgtctctacatgcttatattgttgtgcctcacttttaaagattagacagctgcttgatatataaaacagaatgtttatcacagattgtggattgtttgaaatgagatcatctggcccagcacggtggctcacgcctgtaatcccaacattttggaggccgaggtgggtggatcacaaggtcaggagttcgaaatcagcttggccaagatggtgaaaccccgtctctactaaaaatacaaaaattagccaggcatggtggcatgtgcctgtaatcccagctacttgggaggctgaggcaggagaatcgcttgaacctgggaggcagaagttgcagtaagccaagatcgcgccattgtactccagcctgggcgacacagcaagactctgtctcaaaaaagaagaagaaatgagataatccattttggatctgtccatttttcttttgcagtcctaaataacaaaaagcctctccacacccaaattgcttaacataaagcttttatttctgcttactatcgaccatctattaatagttgcctgagaccaggtacagtggctcatgcctgtaatcccagcactttggaaggccaaggcaggtgaatcgcctgaggtcaggagttcaagaccagcctagccaacatggcaaaaccccgtctctactaaaaatacaaaaaactagccaggcatggtagcgtgtgcctgtaatcccggctacttgggaggctgaggcaggagaatcacttgaacccaggaagtggaggttgcagtgagccaagatcacaccattgcacttcagcctgggtaacagagcaagactcaatctcaaaaaaaaaaaaaaaaaatgcctgaaaagcttccatgtaaagaatttatggtgataactttttttttaattttgttttttttttttttacggagagatgcagggtcttgctctgtcacccagactgaagtgcagcggcacaatcatagcttactgcaacctgtaattcttgggctccggtaatctttctgcctcagcctcccaagtagctagggctacaggcatgcactaccatgcccagctaatttttctttttttaagaaagacagtcactctgttacccagggtgttcttgaactcctgtgctcaagccatcctcctgcctcagcctcccaatgcactggggattataggcgtgagccactgcactaaggctaattattttgtaagctttaataggtcagtagggtacttacaggtgtgctacccaatgaacatcacctcattcacttagtctgtcaccacacatttactgaacactttttttgtgccaagtattggggggtggggcacaaaaatgaatgaaacacagtccctgctgaggaggaactcacagactggaggaggaaacacatcattaaataattattgtacaatgtggaacactatatagagtacattagattgtatgcagcttggtgttagggattgtgtcttggtcactattgcaatcctgctatgcccatggccttgtacaaagcaggtcctcaataaatttttggttgaataaattagtagtgtttggggtatatagaaagcaatacaagctgagttactaggaaggctccccagcagaggtgatggctgagctgaagaaatctctttctccattgactgtcagaatgccagcactagggtgatgtcaccctcctaaagttctaggagtcttttgggtattgttagacccttcagtgtactctacacccagctcctcccagacctgtcagtgttccagggtacaatgtagacttggtttcctagacaattgtatatctgccgttttgcttgtgaaaaatactatttttatcaatatgacaagccaaccataaaagtatacgtgaaaattattgttgcttgtggccctcccaacaactcatctatcctgtgtattatctaaagaacaaaactggttccccaaagtggttatgcctccaattgaagcatcattttattctactcttgtgcataaatgattttttattcaactatgtcaactttccttctgttcatatagaatgcactgaaggcccaattgacctggtctttgtgatcgatggatccaagagtcttggagaagagaattttgaggtcgtgaagcagtttgtcactggaattatagattccttgacaatttcccccaaagccgctcgagtggggctgctccagtattccacacaggtccacacagagttcactctgagaaacttcaactcagccaaagacatgaaaaaagccgtggcccacatgaaatacatgggaaagggctctatgactgggctggccctgaaacacatgtttgagagaagttttacccaaggagaaggggccaggcccctttccacaagggtgcccagagcagccattgtgttcaccgacggacgggctcaggatgacgtctccgagtgggccagtaaagccaaggccaatggtaatatggggtggaggtgcggtttacaccactcaaggttcaggtttcttaaactcactcagtggtctcagctggccataagggtaagcttctttgagtgtacagaaaggcctcctggcaactgccattatacatctttactaccctgccacctagaagccttaacaggaccccacaggagttaaataaagtgctcaggaaggagtctggctactagaagggtaggctaagctgaccacaggcgggtatcctctcactgtgatttactagccagtgtgtgatctccagtgtaagaatcgcctagatatacacaatagttccgaaacactggtcggcttgctctagaatcaactgaagactttgttaaattgtttctgatgggaacttttactgtgtatatttattcttgtattttttaaccaatacttcaagcgagcattctgaaaatgcaatagcccctagggtggataatactcttgtgtttccaggaggcaaagttagcttttccgaaaatcaaatgatggaacagattatgactctaagctcttgttgctcagtaaagcccagcctcttctctgaggttttcctgacctgagggttacttcagttgtacagatgtgaagcgtgctcgaggagtatgacccttggctaaaggaaacccaaaaggtaggataattggtagagacagtttatggtgaagtttctagattccttgagggagataagaaaacttgaggttgtgaactagtttgcttgaaaactgctttttttttttgagatggaggcttgctctgtcaccgaggctggagtgcagtggcgcgatgtcagctcactgcaagctccgcctcccaggttcacgctattctcctgcctcggcctcctgagtattgggtactacaggcgcccgccaccacgcccagctaatttttttgtatttttagtggagatggggtttcaccgtgttagccaggatggtctcgatctcctgacctcatgatccacccacctcagcctcccaaagtgctaggattataggcgtgagccactgtgcccagccgaaaactgccttcttaaagtacttgttgaggacacactgctttagcaagtcctgtaagaggaaataaggtatgcacagatcaaggcctcatctaagactttatggacccagtgcctagatcaggcctggcacacagtagatgtgtgacaactacttgctgagtgaatgaagaaagaagtgagagtactggcagtcccattggtgaactccattcctcctcacagaaaggctggttcacatcgacattcactcgctgtctttgtgaaggaggtcattttattgatactgcgtaccttcctctttttctagcccaagagtggtagccacaaagtgtcctgccctgaatcatctggatagattgtaaaactggctgttcacactagcctagattgctagagctcatgtcaaactcataggccccctagtctgcattcttaaaaagaattaattaggggaagcatcttagtctccagagacagtggttagccctttcatctcactgagactaatctaccttaccctttgctccactcaaatgtctctacacatcacacaaagacaggtggtagcagaaactgatgtttacttgattcttgaatcaacaagatttatatgaggtgacatcctcttatgaatttaactagtcttatgtatagcaaacagaatcttaaaatagtagttatcctttttaggaagtcgtgcataaaatcactgggctcccggacaaatatgctgaacttggttagtgaccttacacagactcagaacaaggcatcacaactcttgccccttgtcttgaagagccatttttaagtacatttttaagaatctagtctaataaattagctagaataagttatcagtgctgaaaaatgtttggactccagcagaacatattcttattgtgttttactttcaaatgaagagtatataggggaagggagtctaaggattgagtaagaaaagcttttaaagcaaacgcatatccctgttgaaatttaaggctgatcttgggtttgttctttttcctgactttaggggtttccaatggtctgtagattatccttttcagcttagcacttcctcacaaagttgtgtcatcttagcagaagtgggcaaaaagcagcttcacttggcctcaggtcacttacgtttcctaccctgtagctttgagtagaaactaggttattaggtcataaattgacttgattcttagaattcttccagaagagattcccatttagcaagccataaaatagggctcatttctatgaatccagaaggctaattcagggggaagttgcagatttgttaaatggcccagcccagggctgagcaacaggttagtagtttagttccccagcgtctcccagatgcctcacttctctcttggatccctcccttttgttcataggaccaaaataaaaatggtagaaaaataaaaaggaaggttggcatggactcttcaaatcataccacttaacatctaactggctttgggtgcagtacacacaacttccagcccctgggaacacaactctaactaacttgctcttaatttttcctgcaccctaggtatcactatgtatgctgttggggtaggaaaagccattgaggaggaactacaagagattgcctctgagcccacaaacaagcatctcttctatgccgaagacttcagcacaatggatgagataagtgaaaaactcaagaaaggcatctgtgaaggtactatagcttacgccgaagaccttagcaaacaaggcagcatgaactcctttttttttgttttttgagatggagtctcactctgtcatccaggctggagtgcagtggcacaatctcagctcactacaacctccgcctcctgggttcaagtgattctcatgcttcagcctcccgagaagctgggattacaggcacccaccaccacacccagctaatttttgtatttttagtagagatgaggtttcaccatgttggccaggctggtctcgaactcctgacctcaagtgatccagccaccacagcctcccaaagtgctgggattacaggcgtgagccaccgtgtccggccagcatgaacctttagtgataaattctcaaccaaaaaaaagtgtctccttcatgggcagggccagcaatgcctagaaacagtacaaaaagaagggctgggcaccatggttcccacctgtaacccaaccattttgggaggctgcggtgggaggattgctcgagcccaggagttcgagaccagtttaggcaacaaagtgaaaccctgtctctgaaaaaaaatttaacaattagctaggcatgatggcacacacctgtagtctcagctacttgggagactgagcggggaggatcgtttgagccctggaggtcacggcttcagtgagccatgattgcgccactgcactccaacctgggtgacaaagcaagaccctgtctcaaaaaaagaaaaaaaaaaggtgggggaaacaggggaggtgggaaagaaaaaagtaatagctaccattgtttgcgcccttgctctgtgccaagcagtataataagtgttttgacacaccagcatgcttcatcctcacaaacaccctagagaaatgatcatttaactaaaaatcaatcattatataaatcaggagagctgaagtgcaatttcagaatatacctataattggagtggaaaggggcgtacctagttcttccaagcccactgttaaaattaatgcctttctgcatggactacttgtttacagaatatcagactgccctttagacttcagattttgttatgcatgcttttctccagtttactaactgtgccagatatgcttacagatagcagttctgcctatttttccttgtactcatgtccccggctcaccagttagatcccagtctaagtgctgtgtcttacccctctagggaaagaactcttgagatgaggggtaacagggagggaaggcctttcagatttctgagtagagaatgttttgcctcttgattgtttcatgcaagttaaaatgcctcaagtggagctgctgccactgcaactaaaatccctcaacaacttcaccttttttttctgccctactttctagacatgacatttttgggagcattcttaagatgtacttagggggtccaagcttctcttacgagagagaattgccctagagtggtcataagtatcatggtaaccaactgcttttttgaatctttggtgttaccaaacaaaactaaaaaaccttaggttatggcaggtaggtaaggaggtggtctgggaccagcttcctgaagaacacacacatgcctgtggacaaccatcacttcttttggtcatctttttctgctcagctctagaagactccgatggaagacaggactctccagcaggggaactgccaaaaacggtccaacagccaacaggtacagtttttaaggcagtgtttttagaaattttggtggagggaaccatggtttccctccagataaaagctgtaaagaagtgaatgtaagtatgttcaaattatgataatgaaggccttttttccctcaaaaagatagttaacatttactcttacattaagccatatttggtaactagcatcgtttcaggtgacagtgtttttttgtttttgtttttgttgttgttgtttttttgagacagtttcattctgttgcccaggctggagtgcagtggtacgatttcagctcactgcaacctccacctcctgggctcaagtgattctcctgccccagcctcccgagtagctggaattacaggcacccaccaccatgcccagctaatttttgtatttttagtagagacggggttttaccatgttggccaggctggtcttgaactcctgacctcaagcgatccacccaccttggcctcccaaagtgctgggattacagacatgagccactgtgcccggctgtttttgtttttttttttgttgttgttgttttttgtttttttaataaagatgtttactccactgaagataacagtctttttgcttcagtatgtcccaaagtaaagctctgtaccaagtgctaggaataccaagtaccttactctgctgatggctgttttataaccaaaagcgttaagcaggtttgattgcagttttctttctctttacagaatctgagccagtcaccataaatatccaagacctactttcctgttctaattttgcagtgcaacacagatatctgtttgaagaagacaatcttttacggtctacacaaaagctttcccattcaacaaaaccttcaggtaattccaagtaaaatattactataagataacttgatctcagcctttcggcttgccaacaaccttagctttaaggaggaaaggaaagaaggaagtaggaaatagtatagaggaaaagagaagaaagaatttaagtaaaatgagaactaaaacataaactaaaagaaactcaagtagtgttcctcagtaatccacagtaagggccacttccagtgttggaagcatatacagtgctttcctggtatttactggatctggctgcatggaaaaagtggaacatgtctttcattatggtttcctccatatgctgattcattcctattattatgcgtctgggaagtctggtggattctagaggtgaacactttccatctgctttctcaggaagccctttggaagaaaaacacgatcaatgcaaatgtgaaaaccttataatgttccagaaccttgcaaacgaagaagtaagaaaattaacacagcgctatatccttttcttgcattatgcttctgtatggaatgcaaagaatattatcaaaacttcacacactctatgtaggttttatcaactgaagtaaatcccacgaagtcacaaagaacagtgatctccaggaaaggctttttgctttaaaaagcagcctcacaggtgtttgagaggcaagggcaagccaagcttattagcagcagtcaagcacttagttgccatcggctgttctcgggggcttagcaataaggcctgtcagtcagcatacaaagtaaggaaaaaagagacactggcctaactccgtctctgctaggaaggtgtgtaggacatgatgaggtctgaagtgcatcaaaggtacggtaagtatagacaaagaatgttgtagaatgaagaggtttcaaactcagtactccaaacttttcctttagccccaaggaacaccacagccacatatagattcagtgtgtttagtttctggaggacaggagtggttttttcttttttttcccttggcagcagagatcttctctatcggcactctaaaaaatgaaacactccaccaagggaacagcaggatccaatgattcatttaaacaatattaaataaaaggaatgcttggggataataaagaaaagaggattcggtgcttttacatattgaacaccctgccaagtgctctaaacttaaaattacagtaagcgtactaaagctggctgatatctcaagtgcatcaactagtctatagggaaatggcttaattctgaactatctctgtgccaatgggcttatgtaataaggaacaacagcatagggcaattccatttctgaaagctggaaatacgctcccttaagtaaaatgaaataatctttctgagtggttaattgacgaatatgggctctcattctgccctcaagagggcagatagagggtactgaggagcttacagggaagaccaatacctattctaatgcccttttcttctcgcttgcctgtcccaccccaaagttctactcacaagagactaaagaagacatatttttacataggtcagaattcctcaaaaccgtggccttatgtagcatcatggtgaaaactccgtatcgccctttgcttctgacttcatatcttactttccaaggccgaattctttcattgtcttctcttcaccagattcccaacattatcaattctggctcctagaagtgtgctatggcaaactaatttgcaagcattaagggtggaagtggaatcacaattaaaaaaaaaaaaaaaaagactgcagctgggtgctgtggctcacacctgtaatcctagcactttgggaggccgaggtggccttgcttgagcttaggagttcgagatcagcctgggcaacatactgaggccttgtctcttaaaaaataataaataaaataaggccgggcacggtggctcacgtctgtaatcccagcactttgggaggccgaggcaggcagatcacctgaggtggggagttcgagaccagcctggccaacatggagaaaccccacctctactaaaaatacaaaattagctgggcgtggtggcgcatgcctgtaatcccagctactcgggaggctgaggcaggagaatcgcttgaacccaggaggcggaggttgcagtgagccaagatcgcgccattgcactccaacctgggcaacaagagcgaaactctgtctcaaaaaaagagaaaaaaaacaaaaataaataaaattaaaattaaaaagacaaattcacactgagccatctggctttgctgatgttaaaaaaaaaaaaacccaaaatatttgtcttgacagaatatgttaaatgagttctacaaatttacaagtcagggttttaacatacttgacagaaatgggaaaaaaaaccaaaaccttttagatttcagaagccaaaattttacgtggataaatcaagttatatttaaatgtaaataaaaatagacaattcttcatcttccttaatttgagatttactagaagaaatgacacagagaatggaagccctggaaaatcgcctgagatacagatgaagattagaaatcgcgacacatttgtagtcattgtatcacggattacaatgaacgcagtgcagagccccaaagctcaggctattgttaaatcaataatgttgtgaagtaaaacaatcagtactgagaaacctggtttgccacagaacaaagacaagaagtatacactaacttgtataaatttatctaggaaaaaaatccttcagaattctaagatgaatttaccaggtgagaatgaataagctatgcaaggtattttgtaatatactgtggacacaacttgcttctgcctcatcctgccttagtgtgcaatctcatttgactatacgataaagtttgcacagtcttacttctgtagaacactggccataggaaatgctgtttttttgtattggactttaccttgatatatgtatatggatgtatgcataaaatcataggacatatgtacttgtggaacaagttggattttttatacaatattaaaattcaccacttcagagaatggtattcagtgcaaaaattcttagtttaactttaaatggaagatatgtatgtatgagaaatggccaacatgcctatgaaaaaaatgctgaatctcatcagtaatcaggaaaatgcaggttaaaacaataccatttttcacccatcagcttagcaaaaatgagtatattttttaacaagtgttggtaaggatgtggaaatgtgaggttcttgtagtaagaatgcaaatggcactctttgtagagtaagtctgttgacatctcataaaactgaaaatgcacacaaccctgtaaatctagcaactgcactcagttgatttcagcccatacatacaaagagacctgcataagaatgttactaggctttgtaaaagcaaaaaataaggaacaacttaaacatcatcagaaggggaactgataaactctggtgtaatccataccacagaaatacaacaccgcatgtacaggaatgtgctacatctatacaaataaatggtcaaactcaaaacaaagatgactttaaaaagaatgacaaaatgtttagcataccattcctgaaaattaaaaaaacaaaataaaaaatgtcacggtgaaaccccgtctctactaaaaatacaaaaaattagccgggtgtggtagtgggtgcctgtagtcccagttactcaggaggttgaggcaggagaatggcatgaacccgggaggcggagcttgcagtgagccaagatcgggccactgcactccagcctggggacagagcgagactccgtctcaaaaaaaaaaatgaaaagaaaaacctagatgggtaccccactacacaccgaggctgtttgttatataccccattgctcctagactacaaacctgtacatcatgttactgaatacggtagacaactgtaaaacaatggtaagtgttgtatctaaacacagaaaaggaatttttcagccttattataatcttatgggatcactgttgtatatgcagtccatcactgaccaaacgtcattctgaggtgcatgactatcagttctggcattgctgccaaggtggctcaattctactttactctctgttgtgttcaggctccacctagcggcacaaaagtctgcctcctcctttttagcaattaaatacctttcaacctaacattttatctctctgccatgagactatgtgtgtgtgtatatatatatatatatattttagctattaaacacatttctcctgggggaagaaaaacctcatggcaaaaaaaaaaagcctccaaccaatgcattaaaatctacagattaatccaagatatttaacttgaagattgtctaaaatattatttctctattttgcttgtttttgccacttgtaaatctcagagttctgcattccattttcatcacttattggatttaatctgcaaaataaggctaataataatattgagtggtcagaggattaaatgagttaacatatacactattttgtaaggtacctaaaacttttattatttattttttgagatggagtctcgctctttcacccaggctagagtgcagtggcatgaccttggctcactgcaacctccgcctcctgggttcaagcaattctcctgcctcagcctccgactagctgggattacaggcaactgccaccatgcctggctaacttttgcatttttagtagaggaggggcttcaccatgtggccaggctggtcttgaactcctgacctcaggtgatcagtcagcctcagcctcccaaagggctggcgtgagccaacacacccgaccatattatttatttttagagacagggtcttgctctgtcatccaggctagagtgcagtggcaccacgatagctcactgtaacctcaacctcttgggttcaagcaatcctcctgcctcagccacctgagtagctggcaccataggcctgtgccaccacaatgggctaatgtttttaactttttttgtagagatggggtctcattacgttgcccaggctggtctcaaactcctggccttaagtgatcctcctgcctcagcctccagaagtgctgagattacaggcataaaccacagtgctggaccctaaaacattttaaatgctcagtattaactattatatttttagtctttagcagccaagagtattggacacaaagatggtgctgagctaagtgtatgttgagtaaatgaaaagacagaataaattctttgctgacctgagaaaagtaatctggtagattcccacccctaaactatcttttgaagcaaacaggcagtagtaaattaaataatggtaaatgcataagaaatttaagaactactattaacaaaattctgaactagaaagtcccaagtgtatcaataagagaattaagtaaatgtttaagccctagtagtcattatccactctaatttttgataagtgacacgaagttgaataccttgagtccctgtcctgtagcaccttagagagaggtaatcaatgccataaaaaaaggtactaaggtaactcagaagcacctgttttagactgggtgctaggcttaccctcagaacaagcacaggtaagcccagaaaagggaggagtgggggaaggaaaccagattccactgcaggtgaagggagcagcaagtctaaggagtagttggtagttggaagacaggggatggaaaacttttccatgacacagattataatattatcttccagacgacccaactattaatagttatattcataatcagcctaaaagttggtttcttctctacattccttttgttcctgccaccatcccataccaaccgcaattcttaacacactctacaatatccaacctcttctttgagatttctatttccatatctaagagttcagtagaggtatggtatggagtaaatccaattggctgcaatttcctacaatcccctgaatattagagctacccacacactgctttcattataatcagaaaagaacattttaaatgtcaccttacactttcccagatcttcctggccagtgtcactttctctctgacagcggtttaagagcacttaatcaaaggtaacataggccagaatgagtaaggaatgtttcctgtctactagctttaaacttcttgtctctctgaactttcttgctgaaagaaagaatcgttgtgactgcacaaaaagaacatataatgaaaaggcaaaaaccaaatgtagcatattatcaactacatagacagccctagaaatcataaattttctaaaaaaccatcattccaaaatgcctgcagccaaaaaaccacaacagaaaccatgcaaagaaagggtacaccaacatctgcaatattgtattctttaggtcaccaccccctgagaaattaaactcgagctagtcaacctggaggaaaaactaacccaaatagtgtgaaaagtcactatttgggacttgtgggaaaaactgagcaagtagataagcacgcaaactaccttaaccatgagattgaaacattttgaactatgggaacaaactaacaaacactattagagaccagtagtcagaccaagtaattcttatcaaagattcaaatattttatatcactttggccacacgggtctctggatatgtaaacatgaacaccttagaacacttaaaatctttcatatattcagtgactcttaaccaggagagaagctagtttaaaaatgtggtgacatttgggggtgattacaatgacatggaaggaaaaccaagaatgaaaaatacctgcagaatccacagccctccacaacaaagaactgtcccattacacaatgtcagtagtgctcccaaattgagaaatactgagtaaatgaactggtaaaaccattaaaaaccagactctccaaagtattaatatatccacaacctcagattaacttcggacacaaactaaaatcatgagctattcccttgaaaaaaactcctaacccccgactatcaaattgggaacatgacccacccagggctgttatatagctattaagagctggggtcctctgactccaagtgcagtaaatgcttgattttctgcatactatttagaaggcatcctcatttactgtctcactcatctaccatcaaaacttgcctgaaagaggggagggagaaaaggagcaaggagattgagtctaaaatccaaaagacattgtcttttctgacacttctgtggcctccctccctcaaagcccagctgactacatagggcataccttactagcaccattcaactctgtaaattagtatctaactaaatcattatttcccctcaaattaattctttcgaatgttccaaaagatattaacatatgaaggattccctgggacatactcttgggggatgcagtatagtttccaaaaatgtgaatacttaacgtacttcacagtacatcttttaggtgtatgatataaaacatactcgggcaaacatggacttaactattgatgatctgggattactcagaaatcgtccaagtgcaccaaccacttaacttaggaaagattattcattaaagtaaaacttttcttaacctatgacagcattttggatggggaaacatttcagttaatcttttttagctactcaaatttggtaaattgcaattctgggtatttaaccttgttacctcctaagcatactagaatataaaatgcaaacaatgtcctgagaatggaattacaaaacttgagctttctaaacatctagtactagaaaggaacccagtgcagtccctttacaaaaactgggccaggagcagtggctcacgcctgtaatcccagcactttcagaggctgaggccgggggatcacgaggtcaggagatcgtgaccatcctggccaacatggtgaaactccgtctctactaaaaatacaaaaaaaaaaaaaaaaattagccaggcgtggtggtgcgcacctgtagtccctgttactcaggagactgaggcaggagaatcgcttgaacctgggaggcggaggctacagtgagccaagattgcaccactgcactccaagctgggcgacagagcaagactgtctccaaaaaaaaagaacaacaacaaaaaaaccctggaaaacagaaatcaggatgtgtaactttttttttttttttttgagatggagtcttgctctgtcgcccaggctggagtgcagtggcacgatctcggctcattgcaagctctgtagctgggactgcaggaacccgccaccacgcccggctaattttttttgtacttttagtagagatggggtttcactgcgttagccaggatggtctcgatcttccgacctcatgatccgcccgcctcggcctcccaaagggctggaattacaggcgtgagccaccacgcccggcccaggatgtgtaactctttactgaaaagtcttgccaccacatctgcctcatcctctctaatccaaccttcaggaaattgtattgaaacaaaaatagagaaaaatactgaaatagatacaatgtttttaaaacaagcaaattttattaaaggaaaattttgcaggtttaaggtttgcaggtgaaattttgtaggtgaaaaggtttacttttcaccagtctgttctggcatgcttctaatgatgtcagagtcacctaaaaaataaaaataaaaaaacagtaattttacaattcatttaatagcaactggtaccataaaatttctctacctttggttatcccttctgtagacaatggtctgcaaattagcactgactttttgcaaaagttatcacattagctgtactgtcatttttcttaaggttgaccaaagataacctagaatcacagccattatataatcacataaaatgatcatataataaaattggtttatcaccagcatttataaaaccagacctagggaaagaactaggtttggggacacatgcatggtcttaatatagcgaatgtttagcctgtcctgactattacaaaatcagaacagcgagaatattcgcagtattctatgaatcaaagattcacaattggaaaacagaatgatgtagattttttggcacttttttttttctcaagctaattttacatgtctgttctcaagaagcaagaattactttcttctgttttgccagattattctctccttataatttcaccttttaccaaatctatgtcattatttcataggtacttcatcaaatgaaattcattatctgacagtaaaaattttaacttataataaagccaattataatgtattggcattcattaccaattctctacaaaatacaactacacgatatgccttgctagatccatattctatctgaatttaggaaccaaagacatttgtgtagtaagaaatacttgtccagacattacattagaaaggcaaaaaaaaaaaaaaaagactttatgatttaaaaagcatacctggatcaatgatagccagtgtgcacactctgtagtattttccgcatgctgtgcccagttcaatattattgccactgtagtgatggacaccagttttagccaacatagcatagtactctatttcagatttcctttgggaaccaaaatgggcaaataaataaatgcgataccaagtgactgacagactaaatgttactacttcttttactagtgttaatgttgttaaggccttcaaaaagtaacaaaatcacatattactcttaaaaacatcatattcattatccaatacaaaccaacatttgtatgtatcccttgcaagtgaaggggcaaccagcaaatatctaatcaacccctactatgtttaagacagtatcaatactcacggaagagggtaagatgcaaataaaagaaagcaaagcattatctagcattagtaaggaccacatactttatatttccatgacaatctctaaagtaggtattatgtacttttttttttgagatggaatctcattctgtcgctcaggcggatcgtgcagtggcacgatctcagctcactgcaacttccacctcccgagttcaagtgattctcctgcctcagcctctcaagtagctgggattacaggcgtgcaccaccacacccagctaattttttatatttttggtagatggggtttcaccatgttggccaggctggtctcgaactcctgacctcaagggatccgcccgcctcagcctcccaaagtgctgggattacaggtgtgagccacggcacacagccctattctttttttttttttttttaatctaatgaaactgagccacagaatagtaagtggaggatccagaatctaaacctttaaaagataagccatttctatcaccatcccctcagtgcccagaattccagatgggaagtgataccgttttagagttaaaatttctggcctcacgcgtgtaatcccagcactttgggaggccggatcacttgaagtcaggagcgtcagaccagcctggccaacatggtgaaaccttgtctctactaaaaatacaaaatttcagcgtcaatttagtagatactaatggttttaggaatcggaaaggagtcctatactatcttgccactcaattatgtgaatccacataccagcaatagtgctacaatgtattagttaaaaaagcacctcaagccgggcacggtagctcacacctgtaatctcagcagtttgggaggccgaggtgggtggatcacctaaggtcaggagtccgagaccagcctggccagcatggcgaaaccccatctctactaaaaatacaaaaattagccaggcatggtggcaggtgcctgtaatcccatctactcgggagggtgaggcagaattgcttgaacctgggaggcagaggttgcagtgagcttagattgtgccattgcactccagccggggtgacaagagcaaaactctgtcttaaaaaaaataaaataataaatggcacctcgggccccatcccagatccaatgaaatcagaacttgcattttaacatcacccatgtgactcctttgcacagtcatgtttcagaagcactactatagaagacaggctttaaagaaagtttcaaagaatggttagggaaaagccgaacccatgggacaagacagaaagggccctccaggctttgacggtaactacagacaccctatataaaatgctgtaagcagcttatgcatcaccacagaaaatttgctcacatagcttatactctgcaaggtccaagtttgtttggcttatttacaacaccccctaagttcaatttcaaaacagtgagtcaagcataaatcttgactcagaactgatttagcgggctaaactaggtgattctatgatagcctgcaactccatagcccagcctcaacttttcttacctagttttttgacactaaaacaagttcacacaatgaagcatcattaaagcacctcaaagctaaaagaaccaaaaaagcaggacacaaaatacatggaaaaaacagtaatgtgtctgtgtttccattaaacctcgatgttctgttttcactcctgccacacacacacatttctcctccaaaaataagctcacagaaggggagcacacgatttgggggtgggtcggggagacgggaatgaagggccaaacaccacaatcgctaccgtaattatcctgcaagtgttcgagttcatggtactcagattacaagtttacactcctgtatattcgttcacgatgaattcgcggtaggcgaagcacgttcagtctcttcgattacctcaaagctgggcagttgttagcgagaatgaccaatttcgctttgccttgtctgatcatcttcagagtctgcttgtaccccaggacgtacttcccacttttcataacgagttggagcctagagttgatcgactccagcgactttttctacaaagcaaacattaaatacggacctaagggcctcgcctgcaaccgcctcaaaaccggacccagctttttgaagccgagccccttaaacttccgaagtcgaggaccccaagtcattgagagggccactgggattccttctggggccctccaaatgccagcaggcatgctgtcacccccgtgggctcacatctgcccgccctggccaaaacatctctccacgtgaatcgtcttccgggcctggcccgcctcactcaccgtcttctttgcggccaccatcttcctgccttaggagcgggacggcccccaacctagaagagacagagaacaggacaggaattttaggatccggagttacaaatggcaacccgcaaagctccccgcgctgcctaaacctcggtcggtaggagcccactcaccaacagcagccgctaagatggccggggaacgagaaaggaaagacttcccacaatgcaaagctcttcacggcagagccggaactgcgggaccggaagcggaaacagatcgcaagcagaaggggcggagcaaaagcggagggcagctgccggttgctattggtaccgctagctagaatggctgcgggggccgtacgcggctgctcatacctttaatcccagcactttcggaggttgaggcgggaagatctgttgcgtccagctcaaggccagcctggacaacatagaccacccctgtctctacaaaaaaataaaaaagaaataaaaaagaaattagccgggcgtggtggcgcgctccagtagtcctagctactcccagctacgccggaggctgaggcggagaggtcgcttgagctcggtaggtcgaggctgcagtgagccatgatcgcgccactgcactcagcctgggcgacagagtgagactctgtctcaaagaaggaaaaaaaagaatgacggcgggggtgttcttttccccctctgcgggcctttaagcttcgcggcgttgtgttgctgttctgctgcgagctgcggtctaactaatcgaggcgcttagaacccggagggagttcgaaaagccgactgaaggtgaggtgggagggtcgatgagaagaggctgcggcggctgcgaccacggtctcaatgccgctgaattcatctttgtcctgaggcgcggctcttggagagccttgtgggtgactccgatgcgccgcagcacccgcatttactctccgcttggtagaagcagctgtgtcctcacccctgcggtcacccaagttacctgtcccctggagaacggtggcgccctgctcgagtttcccaaaactcgccttttgtgactgtgttagcgtgaacttgtgagccgagtttgcactgagagcgcgataaacaggtctaattttttaaaagtatttttgctgttaacg

SEQ ID NO: 71 - DNA, 4515 bp, Homo sapiens
tgagtcaccacacctggacttttttaactttttaaataaatttaaattttttttttgtagaaacgaggccttgctgtgtggaccaggctggtttcaaacttctggcatcaagcaatccttctatctaggcctcctaaagcactaggattgcagacatgagccatggcacctagacttgaccctgggtttgaattctggctctgacacttgctaactgtgtgtgaccttgggcaggccactgacccttcctgagccttatgggaatgtgggaataatattaggtaatggagcaagttaatataggtaaagaatttagaatagggcctggcacatggcctcagtctagtaccagagtccaagcccataaccactgtgccaacactcttgtaataaatgtatgtgggagacagggaggctgggaggctggatatgtgatgctactttatgtcaactacacatgaattttatatgtataatttatataaactaattgatgccatctactattattagactgaacaaatattgttacttggaactctcagatatgtaatagcttttttttattcaaatccaaaatgtaaaatgtgactatgagtaattgataatgaacttaactgataagaaacttcaggatagatttttctcaagttttccattcagtcttacagtgattaaagtgatgaaaaattccaactatgcatgccctgctcggagcgtccaagaagagcctaccaacgggggctacttaagctctcaaaggccaaacacacaaacggcattttgagtgcaagtggtctgtttgaactctgaaaaggcggggcagcgggcctgcagctcctggagttcagggagacccggaaatctcaccctgccctcttcttgtgttgtgtttgtcacagccttgcccctcttgctcgccttgaaaatggaaaagatgctcgcaggctgctttctgctgatcctcggacagatcgtcctcctccctgccgaggccagggagcggtcacgtgggaggtccatctctaggggcagacacgctcggacccacccgcagacggcccttctggagagttcctgtgagaacaagcgggcagacctggttttcatcattgacagctctcgcagtgtcaacacccatgactatgcaaaggtcaaggagttcatcgtggacatcttgcaattcttggacattggtcctgatgtcacccgagtgggcctgctccaatatggcagcactgtcaagaatgagttctccctcaagaccttcaagaggaagtccgaggtggagcgtgctgtcaagaggatgcggcatctgtccacgggcaccatgaccgggctggccatccagtatgccctgaacatcgcattctcagaagcagagggggcccggcccctgagggagaatgtgccacgggtcataatgatcgtgacagatgggagacctcaggactccgtggccgaggtggctgctaaggcacgggacacgggcatcctaatctttgccattggtgtgggccaggtagacttcaacaccttgaagtccattgggagtgagccccatgaggaccatgtcttccttgtggccaatttcagccagattgagacgctgacctccgtgttccagaagaagttgtgcacggcccacatgtgcagcaccctggagcataactgtgcccacttctgcatcaacatccctggctcatacgtctgcaggtgcaaacaaggctacattctcaactcggatcagacgacttgcagaatccaggatctgtgtgccatggaggaccacaactgtgagcagctctgtgtgaatgtgccgggctccttcgtctgccagtgctacagtggctacgccctggctgaggatgggaagaggtgtgtggctgtggactactgtgcctcagaaaaccacggatgtgaacatgagtgtgtaaatgctgatggctcctacctttgccagtgccatgaaggatttgctcttaacccagataagaaaacgtgcacaaagatagactactgtgcctcatctaatcacggatgtcagcacgagtgtgttaacacagatgattcctattcctgccactgcctgaaaggctttaccctgaatccagataagaaaacctgcagaaggatcaactactgtgcactgaacaaaccgggctgtgagcatgagtgcgtcaacatggaggagagctactactgccgctgccaccgtggctacactctggaccccaatggcaaaacctgcagccgagtggaccactgtgcacagcaggaccatggctgtgagcagctgtgtctgaacacggaggattccttcgtctgccagtgctcagaaggcttcctcatcaacgaggacctcaagacctgctcccgggtggattactgcctgctgagtgaccatggttgtgaatactcctgtgtcaacatggacagatcctttgcctgtcagtgtcctgagggacacgtgctccgcagcgatgggaagacgtgtgcaaaattggactcttgtgctctgggggaccacggttgtgaacattcgtgtgtaagcagtgaagattcgtttgtgtgccagtgctttgaaggttatatactccgtgaagatggaaaaacctgcagaaggaaagatgtctgccaagctatagaccatggctgtgaacacatttgtgtgaacagtgacgactcatacacgtgcgagtgcttggagggattccggctcgctgaggatgggaaacgctgccgaaggaaggatgtctgcaaatcaacccaccatggctgcgaacacatttgtgttaataatgggaattcctacatctgcaaatgctcagagggatttgttctagctgaggacggaagacggtgcaagaaatgcactgaaggcccaattgacctggtctttgtgatcgatggatccaagagtcttggagaagagaattttgaggtcgtgaagcagtttgtcactggaattatagattccttgacaatttcccccaaagccgctcgagtggggctgctccagtattccacacaggtccacacagagttcactctgagaaacttcaactcagccaaagacatgaaaaaagccgtggcccacatgaaatacatgggaaagggctctatgactgggctggccctgaaacacatgtttgagagaagttttacccaaggagaaggggccaggcccctttccacaagggtgcccagagcagccattgtgttcaccgacggacgggctcaggatgacgtctccgagtgggccagtaaagccaaggccaatggtatcactatgtatgctgttggggtaggaaaagccattgaggaggaactacaagagattgcctctgagcccacaaacaagcatctcttctatgccgaagacttcagcacaatggatgagataagtgaaaaactcaagaaaggcatctgtgaagctctagaagactccgatggaagacaggactctccagcaggggaactgccaaaaacggtccaacagccaacagtgcaacacagatatctgtttgaagaagacaatcttttacggtctacacaaaagctttcccattcaacaaaaccttcaggaagccctttggaagaaaaacacgatcaatgcaaatgtgaaaaccttataatgttccagaaccttgcaaacgaagaagtaagaaaattaacacagcgctataagaaatgacacagagaatggaagccctggaaaatcgcctgagatacagatgaagattagaaatcgcgacacatttgtagtcattgtatcacggattacaatgaacgcagtgcagagccccaaagctcaggctattgttaaatcaataatgttgtgaagtaaaacaatcagtactgagaaacctggtttgccacagaacaaagacaagaagtatacactaacttgtataaatttatctaggaaaaaaatccttcagaattctaagatgaatttaccaggtgagaatgaataagctatgcaaggtattttgtaatatactgtggacacaacttgcttctgcctcatcctgccttagtgtgcaatctcatttgactatacgataaagtttgcacagtcttacttctgtagaacactggccataggaaatgctgtttttttgtattggactttaccttgatatatgtatatggatgtatgcataaaatcataggacatatgtacttgtggaacaagttggattttttatacaatattaaaattcaccacttcagagaatggtattcagtgcaaaaattcttagtttaactttaaatggaagatatgtatgtatgagaaatggccaacatgcctatgaaaaaaatgctgaatctcatcagtaatcaggaaaatgcaggttaaaacaataccatttttcacccatcagcttagcaaaaatgagtatattttttaacaagtgttggtaaggatgtggaaatgtgaggttcttgtagtaagaatgcaaatggcactctttgtagagtaagtctgttgacatctcataaaactga

SEQ ID NO: 72 - protein, 922 aa, Homo sapiens [sequence omitted]

SEQ ID NO: 73 - DNA, 339234 bp, Mus musculus
  misc_feature (1)...(339234): n = A,T,C or G
acactcgttgatcagtgtcttgctcagccatcattaggaaagttacctcctgcagcagatggaaacaaatacagagacccacagctgaacaatgtgcagagagtgagagaccttgaaacagtcttaaatggatgtctccatcaaatccctcccctcaggtccctgaaaattttgaagaagaggaggtagaaagattttaagagccaatgggggtggaagactccaaggaagcaggcctcctggatatgacaatcatggcctcactgagactgtggcagcacacacagaacctcatggatctgaccagtgctgagaaggaaagtgcacacaagtctccatttctaagtcagaagctaccttcagttgatacctgctcacaaaggaaaattagttttctacgtggagtctcagagggaagccaaactactcttaaggccaggctttatgcctgcagtagatggtcaacacaaatcgaattcaatggcgtttttagaggttttcacatatgttattattccaaaataatcattcttctatcagccagctctcttcagatctgacagaactattggtagccattttaaagaacccagctggaaacatacaagctcagcctagacagaagaacctcaattatgagattcctgggcaataataaatgattaccattttcaactactgggcctggagttagcttattaccctgtaataaattacactggtggacagattgaacatttcctgagacatcatctactaacgttctattagtgtttgatcagaaaccactaccatttgactgaccttgatggagcaagtcaatcctttctctgaatcttaagacacttggaccgaggtagcacaattcaattcctaagttctatagttagaatttgagatgcttctgaagggctacatattatgtgtgtagtctccagccatggcactactgggagacagtagaaaattctagagtagagcctagaaagagaccagatgtcatgattaaagggatgctttcaatgggcttgataattcccagccacaagaaggtgagcagtttgctctatcatgtatcctccagccaaaaaagcactgtctcgctacctgaaaccaacaaagacaactgtctatggactgaaacctggatcattgtgagccaaaatcatcttctctttctcattaattttatcatcttagatatgtgttacagcaacagaaaagatgactaccacactggacaaacacagcagaggcttatttctcacaattctggatgatgagacatccaagattaaggcaaaagtagatccattgtaaaagttctgcgtcttacaaaaaatggaacagagactgaaggaaaggccatctagagaccaccccacctaggggtccatctcatcttcagacacaaactctgatactattgttgatgccaagaagcgcttgctgataagagcatagtatggctgttccctgagaggttctaccagcaccttaccaatacagatatagatactcacagccaaccaccacactgagcccggagccccaatggaaaaagctagaggaaagactgaaggagttgaagggaattgcaaccccatacgaagaacaatatcaactaactggacaacccagagctcccagggattaaactgccaaccaatgagtacatatggagggatccagggatccagacacatatgtagcagaggatggacctgtctgacatcagtgggaggggatacccttgatcctgtggaggtttgatgccgcatcatagggagggagatgctagagaggtgaggctggagtggatgagtgggtagaggagcacccttatagagacaaatgggaggggtaagaagaggcatggggactctgtgcgccttctcctctcgaagtgctcctcttctacaactgttccgcggcggctgccgccatgagggagatcatgcacctgcaggctgggcactgcggcaaccagattggcgccaagttctgggaggtaatcagcgacaagcatggcattgatcccactggcacttaccacggagatagcgacctccagctggagcgcatcaacgtgtactacaacgaagccaccagtggaaagtatgtgccccgtgccgtgcttctggacttggagccgggaaccatggactctgtgcgttcagggcccttcgggcagatcttcagacctgataacttcttctttggtcagagtggggctgggaacaactgggccaagaggcactacacagaaggtgcagagctggttgactcgatgttggacattgtgagaaaggaagctgagagctgtgactgcctacagggcttccagctgaaccactccatgggtggggggactgggtctgggatgggtaccctccttatcagcaagatctgggaggagtacccagacagaatcatgaacaccttcagtgtggtaccttcccccaaggtgtcggacacagtggttgagccctacaatgccagcctttcagtccaccagctggttgaaaacacagatgagacctcttgtattgataatgaagcactctaggacatctgcttcaaaaccttaaagctgaccacacccacttatggttacctgaatcatctagtgtctgccaccatgagtggggtaaccacttgcctgcgattccctggccagctaaatgctgacctgcggaaactggctggtaaatatggtgcccttccctcgcctgcacttcttcatgcctggctttgcccccttgaccagccggggaagccagcagtaccgtgccctgacagttcctgagctcacccagcagatgtttgatgccaagaacatgatggctgcctgtgatccaagacatgggcgctacttgactgtggctgccgtgttcaggggccgcatgtctatggaggaggtggacgaacagatgctttgaacagaacgtccaaaacaagaacagcagctactttgttgagtggatccccaacaatgtgaagacagctgtctgtgacattccacctcggggcctaaaaatgtctgccaccttcattggcaacagcaccgctattcaggagctgttcaaacgcatctcagagcagttcacagccatgttccaacgcaaggccttcctacactggtacaaaggtgagggcatggatgagatggagttcactgaggctgagagcaacatgaacgacctggtgtctgagtaccagcagtaccaggacgctacagcggaggaagagggagaatttgaggaggaggctgaggaggaggaggtggcttagagctgtcttagtcactaaagcatgggagcagtgtgaactctttattcattcacagcctgtctgctagccatgtccactgtgcatttgctgtccggtgatctgacatcacttgtacagataccaccattaaagcaatttatagtgggggaaaaaaaaaaaaaaagaagaggtattgggatggggggggggagggnnnnnnnnnnnnnnnnnnnnnnnnnnnnnnnnnnnnnnnnnnnnnnnnnnnnnnnnnnnntgtagatgaataaaattattaattaaaaggaagtactgcatctttataggttactgctttcttgctgtatctccacatgatggaaaggccaagggtctccttacaggcttcttttataagagtattaatgtttggaggctgattatgggatggatcccctggtgtggcagtctccagatggtccatcctttcgtctcagctccaaactttgtctctgtaactccttccatgggtgttttgttcccaattctaagaagaggtaaagtgaccacactttggtcttcgttcttcttgagtttcatgtgttttgcaaacgcagacactgtcgcatacaccagcaagactttgctgaaaggaccctgatatagctgtctcttgtgagactatgccggtgcctggcaaatacagaaatggatgctcacagtcagctattggatggatcacagggcccccaatggaggagctagagaaagtacccaaggggctaaaggggtctgcaaccctataggtggaacaacattatgaactaaccagtacccccagagctcctgtttctagctgcatatgtagcagaagatggcctagtcagccatcattgggaagagaggccccttggtcttgcaaactttatatgcctcagtacaggggaacaccagggccaagaagtgggagtgggtgggtaggggagtgggggggggcatgggggacttttgagatagcatttgaaatgtaagtgaagaaaatacctaattaaaaaacgattattaaaatgctataaaaagaagagtactaatgttgttcaggagggctccactattatgaacagataattgctcaaaggtacatctctttgagctacaaggatgctcctctacacgattagaatttcaatatgagtgtatcagggtcacacattttctgactgtcattttctgctttggcaagtagcaggctcctgaactattcagcatccccagggctggcgtgatgtcactataacagaagcaattcaacactgtccacgctggagacaggattgccataaagaggtcttgcaggcagttagtgaaataaagcctttgaaacataatgggcttaggaaatttcgccatggctatctgaaacttttaaatgtatggtgatgttttaattaagagtaaaacagatgtaggccaggtgtggtggcacacacctttaattccagcactgacaggtgaatctgtgagttccaggccacatatgactacatagtgagatgacctgtcttagagaacaatatctccaacataagggaggggatgtgtgataaaacacacccatatagaaaaagaaaacaatacataggttttggataacacttgaagtgatttaaaacatgtatagagttataaatttttattatttttcacttgaaaaggccttggaaacataaaagtttatatttggaacaggtaaaaatgatcttggggtaacataatttgatagcaagaatgttctcaaatattggaaaaaataggttattctggactcagtgatggagatcagagtctagttaaattttctaactctgtgttgatgccttaactgaatcctcagctgagagaggctatttgcccagttttgtgtctcataattctcattctctattaggcagttttcaccatgaacaatacttggcaatctctctagaaatggaatcttgactttatgaggatcattggtcaagcgaaacaagttttgaatgaaaatccaatgacccctaagggactttcagtgtaaatagtcacaattttgtggacatgagcctgcctaatatataagcagattaatcacttatgatgttccaacattgaattaccactgaaattattttgtaggcagaacgagttgcttaagaatgttcaggaatcccaacaaaggtcaataaaagtttacttttatcctttaagaatagtaagagactaaatagtattgtgttctaattttcataatgaaaattaattttgacgtaggaacaagaaagtgcataccatgacatttcagactagggacaatcttgccttgatgcactgccctgctcacaatccctactctgggaggctttttaaagtgagaataatttgtcctgtgatttttatcagtgaagtaatataatttcctcagctagaaggaaaaatatgggcctcctattttttcacatatattgagactcccagtctatatttgcaattcaaaattgtatgcccttgatgatttgacctctacaggacttctttcaagaaatatttgaaaactattttatgaagaagaagaagattgcttcattttactgtgaaatactggaaatgagaagacacagatccaggcttcaggaagcttgcagtcaaccagacagacaggcttggaaatgtgttaaagggccacagattgtcactgaagcagcgcgcactgtacaccaggctgtacaaggtgggggagggtgtatgtcaagggagctggcaggaagggcatcacggtaaccgtgacacctaaataatccttgactgatgggcagaatttcacatttcagctagaggcagcagtgtgagggaacattagacatactcttcttacggttccaagtcaatgaattggattgtgccgactgtcaatcaagcagaacacgtaagagttgattgagatacagtttagtatctcgaattctaggaaaaactattttaattggcaggaaacaagaaacctcatgttttgtcaacagagacatgtgccctttccccttggttgatgctttcagcaaacatttttattaataagatggtaagtttaaaactttacaaataagttaagtgtgatgcccttccaggaactaagatcatggagtgattggggcatgtaattatttagattgacaaaaaaaaattggttttattttatctactaaaaatttaagttcttgtcatgtggttcttcttggaagtctcttaggctttcatctctgtttgctcatggcgcttcgcatattctcttcatgttataaattacccatgtgagtgtgtgttcctgccaaatgtcaacacccagagttagggctacgtcaaactcatctctgtattcagaagccatttgaagtagacgttaaatgattagatggtttgattaacagctgcttcctagggaattcactagacacaatttaaatggattatgccacatagtggtttatatctctaatgctcttattggattaaagaaaaaagtactaacaaggccaatttcttgactcccttaagaccatagtttcattaacagacccaaggcagagcaacacatactgttaatgtttttgttatagaagggttacatgcgcactatagaaacctcatatgttacagataagcaaaggaaagaaaacccctataatcctaacccagaaataaccagagttactgttttagaggaatttacaatgcgattggcacccactccaccctgcctttttcttcattttcaatgtacaagactaagttgccctttagcaagactgagctattatatacgtctctcattgttgagaagcctctttgcctctgccaacatcacacacaaaaactaatatttaatcctgccaaaataggtgaagaaaaaaattaataaatgcatatttcttcaaattctaattaagttaaacacttcattatgagtttgtggaatacttctatttccgggtaatttttctctctgtttatttgttacctcgtggctctttttttctaccagggcatgccactctgttactatgaaattgttctggagaacttaacacatgttaccaagctgtccccatgactaggccagtcacttgtcttttatcatatttccgctcggtgtcactgatcccagggagagggactaagaaaccaagagaaagatgcagctgtgatcccatcctgcagtcacttgtaaactgagtacacgtcatgaattagagtcttccaggaaaggaagcaaagagagaggcgagccttagaatatcaatttctgtgggatgagaacttttcagaaacagtggcaaaacagaccttaaaattagtagatttccctagccggctttgaactaatttaggactaatacgaataaggacagcacactgtaatactggcccagaaaagatataatgaaagtgcatttgagcaatggcaagtcaggtttggtaattacagtcaacagtaaggtcttttcaacactgtggatgcattgagccatttccacggggcatgcatgagagtcatgtatggctgtgccctgaaaactcaataaagaatgaacactcttatggtttggtaactaagaaattagctgggggcaatgctgaaattctttcttcttggggaaaaaaagcgggggtgggggcgtggggagaactatgaaggacaaaagtaaaagaagcagcaaagctgagagcccagaaaagagcagaaactgaagagagtgggaagcgaagtttaaaagagacacagtaactctcaactactttcccctcagaagtagcttcagaatccaggggatcatttatagttgtatttgatgtagataaataaaaggtgcgtggtttcatggtcttgctacctgaagtcactttaaaattcaacaaaaagtatttgataaaacctcaaacctatgggcataataggttgggatcataaaagcagtctaggttcaaatcgtttctggaaaaaaaggaagaaaggaaaggaaaaaagaaggacagatggatggatagatggaaggaaggaaaggagaaaggaaggaaggaaggaaggaaggaaggaaggaaggaaggaaggaaggaagggggctgtcttcacaggcgtgtttagaacacagagcatagctgataacagttttaaacctgattcattcctttctcaaggtatccaaaaatttgtctcttcagtgttataagtagcaaaggagaattgtgacaaagaaacaaaaatgtgcttagctacttcatgagcaatttaaaggttgagaaattattgaaacagtggagtaaaattcatcggcttgacctacagtttcaaagtttatttttaaagagtattaatctgatgcaaatagctaaattgaatagtctggacaataaatcctgggcataaaatgcatatataaaaatataactgacaaacgaggaaacaaattcaattaggatacttgagcaaatggaaaggttcaccagatgcctagggaaggcttaggaatcctgtctttaaatgggcaactgagccgctggactcacgtgatgccttttcctttggcctctttccacagtcaaccaaaaattcgtgaaggaaagcacatgaggagggagacacattgtatggcttgaaattctgacagaaacgtggttcatggcagtttgtgaattctcacacttcagtgttctgttttctttgggaataggcaggttacaaacccactggttgatgctgtaatggtcttcctccaaagaggtgaaaatgagctatttaaaaatttgttctgagcattttaaaatctttgccactgtggtcttgtcgtctttggactgggaatctcactaagtgagacttatgtctttgaggtaacactctaaggtaatgatttccattcttatggattaataatacatattttctctccaactgcggcaacacacaactaaaagaagttaagcattgtttaacctgtgggttaatcttacaaattctagtgtttttaaaaaaatcacacactatatgtatataaatatatgtgtatgtttactatgaatgaatataaatctgaatatagacacataatactatatatatgtatgtatatacttactgtaggtgtatatgtactgctatacccaccccctccacatattgaaagagatctcgaagacttacaagacagatatttataacaccagactattgaagcataatatatttaacagtcacaacatacctttatggatgtagacacaaacctacatagagaacgatgattagaatgcaagctgacttgattaactttagataaactcaagaaatagaagtgcaaaataaaacatacacgatacccttttttatttttagctcgactgttaaaaagccaattatctacctgtgaatgtataccacgcactgcaccgcaccgtactttgaggacacttcatagtcagaagtgagaaagcgtctgcccccaactgtcattgccgctatgaaattgctattaaaacagaaacctgaaagacttagtacccagctctgtgtgatcaaggaaaacctgggcatgagttggctgaggactgtcttgctgagtcctccgtgctcaccgagtgggagggtcacactgaagggacgaataagggcagagatgcgtcccgcttccactcgctgggagctggagcgggccactccgcggcggtgcggcagccctgtccggactccaccgcgcctcccaggggctctgacaccaacccaaggtaagctgcgcagctctgccacattttgcttgatgttgccttcacaagcccggtctctgccatatgctgtatttctggtcatttgcctgcatctgcttttaaagaaaatgtcacaaccgtactgcacaagtgcacatatttcgaggggaaaatctgcccacctgcattcccacgcggagacgaggggaccgagtgcatttggccagatcaggccactttgacacgctgcctataatgtggctcgtgtttgtgcgtccaggtcacgcgggctcgcgcgttccactttagttctcggtggattttctggttgggtttgggaagcagaagtgtatgcgatgctgatgcggatggaaggcacgcgagctatggaagaaggggtaaacgaacagagcaagctacgaatgctgtggggctgtggtctctagggttggatgctgtaaccgggagaggtgaaagccaggacgcaaagctcggacgctcgtgtacccggtggagttacccacttcgacccgcgcgggggtcccaagcccggcttaggctgtcgcggaggaggatccgggtctggtcccggagtacctggccctgtgtctccttcaacacgcagagtgcgcagcgcgtccagccggagcgcagccgctgtccccgctgtcctcgcagccgcggccgccgcggggacgtcagggtcccggcgcaaagggccggcgcctcgcctccgcccgcggccctcggctctgcgggaatccggccggcgccgcagccaccgccgcctggaggagggaggcggcgcgcatggtcctggagaagtttgttggcccggaaccaagcgcgccactgcacaagccagctcctttgaagcaggcgggagatgaagcttaaccttaccccagctaggtcgtggagggctctggaactagttgagtgggtgggcaggttacccacgtgggccccgtgccatgggggacagaggggaacgcatggtgggtctcggaggacaatggactcggcaatggagagaatgggacccagatgctgaaaatatatacttttaatagaaccatccaggaattgcgacagtgggtgatgtgagatctagagtgagtgagctgggagatggaagggtaacagaaataaattgtgcagcctccacccaccccatcaccaattcagactacttacttccaacctctccttggagaggaggtctgaggagcaaaagggatgagagagtactagaggcgctttagaagaatatacatctgcccacccccactcccactaatcagagctaaggaaagcaacactcctgtacaaatcaaggactacagttgttctttaagggaggaagaagcctggccgagaagggtggcctttaggttctcctgagtaggtgagcaaagcccgttgggctctttctaagtagaaagctcttcaccaggcgcctgcaaaggaggtaccgggatatcgccgtgttttcatggtgcaaattgtaagttctcaggcctgagatgaatggatgggattttctgatagggataattcttcagggtggaaagaggtagccgctaggaataggaaactcattctctggagggtttgaccagaatgatttccctaagtgttaagaaaactaagtaaggtgtcccagaaaaaaaaaaaaaagttccaacagtagaataggacaggagagccgctgcatatggacaggtacagaatagccaaaggaagggaaggaagccacgtgcaattatatttgcatctgaatttttgttatctccaagttctttccaaacagacgaaagcccatagtgctcatcagaaatgaaacctttccatctatttttctggtcctgcattttaatctcccttgctgaaatttctgttcattttctgaggcagcagaaacaggctgcgtcctgaatggctctagagacagaaggaaatatggatagaaactataggaatgggactacgtggaggttcaaacgaaggatgagcaacaagcagggataaaaggtcgtggagctgtagataacctactatgcagcccggaagtaaaacggtgtcgtggaagaccgagtgaaggggatgcgttgagttactccaggcaggccttcttgagaacttgtgcctcaaagaggcagaggataagcaggtttaacagaggagagcacgaagggaagacagaaggagaggcacgtgacagcttaaaggtgtcgagggatgagcgatgcggggtaagactgaaagcacaagttaggtgaagtctaagatgaagagagctgatgatacctgcagagaagagactgagaggggagggtgagaagcagagggtgctgtatgctgttgtatggaccaatagtaagacaaccaggtgaggaagccatatactgaatctaagggcaagatggtgagaataggcatattctattcaccctgtagaatgtgaacggaaaacacctcttaagaatgttctatcagaaagccaagagccattcagataaaaaatacactgaaaaagacgggtgaattgggaaaatatacaaagctatcaatatgaaattctaaatggcattgtatcttaggccgggatttgcctatggaaaacagaaccagagcttgtaatcagagagtagtggagggcggctggagttgttgatatttagggtatctgaacagctagtgcttacagctgtcattcagagaggtacgtcaataaagcagacacacagtcaagaatagagaaaactgcttaggtatgtccaaatagaattttccggttgacgtcttcagggaagtgaacactatttttgaaatgaaaggagaatatctatgggaccttgaagtatttgggcaaattcttcagtagtacaaatgttagcagtcaaggagtatgctttctgtcggggcaaagatcaacttcaacactattactattttggaatctcattaaatcacattcaccaagccttctagcgattttttttctctacttccctacaatttcttatttcatatgtatcctcctacaaatattaagcagtctgagtctcactgtattgactaatagatcttaatatttgtttcactttcatctaaaaaaattgcccaagactgcattccttcttccaactggttgcatagctacctacaggaggtaggtttcccggagactaaggaataaaaggtaacagtttatgtttctttaagaggataagtagagtggagacaatgtaagaaagcgattactgcttagtacagactgcaaagacgagtagtggagctcagtcagcctgcaaggcagcggatagtgaactgcttgagatggcattcacagaatacacaaaagtggcttttgaactgagagttgaaggcacagtaagagtgcccagatggtgataaaattggagagatggtccagcaataaataaataagtacataagtagataatgtatgtatgtttagaaagcacaatcaaggctacagttgcagtttagaggtagagaatattcttactatgtacaaagcccttattttgactcccagaacatgcactacccatcctaacccccaaatcgaggcagaagaatggcatttggggggtaatgttaatagtttgatggaaaagtttggaaagcagtagataagcagagagctggagagataagacttcactgtactagagccttatgtcccttgcttccagcatacaatgaaatgccactgagcatctacaggagagccctcacatgatcgggctggttttagaaacacaatattagccaggacttctcacacttacctgtaacctggcactcacactgggaggcgaggctaacactagtttgaaggagtccctggatacctagcaaagccttgacaggagagagagaggaagagggggatgaattttcagcagctgggagatggaaattggggaagggagagtggaggataggagtctagttagaaggctgttgtaactttcaggactagaaatggcctcgaagtaaacaaactcttttcatagtgaaagtgtacacattttcaaagggcatgttttggaaacagatttgacagacttccctccaggactgaggtgtatgagatcggggtgagggtgaggggtggggtggggagtacgggtaagggtggagaaggaactaaagatgattcggaacttcttatgttcctactttgagaatatttacagcaaaaacataaaggagaaaagattcctgtgcagtaagtaagagggtagaaacgctgcttaagtttcgtgagtttttctatgaatctatttcaatttcaataatacaataaattttgaaattatactgcacacctattccaaaaacagttgtgtttaattattagcttaggatttgaactgtttatgatagcgtttcctttcttgctggctttttttgtttcttcatgaaagatagactctcaagattgacaaaagaacagatgtgtggcacctgttgttgtgcatatttacacaatgccacacttcatcacagcagaactaggctttcctgatgccggagcacagtcaagaaagtctgattgaaaaatcaatcatccaccctattatttagcattccctctgggaggaatgctctgaaaatgtggcttcttgcagatgtttcacaggtcaaacatatttctctctctctctctctctctctctctctctctctctctctctctctctctcactcacacacacacacacacacacacacacacacacacacacacacaccccaaatcctttgttggaacaaatggaatttctaacaaaaatgattgtttgaaagaacaaattagatgtaccaatttgaaggacttgagatatttagagctttttctaagttattttgtaacctttctaacctgctgatttgaaagttgagctatgttacttaattatacagtgtacataaaatgaatctgtatcttctcccatcactttcttctttgtgtttatttgtttttctcttttttaggtgatggctctcatgtcgtacacagtctcaaagatgtctggtgaacttgtaaaatgttaattggcataacagtaaaagtattcatatgtgaaggagacttgattggatttgctcaggcattcactgacaggcttctgaacaatttcatccagcaaaaccctatcattccagccactgatccatccactccttcactgctctgtcttcttgttcagatttcctatccttcctcttgtttttttttttttcttttaaagaaagtatgtttactttgttctcctagaccacactgacaccaggcacttatttacttatttattgttagttttgtaaatgtgtattgcatgagtttatgtatataacatgcaaacatgtacccatagaacctagacacccttagtctccctggaactggatttacagccagcaatgaacttcttgatatagatgctggggacccaacctgggtcctctccaagagcaggaagtgatcctaactactgcctcatctctcagccctgacactagtaacttctatttgaatgttgctatatccccacccaattaaagatccataataaggctctcgtgtcagcaattgaatgaaggagtaaagttttcaatcgttccttcctttgctgcttatgttttctgtgcacaaatatatactatctattagaaaatataacaagaaattcttcaagacccatcatccttaaaattccttaggctttataattgctttaaagatcttgagaagtgaactaaggaagtttaagagacagcatccaaaactaatctggttggcaagggggtggggataagagtgggttacaagcagaaatcaggacctagttcctgccatggcaaagggaaataggctgtaggtagtgcaacctgaaggatttcagagggtttgtcttagcagatctactggtatctctgtgggctggtcagtgctgtcataagtatgacattacattgtgtggcactggataggaactctcagggctctgcttgggatcccagtaggagtaagtgaatatttatgagcaactaagggtctgagagctatgccttgcatgctgctgttaaacaacacatagtaacaacaaaagctttttgatcaagcaaacctgaacttgatcccaaggctctgggatagattgttctgtgagcattcatttctatggaataggcctctgatttctagctttattacaaggattggggccttgaaaaaggctctaacttcctttttccgtcatgtgtgtgtttttttttttgagagcgactcagttcctgaggaggcttaacaatcactcttactggctgaaccatcttgccaatccaatttgtttgggtaaaaggagaaaatgtgtgtttttaaaatcaataattttagtttttaatttttttcaaatatttagatatacattacatgatcttcttactctgtacctgtttttttaaaaaaagaattgtttatttatttacttattttatggatatgggtacactgtagctgtgctgatggttgtgagccatcatgtggttactgggaatgatggttgctcgcgccggacagcctcactatctccggtgagccccagtcactccagtgggccctgctcactttggcctaaagatttatttattattatatctaagtacagtgtagctgtcttcagacacaccagaagagggtgtcagttttcattacatatggttgagctaccatggggttgctgggatttgaactcaggacctttggaagagcagtcagtgctcttaacctctgagccatctctccagtccctctataccctgttaatgttagaggcaagcatagtttacttctgagctatgaatattaaaatatatactattcataaaatatgttttattttagaaaatgagaacacatagaaccaatactttctgtattgttattaaaaatatactgtagacatctctaatccaggtttaccagaaagccatttaaggtgctaagcaacttcagcttctgcatacattatgttgtggtgtcaccttaatcactgaactgggaaggattttggcggtgcctgtcttaaagctttcttgacctgtgaagaacagcacactaagtaatataacaatggcttgaagtaatttataaagctacctgataatccccttgctgagacctgaggggataaggtagaaaagtgccacattctgataaggggttttggttaaagccaagcatgaagaactccaaggtgggaaactagggaatgtccagcagcctgagcgccacctgtgtctgagggcagtgacaggaaagaggaaaaggacaggctcagacagtgcttcccattgcaattttatttgggaccaacccagcaaataacttattagaaaatttagaaaatattgctagtgaaatggagaagtggaaaatgtaaatgagatattcaactggatagaagatagacaggtagatggatggatggatggatggatggatgcatagatagatgatagatagaaaatggatagacgatggagtatagacagagagattgattgatttatagattatagatacatatatagatcatagatagatgatagacagctatatgatagatgacagaaagatgatagatgatagattatagacagattgattgatttatagatgataaatgacaaatacatatatagatcatagatagatgatagttatatgatatatatatatatatatatatatatatatataggtagatagatagatagatagatagatagatagatagatagatagataggcagcaaacagagagacagaagaagtcaagtaggaaatagtggatctgaaggaagatgagaagggagtctaggtactgtgaagttaaagaacccagtgaccattttcaaagggaggaaggcttggctattggaaattccataagtgattgagttaggatggagagtgaacagattcttgcttaagtttctgctgatcttgctgtgagatagtggtcagaggctcacacgtaaacatttgatcaactaagtcatatgatcttaaactgaaaacacttttgataagtaaggttgatgctaaattctgtcattctctgagcagcttaaggaatttgttgggcgatgtcaagactgaattcatatgcttgtgactatagcttctttaattctttgttgtcataataggagccaaagttgtgatgaaagtgaatttctaaaaccatttaacattttcactttttagatatgaaatcaacctgagtgaaagaggcaagtgtactgcaaatgagactaattagtctatagcagatatagcagcagatatctttagagtatgtagttcaatgcatacatgaatgtgactttcatacattaaataagacatctgctcctggcttaaaagtgaataaatcaaaacttaaggatgttctataacttgcatacaagtgacagaaaccacacaggaggccaagattttaattattatgtttcagtgctaactgatcaactaagagaaagcacaatcacagaatccctgaaaatttgatcaatatttgatgtagaatttatttaagctagaattcatttgtttaacagttactggcatacacaaaatagtagctgtgatcaatttgcaaggttgcatgaggatcttgactctgtttatagctagaattcaaaataaagaaggcataagagcagatgtttcatatttagagctacacatagagctttaacattgtaatcaccgcctctagcgactcatccagaaatatctaaaatctcgaattaattctaaaatgctgaatggagtgtttggcatttgtatgtagaacatcaaagatgataaaggtttttttctctaaagagagtctattaacagaagttagacaattgtgtgatgagttctcacatatttagttcttcaattaaactgtggatagtactaaataagtaatttatgactcttgaatagacatttttaaaaaaattgtaattgtcaaataaagagagggatccattacattttccttggaagttatttccattttaactaattaactacacagtaaagttaatttaaacaatgtttgactttttgtaagagggatctaaaaatattttatttgtattattttgtatatatttggatgtgttgcttgcacttatatccacacaacatgtgtgtgcatgatgcccacagagacaaaaatagggcatcagatcacctgggattggagtgacagatcattgtgggtgctaggaattaaacctgggtcctctggaagagtagccagtgctcttaatgactgagccaaatctccatccccctagagattttgtctgctgagtatttcattgtaagatctatagagcaggaatataaattcataaaggcaatgatgacattaccaaagcattataaaatgcacaataagtactacacgtataagtttccttttaaacagaatgaaaattgcatatgtgcagtggtaagtttaggagtaaggctcagtccaataacaaaattgttcatgtaagatatgatgatgtcaattaagccatgatatgtcaatatattcccaaatatattgccaatattcccaaacagggtcatgaatgatcacatcatgtttaaagttctgtatcatggaatttgataccaaatgtataataataagagaaaaatacagtccactacatttaaaagtttgtgtatgaaggcatgcagtcagtagactgataggaaaacccatggtctctatttcttaggagagaaattttgtatggcataagctgataaagagtgtttaaaaaataatttaaaaagtaccagcatggtgttccttcccacctttgatgatttatgttccagatgaaagacaaacacagccttatattttaatatgccttaaggagcacaatagctgtgcaactttctaccctccatgctgttagcatctacctcttattgataaccccattattactttaatgtcacatcttggctgctctaactcctataagtcaggcctctgggccacattctcttggcccctagccccagcactctccttgcttctttagcccgtaatggaccccgtgatgtcccttctctctcttcatggtctctagcctgggaaacttaaaccctatctatatctcttcaccccaactgttggctactggcatctttatttaacaatcagtattaactgccagcagggtccctcaggctatatgcagactccaaatattggagcctagcacttagtgatagaatataatcagtattaggccaacccaaagggtcaaaatgcagaatgtatgaaaatgtaacttaataacagctgactgtgttaagagaaaacagggaaagattctgagtctcatcaccacagaaatacaatgtatctctacagaaatacatatgttcacaaggtacataaaatatgtttagtatcactcaggaaaatactaatcaagaccacagtgggccaccctttcattagtatggtatctataaaaactaaggaaaatatcaatgtaacagagaggatggagaaatcaactcatctgtgcaccactagtggaaatgtgactggtgtgggcggtatagagaaactgcacggtggctcttcaggaaattaaaaatatgagaaccatactgtccaccctgtgttttcttctttgagcatataaacaagagaattgtaactggggtcttagactgatcctgtgcatctcttcacagcagccaagacataggagcaaacaaatgtcccttgaggaatgatgaacaaaacgagcatctgcagactgtatagtatcactaataaactgttaggatcttatactattggcttggaaacagtttagtcagtaaagagcttgctgcacaaatgcagggaccatcatcaatgcccagaactcacttgaaaaaattgggtggtgatgtgagctggtaaacccagctctggggagaagagctggctggccagctagcctactccaagcagagaaagtgagctgaataagaaaccttgtctcaaaagaacaaggtggagggctcctaaggggtgatacctgggactgacctatgccttccacacatacatatgtatatgtgcagtcataatcacataaatttacctttgggtacacacacacacacacacacacacacacacacacacacacacgcgcgcgcgcacacacacacacacaaaaccaaagatattgtactaaatgaaataaagtcaccaaataaagaagacaaaagtggaatgactctgtgtatttaagatgcctacaataattaaacttctagcaaggaacgcaaagtgatatttgaggatttgcaaaaaatgagatggcatgtttttggttaacaggcatagattttcagttctataaactgacaagaactgtaaaggtggatgcggctggggattgcaaagcaatagcaatgaatttaatcccactgacatacatgcctctaaatggatggaatatgaattttatattataccttaccacaaattttaaaataaaaagaaacaatcgtctgtgcaatatatctttaaaatcactaaaaaggtgggagaaatttaagtgataagaagctgactttatgagtaatcaattgagtaatcgactaagaaggaatccagaactatttcccaagcactcataaaaatgaaagtgtgtattgaaacactcaattgcatgttagagcatcatataccctgatatataactatatggtatgtggatatcaattgatttctccctgctggtgatgattttgtggctgtgatggaaaataccaaacttgaacttgaacatttctgccattacagatctgtggccatttgtttccatggttacaaggcacaatgaggcacactggctcttggaaattgtggacctgggtgacaaccttcctgcttcctgcatgtacctgtctgacagtcagggacaagccaggtatgtgggtcacctctctacctgattgattaatgttatctatagttcttaagccattaaaaaaatccatcaaagcaaatcttattaaggttggagaggccacagattagctttactgatagagactagagaaatcagtattttctactactgaccttcagagtaagaccatggcgaatttccaaacttcatgtgcatgttatcaaacttttgtctgtaattgaaacttataaatatgattatatgcatgtatgcctctgttcatacatctgacatcatctcacattttagcctttaaaaataatttgttcatgttataagtctacaagctcagcactaattagaactaacaaggacatgtctacctttaattaagaagaagtgaaaaagagactcagaagtgtaaaaagaaatagagtttaattgcatgtcagttttgtggtatcttagaggagagaaacaaaaggtgaatacatctttaaaggatccaagaaaacagatagtatttattttcagttattaaatttatgaatcttgtcttaaatattcccaaagggctttacagcgatttggagcatttattttattttattatttatttactttacgtatatgagtacactgttgctctcttcagacacaccagaagtgtgcatgagatctcattacagatggttgtgagccaccatgtggttgctgggaattgaactcaggaacctctgaaagagcagtcggtgctcttaaccgctgagccatctctccagctgatttggagcatttatgttcagcaatgatttttaaaattaactgtgactgaatagattattaacctatacagcctttatgttgcaagttagagtgactatattagagaatatataatgtgtgtgtgtgtgagagagagagagggagagagagagagagagagagagagagagagagagaaagagagagagagagagactccatgtttactgagtaccacatgagatgcattcaggtgataatcacaaatggtgttgtatcgtgagtcagaaccttgctctgtatattctcttgagcatttcttgagagtactcctcagctggttatcttcaattactttgttttaatctctaactttagcaactcgttcatttgtaagaatacttgtcatcacctctgcctctgttaaaataattacttcactgtaagtaaagagaggtaaataggtataaactccctctcaaggaggcttttgagtttactcacacataggataaaacctcacttataaacatttaacagatccttgtacatttaattatttgtcaataatttcacaggaagcccattttctttgtttgttttttgtttgtttcttttctgagacagggtttctctgtatagccctggctgtcctggaattcgctctgtagaccaggctgcctgcctctgcctcccaagtgctgggattaaaggcgtgtgccaccactgcccggctaggaagaccgttttctaaaacaatccacagggatgtttaaatgctgtattaatatattattaatactatggctgtcacaatcttggcaaaaagcatcttttcttcggcgagaaataagtgaacagcagcagcagctaacaactccagccatgttacagtaaaaagcgcgtagggagagtgactgtattctgaaaatctgcccgcgtaagtttatgttgctttaggaagagcaggggatgtgttgcaatttaacactgatggctgggcttcctgacttagaagggaagataaagctttgtttgagtggcccaatattttggccatgctaatatgtagaaaacggctttgaatggaaccatggttagaaggatctacccatatggttctctggttttagcaagagaaagagtcatggcatgtactgatacctgactgctgttgatgccatggtaaactcaggactttacacctttgacaagccaaccagttgagtctaatgcaggatgaatgcagcatgtggggaaatactctctctggggataattaatgccattttattttccttctgattcactcctaagatggttatcttccgttattttgttttaatctctagctttagtaacttgtttactgtaagaagaaggcttgttatgttttacacacacacacacacacatatatgtatatgtatatatacagatatatatatatatgtatatgtattcaaatgcattctagctccaaataccttactgaattagtttctttgaaacatctttccttaagaacccaagtcgtaatatttacaaaacattgcactaaggggattattcgaggcaaaactgagttgggtcaagcaatttgctagaggggtgcctgcaaagcaagaagccatgtatattgcttcacttcaagtatcatttgcatgaactgaaaatcagcacagcactgtcgcagggtcggttggagaacatgacccactgccaccaggtctgccaggagactcttcttgtgtcgtgccttgtgtgtctgattcacagtgcaaggttcccgttttagtctcctcatgtgcagacctgtgtgtgtggtcactaaccgtttaccggagggaagtgattacatctaaaaataaagtctagcaaatctgcgggagaggctagggtttcaggtctggacttggtgaggttgtcaacagtttacagttaaaaccaaatgtaagaaaggataactcaagtctccgtggctgtcctccatgctctgacagcatcagtgtctccgtggaatattgttgcaggtggggcagaatttaagaatagtttggaagagactttaagcatgtaaattgaaaaatcttgaatccaggcacttccaattctttgattaagcttacattatattcacattatgggataagatacatttgtgtattttcatactgacagtaatatccacttgactatttgatagcttcacctgcgttgtcagggtagagaagaaaagcatattgacatatgtacaatgctgggcaatctccaaatgtgctttaatcagttgcttagaactggatcctctataatagaactgtccacatcacatggttaatttctcttagtgtatccttgtattccataacaaattattataggaaatcttacaaaggaaaccagagtgaagagcacaggtggaatcaaaggcagggcaccatctaagagaacttttaaaaacaatttccaaacagcacataagctgtctagtttattctgaagactctcacgggctcaaggtaacacagaagccctgttaattcaattctctgctaagtgaaagggaagtttgttattctgaaacatagcttatatttattgataaaaacctcttattaatctcatgtagaaactttaaataaatcttagtgctcagtatggtaccacctgaaaatcttcaaagcgacacacactgtatttaactcttaaatttggagagtagcagaagagatggtgtccggagaacatgcctcttagccaagtaactcctctagatgatttggttccgagctcactagtgaaggtacttgtatgactgcttgtgagctctcccttaaaatagttctgccctggtactttttatcatctgccacccccttcatagtatttctgctacactatagtccagtatgctttgtctactcctgttagccactgattagctcccagcattgagcagcacatactcagttctcaaatgctttcacagcatatatagtgtgtgcacaggggctggaagcacaaccaggaaggatgagtagagaaccccccagactacctccatccaatcagaaagtcttgtggaagagttgggggaagggctgaggaatgcagaggggatggggactccacagaaagaccaacaaagtcaactaacctggatccttggagtttccagagactgaacctccaaccaaagagcatacaagggctggacccagacctccctgcacatatgtagcaaatgtgcaacttgatctttatgggggtcctttaacaactggagtggaggcttaccctgactgttgcctgcctgtgaatcccattcctctaactggtcggtcttgtctggcctcagtggaagaggatgtacctggtcctgcagggactgtggttgcctgggtgggttggtacccagaggtgattgccctcttctcagagatgaaggggaagggagacatggtagagggtgagtctgcagggtttcgatcaggaagtaaagtgaataaatacatttaaaatacagaattctgttttagcctttaatatatatatatatatatacatatatatatatatatatatatatatacacatttatatatgatggcttagtcagtaaaaggcttgcctttcaatcagaagaacctgagttcgatccccaggacttacttaaaaaaaaaaaattccaagcatggtggcacactcttgtgatttcagccatagggaagcagaggcttgcaggtcagtgagcctagattacaatatgagttgtaggccagtgagagaagctgtctcaaaaaacaatgtgcatggctcttgaaaatgacatcggaatggtcctctggtctctgtatacatgtgcacacatctgtacacaaacccatatacaccttcacacgcacacacacacactctctctctctctctctctctctctctctctctctcacacacacacacacacacaaaatacagaacacccaagagatgttttccatctgtttatgcaaactaagcagtcccacatctgcaaacacccgctgtctttacgttctccaatgctgatcttgaggagaagtgggatcataagtaaggaaagtaattttccttaatgaaggcttgagattgataagaggactatcaaatgagctagatttcaaattatagttttataagtgaaagtcatcgcatacattatgtatgtgtctgtggatctgaagaaaggaagaatcaaggcagaataatcaaggcacaataatcaatcaataagcaaatttccccaggtactaaggtgctctcgttctcatctcttcttgtcagactttctgtgtgatcgatcgtctgtccccgtgcttcagaacgagttatgacctttactttttgtgtgcattgcagctttgatctgtttcagttttgtaccttccttccctcccctcccnnnnnnnnnnnnnnnnnnnnccctccccttccctcccttctcttcccttcccttcccttccttctgtctccctccttcctcccttctctgtctgtcctccttcctctttctctctgttgttaagattttagttggggtgtaatatttgtatatatttatgtgatgcaatgtggtgatttgatatgcttatataggtgtggtgatcaaatatggtaagaggattgtactggctagttttgtgtcaacttgacataggctggagttatcacagagaaaggagtttcacttggggaaatgcctccatgagatccagctgtaaggcattttctcaattagtgatcaaggtgggaggtccccttgtgggtggtgccatctctgggctggtagtcttgagttctataagcgagcagcctgatcaagacaggggaagcaagccagtaaggaacatcccttcgtggcctctgcatcagctcctgcttcctgacctgcctgagttccagtcctgacttccttggtgatgaacagcagtatggaagtataagctgcataaaccctttctttcccaacttgcttcttggacatgatgtttgtgcaggaatagaaaccctgactaagacaaggatttatatgttcttaaacatttctccgtgtggggaagtgttaaattcctattttctcattgtttctaataatttatattataatagtataataattttcataatttataattatgtattgttaacttgcagttgtttcttctgtaagatggaacattgaaacccatttttcaactttcccctttccctctttctctccctcccttcctctccttctccttccacaccctaactctctctctctcttcctttccccccttctcaagtttctagttttcggaacaaacacctaacataaggaacatatttggcccacactttagagttcagtttagtttccagcacggcaagaaagtcactgtaccaaaagattaagatgactgctctctttggttggtgcagaggatggccccatctggcatcaatgggaggggaagcctttggtcctgtggaggcttgattcccctttgtggggggtgctggacgggtgaggagacaagagtgggtgagtggtgaaaggttcaccctcatagaggcaaagatgggggatgggatggaggtttgcagaggagaggggggacaacatttgaaatgtaaataaataaaataacctataagaaatgacgggtctcattgcagcacagttgggaagctgagagatgaatgtgggtgtttagcttgctctctattaatcagcccaggcacccagcctacggaatgatgctgcccagacttatgttgggtttcttaactcaattaacctaacagaggtctccccctagagagaccacaaagactgttgtctagtaatcctggatcctttaagttgacattaagcatcacgccttcaaggattcatgctattgctattccaccctctacttttgatgaggtgggcttttcttttttgggcatcaacatctgaacaagaacagacagtatttttcttcccatggcagacttgttcttcttaacataaggtcttccagttatcctcagccgtccaccaatgagaagacccaattcatctttagggttgaagcccaccatgtgtggatatactacattttctttgttcacttacttgtcatcaggcattttggttgactccatagcttggctgttatgaatattattttaataaatacctaaatgaacatttttgatgtaagaattatagttcatttgggggtatatctaatctagtagtggggtagtcggatcatgtaatagtttcattctgggttctctgagaagttccatactattttccacagaaactgtaacatgttggtgtcatcagtggacaagagagctcctctccatcgccaccatctccatctcttttttgtctttttcgtcatttgaattggagcgagatattctcactgagtttggatttgcgtttccccgatgctgggtgatgctggcattttccatgtttttccccccttttgtacattgtcctcggagaaattcagataatttgcctgtttttaaatcagtatctgttttgctcttgaggttttagagttcctttcatgtctggttattaaccattagcctctagtcagctgaatagtttgcagatttttttttttttttggccatctgtctattgtctctttattgactgcttcttctgttatacatagcttcccagttttatacaattccacaattcataaacttctatgcagccatttcaattgacatctcaatcttaacacttccagaaccttccactgattaatacacacgctgtcaaataggggattccactgagtcagacttttatctagttaagcagagtaattgtccttcctccttctagacatccacctgccacatcttgctgattcttgcttcgcatttcctctgctttttcccatccctgatgctttgtctgtagtccaggctaacatcatctctgggctcacagagtgtgggaaagcaaataaagtagccagataagaatctcaaggaccaggctaaatctgaagtttagataaataatgaatgatgttttcatctatgcctgggtattccagatatttttatcagtcttacttatgctaaaatattttcattatgtatctgatatttgattatgaaacttttattcatttcctatgttgggcaatcctatatggtataatgggaagacacgggtgagcagggaaggctgagctcatgtaggcacagttgagtggaggtacaacagcaatgaggataagacacatgaacatctacaaaacatccagcataaagattctgaggcagaggacagctcagtctaaggaagaaatggtacagaggccaggatcctgcagttgagggcaagaggggcaatgaacctcaggctactgtgattgtaaaaactctgacgtctaagtctgcaaagtcaaaagagagaccataggctctggcacattgaccagagcaatacacaccatcttgtgggttctcctatgaaacagtgtttcgcttgtctgtttccagaaaacataaattgttctcttctgcattagtattctaagtctttctctcagacttaactcacacttatttgagagctgtaatagagtcacccatttttacccataagaactatgttgtggatcccactggctgttacaaattatggttagcactcagccttacatacactgtctgccctatacatacattgcttacctgtagtgaagagcagcctataaattggactcagtaagagattgacagtaaagcaggtaccaaaaatagaaaaatatggatattctgtaatatacatttaaattaaaaattatttctggaatgatttcaattaatatttgcagatttcagttgcacttaggtcactacagctcatgatgcaaaactcagaacaggagtgtttctgtggtgtataatacacaatgccctactgctaaaaggctgacatgatatacacactttgtttttatctttgtatttaaatcatatttagatatattcattttgttttatgtgtttgaatgtcttgtcggcatgtgtacatgtgcaccatgcgagtgtctggtgcctgtagatttcagaagagagtgctggatctcctggacctgaagtattggttctggtaagctactgtgtcgatcctaggaacccagttctgtttctctgcaagaacaacaagtgatcttaactgatgaaccatccctttatacattttagcaaagttaaaatactaattatatcctctccctgcaaacgactcattttcttttcctgcaatacgtgaagtgttttgtaaatactaagaccttcagtaaactataaagagtctaatagaacatgcttgcctttattcttcatgacgctgaaacctcagtttcctcggtagcttttgtatacacatgaatgaacttacctcatgctttttcctaaactagagttgcagagccaaataactcatatttgatatgaccaccagtaaacaaacacaacaaaactgaaacaatagattttagctggccttagatatggcaaaaaagggcgaaccaatcaatcaatcaatcaaccaaccaaaaaaaaaaaaaaaaaaccctaacaaaaaaaagctgaagaaatcccaacatgctgtaagtattctggtgaataaatactatattaaaatgatgacttatgtaactcaaaatagaagaaaagggagcatgtatttaaagatgagcaggcttttttatttgtcttcttgacaaacaaaacttctgtttgtctatttatatttttatattgtgtgtttcagggatcttgttaaaattttcttgcctataaccctattcttatacatatgtttaatgtttctctgcattattaaaaatatttcttatggagctagagatatggctcagtgtttattgacacttggcacatgaaacatttttaaaatgtcttatgaaaagaagaaaacttctctcaagattctagtaggccaaggctgctggtaaaagcagaaaggagctgacatgttagtgtgtgtgtgtgtgtgtgtgtaaaagtgggattcattttttaagcacacatttaaaaccaatgggaacaaatgtattttattaaaggagggggtttcgtaggtatgttattactttgtttagaatatgttattgagagatgtttaataaggaagaaggaaaagttggtttacaagaatgtgttttattctgaactctgccattgagtagctcagtgattgtgtttctctagggtgactcttttttcagaagaccagggaacagagggttaagagatgcctcttctttaaaggcaagtgagataaagtcatgatgtatgcaaagttgagctgctgatttcctttctgtttcctgccgctcttttcaggatcccagcagcctcatagacagcccaggtctttcaagccatgtagagaggaaattaagtctgacaatgatcagcattaacacttcagcatgcatctgctgaaatgacttgaatttgcttgtgagaaactgttgagttctgcaagcactgcatctttctgaaaaggatggcattcattactcttagaaatactccagagagcctctgagggacagagttgctgtgcttggtcctgtttcttcaaatattgtgacatttgagtctcttgcataagtctaaagtcacattactattaaaacgcagatgtatgtttgtatgttaatattttaataaattaacatattcaacctgtaatagttaatcccactttttattaaaatgcatatatcaatatttaaattaattcacatatctagcttatggattggcactgatactgctttgtccattttgtgcagcaaattcatgaatcttcatgaatttatcttattgtgccttaaatcttaaaacacttggttttaatttgctttgctcatctgttcacaacaaagcatgtggtctaaggtaggaaatggcatttatgttttataaactgaatacttttaatggagaaatatataactattgctggaaatgttgaatcccatttattttcagagcagggtgtttattccgttgacatcaacatccatttgctaggaagagtttaaatgagatttacagtttcctactggagacaggccacacacctccccctccctaccaaaggctcacagcagggaagcccttctgctgcccagagatttgtcccctcaatcacatactgaatctttcctgtatgtgcacacaggatgaagaatgcaaggttcttattaccatttattggcttataaatatccgcagccaatatgcacttttattggaatttttgataaatttaaattatagaattgtttttaggtcaaaatatttactcaagagggctgctgggtttccccctgtgttgagattttgcatatatagggctgatgtcagtagatgttaaaggcacaacacgtgggatttttttttttacatgtgtctgtgtacatttgtataactattaccccagtaaaatcataaaatatatcctggattctagaagatttctgtgtacctgtcctgaggcaacacctctctatggtaatcactcctctgaagcagattggttatataattatcacattaatggaataggtaaaatttatttaggggggatgatacttccctagttagtttacttctaaggtcaaacagtttcatgtatcaagtcaaataatccttccttccttccttccttcnnnnnnnnnnnnnnnnnnnnnnnnnnnnnnnnnnnnnnnnnnnnnnnnnnnnnnnnnacctcttgttgataaacttttaggttgtgactctctaagtaacaatagcatgggcagtcttatcgaagaagatcatttgcagtcctgtttggcttttacgtctctttgggtcattgagttttcttacttagagtcacacatcattaacttccataaatactgtcaaaccgttttctcacgtggtcctgccactttccaccaccacatgccacggagaagcttgggaaatgtcaccctttgccacaccctcatcaacactgccagtgacggttctttaatttgagtaatttaacagaatcttagcacggcttcctttccacctcttgattactaatgaagtggaacacttctgattatgtgggttggtaatttggatattctgtcttgtgaagtgtgaaaagtgttttgaaacaaacctttttatgatttgctcatttgtgggagcccagggtttgttctgggtacagtacttcgctgcatagtttctctgcttgtgtggtttgccccctctctttaaggtctatgtgttaaaaagcaccttctcctattcgatggcttgtcttctcacacatctgatcttttgattaacacgtcttttaattttaatggagacctgtttaccaatattttcttttgacagtaatgctttacctctttcaaaacatcctttgcttctctggtttcacaaagctttatgcattactgaacctctttaggttttacttctcacacttatagtaatgtattccagtttctgcatgtggtgtgaagatcaagattcagtgatttcctgtatcaatgcctaacaccagaccccactggtgaaaagaccttccatttcccattaaatttctgtagtctttttttttttagtaaatgaagctatatgtgaaagggtctgcatttggacttcctgctctgtctgattaacgtgtctttctatatgtacaccaatgccatgttaaaagaattcctggtatctcacgtctgtctccaagttactgttcaactttgcctctagctattttttgtttctttgttcttccatttaaactaaagaataagcttgccagttctcaagcaccacacacacacacacacacacacacacacaatacatacacacacatacatacacacacaccacacacacacacacacacacacacacacactgtgacttataggaattgtttgacttgtaagatatgtgctaaccctatttaaaccttgagaccgttctagttaaatatgctgtgctgagtccatccaaccaacattagtctgtgtgcatttttcagacgaagggctgaggcattcagtgattaactgggaaatcagaggttttcactttcagccaagcagatgaacagcttggtcataaggagtttatttcctgtttgtactataaagtttaagatataaacctttgacgtgtggaaaattgaacgtgtgactgaatgatgtacttagattaggagtgtagctgtggcatgatttgaaaattgggtggcagttttgcctgcactctttctttcgttagtaggtctgaattagatttaaatatatcagttcaaagaataatgtatgtgtatagattactgcgtttgtatgatgtggtttttttggacacataaattcattgaatagagattaactttatctttatctctctgaatatcactgacacacaaagtattaattttctcgatttttatcatataagaagatctctactttctaattatttttaggttttttttttctgttcatgttccattgtgtcataaaagtttacgatcatgatcatctgattacaaaacctggataaagttatgataaaatacagtaggaactcacttgtttaactggttggattgaagagtttaatgaagctgtgaaattcagttgaatcctattgtcaaaactatagaaacacatggacgtctgagcaatagtgataacactcgtccacataagtgtgttttcaccatgggccaggcaatattctaaatattttatatgaacaaacattaaactttcatagacatacagaggggaggatagcattagcctcactttacagaaatctaataaatgattcaattaggttttattttcaattttatcttctttatgattttatggtagcagtcaactttatttgggaaaagtacgatgggaaatttagttcaaattgtttgtttgtttgtttatttatttatttttaaatagaaacaacctgccctacactgagaacagagagatatcaagatgacagaaacaaatctgaattgtcaggtaagcattataattctttgctaggtagtactttgtgcgaagttatcaccagatacaccatagcccaatttttggggggcatcattatcagaaattttgtggggtcccttcatagtggccagatgctgtatgattgaggcccccgggagtggggattcagggagggtaaagtatattatctcattaaaggaataactattccacccatctctacagtaggacttaacagggaatgcactgtcctagggtggctcctcagccagctcattggccctgccagatggaaagttaggtctctaccaagccagagatttttatcccctgactagaaggtgagccttagtgctactctgcccgcattactggttaagatcacagcatccacatagagaagtaaatgctgaaggagaaatactgacagcagagttccttattgtctcatctcagagtagcagcaagtccctgtcccgtctctgttccctcaccgcagaatgaacaaaagctgtgtgaaatcacaggcatccatcctgccttctgctgcagttttgaaaggagagaagaatatttatgaggtgttttagcatccagatgtcacgatttccatacaattttggtgcaacatttttatattttttattttttctatttttttgggctattaatgttgtcattgctggattttttattattgtcattttctttgcttgtttgcttgcttgttttttgtttgtttgtttgtttggttgtcggttttctttttgaccaggtcatcccaggctggtctcctcctgcttcagcctctgaagtatattctaggtgtgtgctactaagaccagccaacattcctattcttctctcccaccttcctttccatcgcctctctctgttttctccatcactctcgcacacgcgagatgataacgtgtatgctgcgtctggattctaagcatttcctcacgttcctataattctcctgaagtatggttttgtaagatgctgtccagattttaaaccagttactactactttttactccaattttctgtttacacattagagacggcacaatgaactattgaaataacttgcttaggtcaattcctagattaaatcggagtggtgttttattccctgtaaacatctgtgagggggcaagcatggtggcaagcatgtgcaatcttagctaattgctttgtattcagaccaggcaaagccaaaaaaaataaataaataaaaaataaaaaataaaaaaataaaaggacgatatttacgatctgttctttagaaagatggctataccttttgcatgcaaacagaattttattcttctgtaccataaaaggaaaataaaaaaaaaagaaatggaacacatttgctgatttcaaacaggagtttttattttagtttcttttgttttttgtttgtttgtttgttcgtttgtttgtttttaatcaatcaacctgtggatatggataacaaagaatcctgtttaaagatcaatacgtctgtgagtttattgctggttttaataacatgtcacattttacaggctttgatctgggagaaagctttgctctgaggcatgcgttttgcgaaggtgataaaacctgtttcaagttgggaagtgtgcttcttatcagagacactgtgtgagtaaagtaatttgtttttcttttcatgttaaaaatgctacaaaattattttctaaggatattccaaattattgctcaaaaattaaaaagctcagtagtgtaccccaaagctgtaacaaatacacaacttatgtatttattattgataaaactctgaaatcaaatcctttatatgcataaagaaatggtctttagaaaattaaatatattttggggggagaaacctaattgacatttaacatagacataactgatattatattttaaaatgtgaactttgaaacataaggctcaatgtagattcagagacaaaagactagtactatatttattcccgtgtatactctgctctgtgattaattccaataacagcttacccttgggtgctctctttgtatatggaatagagtttaaagggtagagaaattgttttgcagggctttttgtttgtttgctatttgtatcttgggtcagacttgaacattcccgtgtgtaaatgtaccattgtggaagagcactatgttcgccctggtcttagcatgcacatagatgacttcgtgtgaaaatgaattgacatgcgtgcgtgttctcgctttcctcgggagtcttcttgcctttccagtgattctttgttttagacttcctgttttgtgacactttggattactttaatttaacgacgttcttctgttcattcactgatgggaaacaaagatactgaggaagagcataatttggtgttgcagggaatataaggagggaatgtcacgtgggggggggcttctgtccggtgccataaggtatagctgtttatgggacctatgagcagccactgaggacagcccaacagttctgtgcttggttacacatatgctgtaaggaaaagcaaggcacacatgcgtgcatgcgtgcatggagtgcatgcgtgtgtgtgtgtgtgtgtgtgtgtgtgtgcgcgcgcgcgcgcttatgaagggggaggttaactagtagtagataacatttattaatacatttagaaaagacaatacattatgttcaaaaattaagatgcattttttttcttacttctttttttccgtattgatctaaatcccagcaatcctggcaatgtgggaaaagaattgattggacagactcattttaagttcactggacttttaggaaagcagattaagcggatttgaacggtactttcactactaggcaatgctgttctccccttgagtccacaggattataaatgtgaggcttgaattgaaattcgtttccaaccttagctctaaatcagtcctcagcctctagacaatcaatgaaagtgcattttctggctctgcagagcataaccctgttcctccaggacaggaaacaggagggtgtctgcttaagccgactcccgactcccgagtgtcaagtctcttgactcatccccaggttcgttttgctcaggcagccaagtgtgctaggatgcttctctcgcatatgccattttgggttttcaatgggcctggagtaaagttgcagctatttatacgtttgtaaataagctgccctgcggagtcagcatgggaaaaggcggatgctattttatatggaaaatgaaaatgctctccgtgcctgaacttgcttttattgttctggcacgttccacttgacgttcaggagggaagaagccttctgagtgtgggaatcagaaacctatctgaggctcaatatcctcagcctggcttcttgagagacacccaaagtttgctcaggcaagggttttcaagatatctatccttatagctttattactgtacacttagagctatattgactctagggtatctgaagcgcttgctatgtttttcataatttgaaactcctgtttcttcagtacttcttgagctaacaaaaggtgattattagagactggctctttaaaagaatctaggtggcctcctatttagttgtctgaattatcttgtcagagtaagttttttgtcccactcttagggttcttagattcattgataaaagtatttaagaatggattcaaatggatccttgaaaacaattttattggtgttgcaaagagagacactgagggtatctaagtagcaaagctcatcagctgcccagagaaggagaatgggagagaaaagaaaagcacgatttttgacaggtagaggcatgtctgggagtaaggaggcctggagtgtcagggagggaaagcttgcttcgctcagagtataaagatctccatataaacggtggaaagaacagggaaagttacttttctgtgtaattgcgagaagtgagcagttgcactctatatggatactgctcagatgcactcggtgagacactgtgctatgcggaggagtccagggagggcaggaacagtatcattaaggaaaactactccacctgtctctttagcttatcttaaggggcaggggggcggtgtctaccttgcttggaccttggacaggccactgacctggcccaactggaatattacatcatcacctaggccagagatgctcttctctcttctggatggagtttttttcttcatgagctttaattactactcacaatgcaagggtgatgggtcatgaattttgaatttctacgtattattgattctaaagtcatggtgctcagagctggattgggaaatagatgataaagttcaagacacatattttctgaattattattgattccaatgtggtcaattaccctatctctcaggctatttatttatatatttatttagatagtgaccgtctgaaatactatgttagcatggattctgggctgtaccgatttgtgtagatttttagcactatgacccttcaggagaaaggaaagtgtagcgcactcaaatgagtttcaaatctgtaactgctctgacttatgatacaagtctggaagattttgggttttgcatttcaagtaacacctatgaataagggtgaagggatgctagccatgaaaaatatccagctaattagactttatgtgctaggataacattctttatttgttaagtatttaacacatatggcattgggtatgttaacaatcttaaccttttgcaatgctaaaacaattctacctggaatggaataaatacgttctgatttttgttaccaaaataatctctagtgagaggagtcatcttctctgtcccattaattacgttgttggttactttacgaaagcagggttatatagtaccaacattttcatagatgtcagggatagtcaaggagagggtaatggtggacatgagaggccaggagagggggtggattagtttactttcctttgaaaaaatgttgtgaccaaaaaagcttgtgaaagacagagtttattttgacttatgcttacagatggagagtccataaaggcaggggaggtggggctggtagcaggtggctggaacagggagcatcttcaactacaaaaagaaaatcgaatataccagaagtgggcaaggctgtgatctctcaaagcagaccttcagagatgtgtttgccttagtaaatttgaaccacctccatagacagcattgctctctgggaaccaagtgttcagatacttggtggggcttttcttatttaaaactaccatagtttggtagcagaaatgatggtgaggggtggcagtagacactaagttacaatgagatgggagtaagtcttggctttggattgtatagaagggtagtcacagataacaatagtacattgtacgtttcataaagacagaaaaagatctggaaagtgtctccttaaggaattgatgaccatttgaggtggtagatatgtttaatttaactttaatatcatacagtgcaaatatgtctcaaagttatatgataccccattactatataataacttttatatataattagagtaaatttaaagataggaagtgtgcttgcagtccattgagagggtagaagtgtcaataagcaataaaaaatgttaagaaaatgtcatataaataaacactgagcatgtctcaaaaggagggagtaataggtagaaagtattctgatctgtatttctgtcctttagactttttcaaggttccagactttagcatctccttcggaaatcacctgaacctgagtagtgcacgggatagcttatgtcaaaatgtacatcttgtctttgctgaaagatcgatctcatgaacatggctccttttcacatggacttttatataagctcaggtctataatagccgggtcttatagggagaacaacaaaatgcaggaaggtgacttttaatctctatgtatgattatttctgatagtctgatgtttagaaataaaaatccatctttagggatcttaatagagaatactaactctgttctatcaccttcatattcttgtgtattttgtactttctgaagtcttctgtagcattagggcctgtggttttaaattcatatctgttgtatttaaacttaaaactcttgcaattacaaataagggtgagagtgctttctaactaccatagatgatcctagatggttgtgttagataaagaataagtaacaagtagccttggtaagtccctgaaactcgtgtaatcaaagtttatttcagtcaacagactctgagctccttatggctcagcactgaatgacactaaggcttccactggtaagggatctgaccctgtcttttcttcctggaacctgctagagagatacagaataggagggaaagctacacggtcctaaacacttcacagctctgtccattttcctacaaatgtcatgatttcattttcctttgcacctgcacaagtatccagtgcattacattttcttcatctattcagctactgatagagaagcgggctggctccacgtcttagttgttacgaagagtatagcaataaagatggaaacgttacatcacatgcagcgtcccagactgataagccaaataccacatatttcctctcatatacacacataacgtataaatatataattattaatccacatatagctacgaaatttaaaagggaaccacaagaaaggggaaagtaaaggagaagaaaataaaacagaaggtaaaataaaacagaaggtactatgacatgaaaaagaagacaattgactggcgaggaagacttgcaggagccagtcaggaggatgggggagggaaggggagggtgaggattgacagggacaaagtgtgtatgaaaatgttgcaatgaaactcataatttcatatggaagaaaggaagaaatagcagctagagatagcagagttgggtggtttagctgttaaaaacacttagtgctcttacaaacaattgggttgggttcccagcacccgcatctggtggctcacaacttcctgtaactccagttccaggaggacccaacacttctggcctcttaagatatttgccctcagatgcacatacagactcacgcaaattaataattaaaaacaaataaacaaacaacagcaaatagtaatagtaaataataataataataaaatactactactactactaacaacaacaacaacgacaagaaaaaaatttttctttccctttgtactgaccgaatctgaaacctcctgtctttcacggtgcagcacagttcagctacaaagcacaccccctctgtcactgaggctacattttaagtatttggggattttcattccttccctcatatgggcctgttttctaatccacgtttcccttcttttttgctcttggttgggttctctccaagtactcagaaacagctaaattctgaggcatgaaactgtgctcagctctgacacaagattctaattcctgggcgggtttgaaggatcacttggcagctccattaagctacggagagtgactgcatcccctgggttttcctttggacattcttttgttttgagatagaaagcttcctatgtaagggccatgtgactctgctaaaaccctgtccagctgtttcatgagactgttacacatgaatctaaatgtcatcgctgcacttccttaattatcatctggcatgccaagaatgtgaggtgagtcactgctcatacattctaaaatgagaaggaaagtctactggacttcacggctacagaattgtctaagcaagctattttagcaaaattacttagtattagatctgaaagagtttaaaggtaacccttgtagaggttttaaataatgtatagaaatatttaattactaatagttaaaagaaattatctcagatttttaagagaaattcaaggagtttttaatcaacaataggttacttaatataaaaatgctactaaaatgtaaaaatgatgaaaaaccctccaagtatgtttgtttgtttcagagttttatattttgttcctccaaatttactttataattagatagatataaattaatgaacagaaattaaacaattgatacatctaacaatttagcagaacctgatcatataatttcaatatttttcaaggttatccttaagtattccatcatggggctcataaaaaaaatcaagcaacatatgaatacttcagttgaatgttatatcaactatctgtgacataattcctctataatgcaattttgaagaaccttcaagaaatttttgtatgtaaaaaacatgttagtcaaactctcagcccagtataaaggaacatttctcatttgtcaggtggagaattcttttgttcttcatttttaagttcaatatcactgagttgattttgttcaaaatccccttgggaacataaggaggtatgaatacaggctacattgataaaacattgcatcttttctagactctctctgcttctaatacttcagaagtgtaggcattgaagagcattcttgcattaattgcaagaaaaagtaaaggagagggtcctttgaggtcgcaactatgaatgcggtcctgtggttatacaaatcctgctttatggtttatgggtggaaaaaacatgaagcacattcagtttcttgtcagtcacatagcagggtttagggaagctatatattctcattatcaaacttaagttaactgggtagtcttcattcagatttcagacactatattattttgtaaggctgatttgcatgagtaattagccataaaggtatagatatagattggtggttcccttgactgtgaatccagagatgaataatcttattccttcagaaacttctaaaattgtgtatctatttgtgagtgttagcagacaaaacatttagaaactttaaatatttttatttcacatattgtaaatgacgacacaacaaagagatttatctacataatattaatatatgtttaacatattggtaaggtaagaagtcttcactatctccttcaaagagtacagtcttaaaagtcaaacaaaacatcaaacaaaaggaaagcaaatgcaagtgagatggtgcaggatcctttgcaagcgtgcctctttcgagattcaagtgcagatcagcttttgaaaggaaagagattgtgctcctgcttctcacagaaatggtgtttttttcctccagttggtacaatgcagatgagaatactagcatgtacggcacaacactccctgtacaacagtcagggtgttctcttagcggaaggaaaggaagcgaattgaaaaccagctttgggtctctgaatagacagttagtgctttaactgttcagaggaaaacagaagccctgtgtgggaaggatatgactttggggtgggagaaacagaaaagagtgggaagagaagacaggaagggaaaggatgggagtgagagaagatgataggctggtgccacaggttctgttgactgacattgaatcctgggaagagggaatctcagctgaggaaaaactgcagtcagaaggccaggggacatgtctgtgggcattctaactccccgcctccccaagtttatagggatgtggcagggatccagtacctctgattctactgggcactgaggcagcattatgtatccacataacatcacagagttcttagtaaatatagttctactgactcctggttcttcacggggctccaaagttagacataaatataagcagttctctctattgctctcatgttggcttgctcctttacacacacacacacacaaacacacacacacacacacacacacacacacacacacacagagagagagagagagagagagagagagagagagagagagagcatataaaaccatcgttgctcaggaaggctacagagaaaagcactttacaatattaggtcattataaagttcagctttgatgccagtggggggggggaaatgaaattgcaacaaagtattgcattcgactctcaaacggtcatgcgtagtctctgtgggttgtaagacaaagaaaggcacgtccatgctttcaagttatttcagtctccaaagacagagaagccaacgattagccattatggaatgcaatgtcttctatatgtggcacacatgctgagagaccagatgacactacctggaaacggtttcacagaggattcaaaaggctgaggtgtgagtgtgccaggcgggctgggggacgacagtgtgttcaacagcgcgtgcaaaggctgtcaaagggaggatcactgtgattttaaaggtcaaggcagttgactaactcccgtgtagttagtgaacacgggtataaggatatctagataggcaaggcaaggcagaattaatttggaggccacctgtactgatctgaagagtttgtttgaacttcattcatctaaaatgctaaaggcattaaaaaaaaaaaaaaaaaaagcagtagcaaccaaccttagggggtggggtgggggaagaaggaactgcgtgaaggccattgagaaatcacagctttcagttaggtgtgagacttcctaaatggatccggaagcaggagctgggcacccagatcccagaaggacatttcagatttccagggacgtcttgtgaggactcagctttattcaggacgctttgaatttccttgcgtgagggacacctggcaacactcgcttgcaatggatctctgtttctaagaagcaacttgcttaactcgccattaggttttggttttgctctgaagctgaggccgaggcatttgtaggagggcctgtgctcaacaggaagccatttgcaacaccacaatgaacaaatgcttacccgaacaggcgaggaattattagagcatcacccaaactttgttttcccattaacaagctatgtgtctgaatcctcttagcaaacacggaaaaggctaagatttcagactctctgtggctctgaaaccaaacattatccccaggcccgagggaaaggcatttagacagacgctccagccccgctcgccaaattgcttgtaagtagacaggtgatgttgaatgtcagctgggaacgaaatgacttactataaactccaggcatctctcacttcgctctcaggaaatgtaacttgtatcatatttctcttcctggaagctgttcagcaagacggaggcctcagtgatactggtaaatacggaagttctttataaaccctgcctcacacttattcagaatggaagagttaatttggaaccctgttcctgatatttaaaaatagaatctttttccatgtggccatccatttgaaaagaaaaataaataaacaaatgtcagtcttgttaaatatgatctggaaagcttgcattaggtctactgaaatagcactttttaaaaggcagctttactttaggctccgggatctgaaactggctggagagttagccttgggagcactgtctgtctataatcgacaattacgccttttgtatatgtcactgtttggacgtaaagtacgcttgatttggggaatataatgtacaaaatgaagttttattgaaaaattatggtcccctggtttgtttttgttttttgttttgttttgttttgttttatttatttatttatttatttatttatttatttatttatttttatgagcaccgaaaatttgaaaacatgcaaatctttcttttttttttttcttcctgtcttcccccttgcctcacatctttttattacacagtgaggaaagaggagagaaggaaatagcaagtaggagtttctttttcttacaaatctcttattctgcagtttgatttaatccttgactttgtgtgtgagacagagatgctgtctgccccactgtgggctgtgatttccttagggatacagaaaaccacaccagcttgacctttctatacaataaaattacttaatataccaagagaaataaatttatgtcgttcttcctgaatttgacaaatgttccgtgctcagccccctggaaaggagggaggaagtgaagtctgtccccttgagacgctcccctggtttctcattggccagagacgccttccaacttgttcagttgaaaccttccatccttgtgaaacaaggctctttacatcactacgttaactttgtgggttggtagcaacgtcagaccctggtttgggaattcagtggacgaacggaacagaatagacactgatctgcatgtgggatctctccaaagggttctcctttctatcattattcaaaatcatcatatttatgatcattccttttatgtcttaaagagctgctccccacctccccatgttctggcaatcacacagatccagcgtgtgcttggcacacttttgtagcagagagaaaatggccccccaatgcccagcagacctgccccaaagtggcttctttgttgttcctaggagtttcacagctcctaggtgggaagtatttctatctttttaaaaaaagccactaagcctttggctgttatcaccaagacctacagctaactgagccctgctctttggactgtgttcaacatgtttcttgtttcttcatcaggaactcactatcctgtgaaaacccaaaccaactctctgttcagataacccaagctccagacattgcttccacatgaggaagggcagggggaaaggaattatgtttatccttttttaaagaaaagaattattcatctttttagttaggtatcattctattagttttctccctaaggtgttaaaatctcaacctagtggttttcttttataagacacacaggcacttctcatgaaaactcttcagcactttttgtctcactgtggtatatatatataaataaatatatatatatatatatatatatatatatatatatatatatatattatatatttgctaactgctcttaagatcttactcctgcttgaaaactgagttaatattaaagaagtacttgtccaaaataaataactaatctctaaggtgtataagggaaatatttctgattttacctttttagtatgactgtgtgttttgtgatacttcctggtctgtgctcagataacggaacgggaaggaacttgtaattatcaactcctcggggagataccaggcacctaggatgtacaaatgtcacagtgaatattttccttggagaccaaatatgatttgtttctgttgttgctaatatcattgtgttattgtaaacattgaaatgaatcttaaattctataaaactaatattttatattaaattacacactctccaaagctcaggaaaaaaaaaacaaaacaaaaacctagagacttcttttcttcatcagaatcagaaaagattatttctaagtcaagtcaatagtgatgaggagaatcttatttgtagccaagaggaagcaagcaacttgatatcctggaaaaaactgaccttggaataaaaagccactagttcaagtcccctcatgatctctccttggcagagagtcagaagggtagtcatttaaggtatgtggctttggtttgtcacttaggaattgaggaagttgatgtaaattactgtcaagatttccttaagctgtaagagtacagtatatgtttcatatgttttcatagttcatgtttcatagttattatgactgcaagaatttttttggaggaatactactgaataattttttgttaaaatcttcttggagcatctggtaatgttttctctacagtggtcatgaatctctgtggaggtcttacatttctcattggaagtgaccatcggatgggttggccttggttgtttgtttgttgttgcttggatttttgatgaaacttcagtgtcacctggtccttagttgttcctgccattttactgttggttagactgtagcgcagtttctcaaggtttaagcaagggagcatagatgttatggtcattgagtccatggggcaggatcacaggtgttgtgggtttctgcaaatgttgcaggttattgttccagtggttgtttaacaggaacaagctggccacagccctgttttcatggaaaccattttatggtagttgggaataggcaataaatgtgtaagacatctgaaatcatagacgactggaaaaaatagggcaaggtggtgtgttaggcagtgactggagctatggcaactttcagcttcttagaggatatgacatttgaacagaagagacatgaatgaggaagagagtttgtgtaaatgcaaagtctggaagcaaattctggaaagaaagccccatgagaaggcacagaagacaacaggcaaaggcttcaatgaccacaatgtattcaaagagtcataatccaggttactgtgactaaccatggctgcctcacagaacctggtgtagaggacaatgtttcagaagcaggactgagtcagttctgggccagcatcagaaatgtgcccttcacgctaaaaacttgaagacatgctctaaaagttttatgtaacagaggtatcttgtctgatttttaaagtttattctagctaccaagtgcaagccagactgaaaaagggaggggagtatataatcatgatagtgtaacaagaatccattggaaagatgtcgaccacatggactcaggcaaggatcgtgcagatggagaagagagcattgaactgcagtctgttttggtggtggaagaagtaagacttgccagtggattgggttggtaatgaaggaaagacaagagttaagctgacttctagggatctgactggaacagctgggcgaatggctgtgtctctattgagttgtggaatgttgatggagggaagtgtttggcttgaaaagcaagaagttgaacaaaatggtcttcaagtagagatgcccagtaggaacacaggcatgtaagtccagccaagtttgacaaaggttatatctcccctttagcatctctctttcactctctccctcccactttttctccttctctcactccttcccttcctttccatccttcccttcctttctatttccttccctccccactttccatttcctttccttcccttccctctctccccctccctccatccctttccttctctttctttcccctcctctcccttcctttccttccctccctccatacccttctcttgcccgtctctctatccttcctggtgacattttgagtgttcagatctccgaataatggtgtgtcatttttggtctggctaactcaggggtattttggactccaaatttgctcttccttctgtgttctctactaaaatgtccttctttcatagtaatccctgtagacctcggctctgtgttttccaaagtgagaatgattattagatgacctggtaacaacatgtgactggttttccagggttgatgttgagtaaggtctagtgtcaacagagcttgtgttttataaatgcaagcattatccagggaggaagagaagcctagcagtggatattaggtgcttgggctttctgtgaaagcaatgtataataagaaagatgctggcatcttccaacactctttgaccttgtattacacctttaaatgactttggatgtacaattctatttcacagtaattaaaggtacacagtgattaaaaccattctctgtgtcttgccaagagctttcctataatgcacaaactatttaaactattatcttatttgtattttctaatggcttcaactcaattctacttagcaagaaatctcattaatcaggaagggaaaaaattcactggagaacctacttaatgtaaaatttggataagtctagtctagtctaatgttctgaacaatgaattctttcatgggtacataaaatgctatttttttaaaggcagtttcttgtcttagtgttctgttattgttgtttaattttaaatatatgatgaaaatattcactcaggtacatttttattgattttttcccatcttttctgatgcttcactgttttaaattcatatgcaaagtatgaattaaaaacttaatttttgcccaccataatagaaaaatatatttattagtttacttatcagcattcaaataacttgcctctcaacttacatatcagtacacatggcattttgtatattaggaagaggtaaaagcataatctatatcatctttctatcagctgggcctctgagagacacaagttaacttataggtcatttttaacacttagtatttttttttccaaatggaaagggttgtgggtttttttatttgttttgttttgttttgttctcttttgtttttttcatgacagggtttctctgtgtacccctggctttactggaactcactctatagaccaggctggcctcaaactcacagatccacaacactcagccaagctgtggtttttaaataaccattaataggatttatggtctttgaaaaaactgactaaatacagaaaatgcaaagataaaaataaatttttctcaattttgacaccctgagggaaacactgtaatattcagatttctagaaaatgtatcttttgctggtgtcaaccccctgctgatacaagttctaatattggacaccattttctgtcctctctggcaacttcaaggaggtgggtaccagatcctctaactcctcccctacagcttcaatccatttctttcttctgtatggttgaattgaggctgctgtgtggagatcatcagagaagagatggaaactaagagatttttgcaacactgaagtaaacaacaagttcaaagtcatttaagatgtgtaaattgtgagacttcagagatgctctggattctaccttagcagccaacacaaagggaacatcatggtagccactttcttccgcacctctgggtcattcagaataaatttaagctcactctctatgaccggtagtcatctaaattgctgattttatatctatcattaaattggcatgtgtgtgctcacacctgtccataaatatttaggtaacacaaatgaatgtgaagaacattcttataggaaatacacggtggattaaattcaaaattccattgagccctcaagtataggtgaatgttaatgcatgggaataaaattcatattgagaatattgaactagatgcaatgaatataaaataggggtgaaggcataaaatatgccatagataatttatagcatagtctatatatattcatttgcatagagcttaacaataattttcttaatgggaatatcactgaataagcaacggataggatttcttataggaaattacactccattcaaaaacattcgggctggatatcttggacatagcaagctgtcattatatctctctggtagcacacaagtaatctaatatggcctcttttataatagaaaccttggcaaggcccagagaaattattctgtaccgcatcacgtgattgcgtgtgtgtcttctaagcaagaagccaagtcggtagaggcaaatatagttcttaacgccttacttttaactatacaaatttttctttaaagcttactttctgtgaaggcgaacaaaacaaaacaagaagaatatttgtttttgcttgaaatcagcttttgaaagatgattataaatttctaaaagggaaatatgataattataaaagatcttcaaacactaagaatgcacaccagagacattgcttcactgtgtgtttcaagagtgtaattattacatattaatcatgctgattagttatttcgacacaacagaaactttaagatataaaaacattttaaactttaaaattagattataagttagtgaaagaattaggttgaatttttatgtatgaagtattaaagatttacgctaaaattaagcttacctttacctgtcttgtttcttgatcacttatttctttaacgaaaagtcatcaggtggcctgtcaaaatgctgatagcccttgtggtaaatataataaattccatgtcgaatataaattgtggtgactataataaattccatgtatttacccaataccctctgaacataccccttgagcagatctgagtggttataactgaggcccaggcaccatctgcttctgcttcccaagtactgggataacaaattcaagacatcatgcctgcctttaatgttcagattgaattcatgtcctctagcatgagtgccaaccacatcacttactgagctatctgtcctgcccttctttatttttatatcttttatttccttatgtttaaaatacatagatataaatacacatatgtatatatatcgataatcataaatcagtgtcgataggtgtaaaagtataaagatgcattctgtatgaaaacttaacaccatgtaagaaaggataaatgagtatattggagcaaagtttatatataatattatatatataattgaaagtaaattatcattaatctaaactgaagtgctgtgaatctataatgttaggtgtaatacttggaggagtcagtaagagagcaacacaagcattttaaaaaggaggaaaacggcaccatagtacaagcacttaccacaaatagtaatggaagggtaacaacccacaaaatgagtggggaacaaacagccaatgataagtataaattcaatcttattttacatgattttatataaatcttttatatatgatgctttttatctattttactcaaatggataaaaagcatcatatatctatatagtatctaaaataggcatacttactatttcaaattttagtaaaaagaattcattaaaagcaaaagaagtatgccattcaatctacattgaaatgctttaatagctatgcaaatgtaatttatcatcttataatcttagtctatcaaaaggagatagcaatgatcaataaatatgcacccaacaacaaaaccctaaaatccacaaacactgacaaggttgaagacagaaataaataatttaataaaaattatggaaaccttcaatatcaaatgtaaagattaaaagaccatgagggcaggagtgggtgggttggtgagtgggggtggggtgggggaagggatgtgggagggtgtttttaagaggggaaaccaggaaaggggataacattttaaatgtaaataaagaaaatatccaataaaaaaaaaaagaccattaggtgaaaagtctcaaggaagacatgctgcctctaggataacatggtctcatagtttctggaggacatttcctcctgaagtagcagaacatgagtgcttctcaaatatgcatggagcattgtcccgaacaggccataaaatatgctttaaaaattcaagtctttcatatacacattaagtatgtttccaaccataactggctcagattagaaagtagcaaaatatgcttcaatggaatcaatgtaaacaagcctagagatgcagttggcagtgatctagagtctgcgacattgaggcaaggtattgtaagacatctcttactataccctcatggctatgttctttgacagatcatgggataatctccaacaactaccatcttgctttattaataggaatttttaattcattttacttccagcattaggtttttcattctaaacatgtttttctgattgtagcattcttaacagtcccctaatttgaaggggggggggcttctttttgtcatcttttaaagttttacagtattctttaccagctaagaattcggccaatgttagtataattccaagtttactaattcttggtcactgcactggctttgttctgcttgtctctcactagtctggacagtatttatgaaaagtgtgattaattgtcaaaattttaaatttgaaaccttttaggtaaaactgtagccttttggcttctctggaaaatgtgaatgatctggcaacactgagtctatgatctcatatggtaccagctggctggcactaaacaacagctgtccctgtagatggactgggctctgttgcctgtagtcctcatatgtgttctctacacaaggacccatgccacttactattgttaattcaccactctgtttttcatatagaagagcaagaggcatgtgaggaagtgaatacatttttatatgcacagctatatcaaaatgggggtaggcaagatcagggccacgtttttatctgcaaagctgacaagctcagttcatttactgatttgctcacatttattatctaccctttgtggtcactactgtagttactaaggacacataggtgagggggtttggaataagcacccaaagtttacattccaaccatcctgtacacgtagtgctatatattttggtttatatgaacagcagcaacaacaaaagataacagtagtcttaagaccttcacaaagagtgaggatgtgggtacacagagggcggtgggctacctgattggaataatgttagaattcaggagtgagtggtaaggattgaaaggatggcaacgatgtagtatttggagtgttcgtttaaatagtttgctgggttaatgagaggctaccaggtcaaagggagtctgatttataaagagaaggcatatatttgcaaagcaagattacaagaccatttgaagaggacacataaaagatttgaaaggagatttgctcttgaatggaaagccacaatacgttcgagaagagaaaaagcaattgggacgtgtgcctgactgagcaacagcaaagagctggaccttcagtgttgtaggtggagaacagtaggaagaaatgaatctacctcaacagattcctgaaccatgcaggattatggggaatctgagtatgcagaatccaatgagggaagaatgtgtaggtgtgcacatatgggtttgtgtgtgggtgtgcaaacacccctgtgtgtgtgtgtgtgtgtgtgtgtgtgtgtgtgcatatgtgtcagatgagcatgagcgtataaacccccaagtgaccaacttactaccctctttatccaactacacaggaggtgggggtctcagaagctaaagaattggaaccataagcattgcagactaaggttaacaagagagtaaacacaggaatgatccaggacaccaaaaattgaggcaaaagcacaattcttatagtgattgtgagactcccacgttacgcctccctctccaagtcatttcaacacttgcagaacccttagagtcaggtgaatatcatttaccatgtgtaaaacaaaagtattctctttgggaaaaatagaatatatctagagaaataataactatatgttaacatttgaaaagtccttggagaggccacagctaatcaagctgagcagtaaagcatcccattggctcaccatgccaacaaagacagtgtttctcatcacaatcattcttcaatgggaatggctagtgcatgtaccagaaattcaatagcttcatagcttcctgaatggatcagaggagaaattattagagaaaactaacccagacaaagtagggatattcaaagatgcaggagttaaccatgtacttagaatatgaatatatatatatatatgctaatagacagtcctcgttgaaagatgtaagtctatggtcatgtgatcttacctagcatggttgatattgtctgaagaagtacacagtaagaaagaatgatgtccaatataatagcactgtcaaacccccaaatgttaccttgggataatatttagatcctaagagcttcaaggtagagagttggaaagagagggaggacattggaagcataatagaatatcaagctttcattacatgtgataagggaataacatggggcctgggatttccttcaacagtaggttttccataattatctccaaggttccatttggaagtatgcttgatgttgttgcttcaaccccacaagtacccacctttaagtcttaaatagtcccaaagagaaaagctaggcatctctggctaccatttttgttgttatgtttaactaagcatcagtacttaaaacaatacagtaattatacccagcaatttagtaaaatttcattagatacaatatctcattattagtacttacttggatggaattgatggaaacatactctctgttatcacttttagtagagctgagtataatattcaatgctactatcattaagtgcacggtgctttacttttatagtacaactacaaggttttgttgtccttaagtaatatactttcttatttgagaaaaaaataaatgaaaagcagctttaagattgcagtttcattcaacaatgcagaattctcacatccaatgaaaagaaataaacactttacccattatcttaagaaactcaaattcaggatatatggccacacttattgtgattgtttgtttgtttgtttgtttgtttccttgtgtttttaccaagaccagcatcttgacatcgagattaacatagaaggaaattggggccaatctttggcttctactatctacaaagactaatttttctagcgaagtgacaatccagctaaatcatatttaatttattgttatcatagcttactggaaatcaatattaggaattcatttgaaagacttaaatatggtaaaatctcttcagaaaatattccttgatttataatcttttaaaaaaaagttcttcctgcttttttctaccaaaaccatgaaggaagcccacttttattcttcctgattaatcactgctgttcaccccaaatcagtgaattctgagactctaccatgtactgtagccttcccacttgtttatatatccaaagctttaagaacaccatatcagattattacaaaagggggagaatgagaattaaaattacacagaaaatacagatacagttgcttccatatttctaacaacaaaaatgaataataaatcataaatctgttgggagtagctatgactgagagattacatctcacagagcctgatacttgaatttcttctctggccaccatcagtcttcctactacccttatttgttttcttcccatagtaagatatttcccaaaggccttccagaggaatacgctatagctgtcatgtttcgggtacgaagaagcaccaaaaaggaacggtggtttttatggaagattttaaaccagcagaatatggcccaggtaagctagcaattgatttgattgggtcaggtggttccctgttctgtgtacccaaatctggagaaaggtgtagtacccaaatattgtgctatttaggggaattgtcaatagaaaactgtaaatattgttaagtaggagagccttgatgatacacatgatgtgagaatctggtgaatgagaggttgatgttttgttttgtctcaaaggtttatttacttttattttatgtgcatgagtgtttgcctgtgtgtatgtatacatatacattatgtgcttgtctgatgaccagagaggtcaaaacagtgccggatccccaggaactgcaggtacattttttttgccaccaactgggtgctgagaattgaagcctgtttctctgcaagaacagtcattgcttttatcactgagccacactctaaactccaccccctttttaaacttagaggttgatattttatttgaagacagtggagctgttttccttttacagatactttattgactggcttcagttcattaattaaattcctgtcctctcatatatattattcttaaagggatttatttctttacttaaaattcctttgtcaattaaaagctgatatatcaatattggattcaccaataaaaacaaatatggaccacatgcttcatgctcaaaagtgatgagaaggaggaatttagggctgtgccaatggctcagtgtggaaagcatttgtcatgcaaaaatgtggattgggagctgggcggtggtggcgcatgcttttaatcccagcacttgggaggcagaggcaggcgaatttctgagttgaaggccagcctggtctacaaagtgagttccaggacagccagggctattcagagaaaccctgtcttgaaaaacaacaagaacaagaacaagaacaacaacaacaaatgtggattggagttcagattctcagcacaaacataagtgccaaaaggaggtgggacccacctgttagtctagccctcatgaagtggaagatgggatcgccagagcaagttagttaccaagactagtcaaatcaatgagctcttggttcaaaggcaagacctggagtgcacacacatatgtacataggtacatacacacaagcaaacatttgtgcacacaaaataaaagtaagtaaatcattaagataaaagggaaagcaagtcttctattcacacatcacatatatctaaactccaccccctttttaaacttagaggttgatattttatttgaagacagtggagctgttttccttttacagatactttattgactggcttcagttcattaattaaattaattaattaattaattaattaaattcctgtcctctcatatatattaaagggatttatttctttacttaaaattcctattttaaagtcttctatatcacatcatgtatatcatcaaggctatcctacttggggaagacatccaatggtaattggcttccgtattcttgtgcacaaatgtgcattatacctgcacacacacacaaacatacacacacacacatacacccatacacactcatacgtgtactccacatataggtacaaatatacccaagcataccacacacacatacacacatgcatacacacacatgtgtccttcacatatagggacacacacacccaagcaaaccacacacacaaacacatgccaaaagaaaatagagatttaaatagcagaattcctattcttatggagcagaaactctagtgggagaacatttatgagaacatagtgcagttatgctactgaggaatgcatgatgggagctgcctgaccataaaaaagagaggccaccaatatatacagcatggagaatccaggagtccttgcggaaatgacagtggagatgaagcagtagtgcaagcactccacagacctcaaaatacattcatgttctcttctatttcatgttctcttctatacataaccactgagcaccttcacctttggttgatctcctcgctattaatatatatcaccagcttatgatggggtgatcatttgaactgaaaaatgcatgtcatctatgaaatatcttctctttgtcatgaaagttattagaggtttaaaaggtccaggtcagttttcattcaaaatgaaatgcacataatgtttttcttctgaaattagggaccatgatatctatatatacatatagaacgatataatcatgtttaggtatgtgataatattacccagtagtataatttaaaaccatgacttttatacttcataaaatatatgcttactttatgaatacataatatatatgtaaaagaataacacatttatacacacatacactcccttatatgttctttttgtaaatgagcagaccactagaaatgcttcttgccagcatacttgaatcaaggcactaggtttttttgtatacaccaatgtagcaggcacaggtaccatcccatggttagctactgtacatatggagcatttatttgtgcactttactaattttgaacttcaattttcaagccatacgaagatgttctccttatctgtcctattttttcagatatctgtagtgattgatggtacgaagaaggtggtagaatttatgttccgaggtgctgagggagatctgttgaactatgtttttaagaatcgagaactccgtccactctttgatcgtcaatggcataaacttggcattggcgtgcaatcccgagtcctttctctctatatggattgcaatttaattgcaagtcgacacacggaagaaaagaattctgtggattttcaaggaaggacaattattgctgcacgagcttcagatggcaaacctgtggatgtaagttgtatcactaacgctaacagggagctttcaatatccctaagataaagcaaaatatcttacaacagtgactcctgggtctgagaatgtggttccatatgtagagtgcttacatagtctgcatgacacaaggggtgtcatctccaacaccagataaaccaggagtggagtggtagttcatggtgatatgtacttccaagccaagaatcagaaaggtacaggcaaaagcatcagaagttcaggtcaggaccaatctcagccacattgtgagttcagagttagtgggctacataannnnnnnnnnnnnnnnnnnnnnnnnnnnnnnnnnnnnnnnnnnnnnnnnnnnnnnnnnnnnnnnnnnnnnnnnnnnnnnnnnnnnnnnnnnnnnnnnnnnnnnnnnnnnnnnnnnnnnnnggagggagggagaaaggaggagaggaggaggagaaagggaggaagggaggggagagggagggagaggaggggagagagggagagggggagagtcaagaagggagagagggaaggagggagagaaggagagaggaagaggagggagaggagggaaggaagccatctcttcttttaatgattgcacacacaaaagacccctctctcatcaatgtttatattgttgtgtatgaagaatacttattttcgactgtatgtctcatatataactatattctactttcacccacatttttcagtcagccaattaaaaaaaaactggatcatgcctttaaaaactaagattattaagagtaacttctagtgagaaattggaaatatgacacaaagaaagtataagcttgaccaagcctttatgttttgaataaaaggattagaaaaaagatgaacttaaaatggttccagactatctgatgttttcattcaataacaatagccaattcattcaagctctctatagcaattcaactgcatttcccacaagttataatgtctttttagaattcctttgacagaaaaaataaagtcattaaatctatcagtgggtcatttggatgagaagacatggccagaaaacctctttcagatgaaaatgtcctttaaaaaacttacattttgaagctaacatgatataaatttactgttgattttcttacaaaataagaccagtaatcttctaagagtgagatctagttaaatttaatagcaaaacattttcttatgagttaaatgataagaaagtccctaaataccgtgaggagattaccaataataaatgccaaactgtaaacatgaggtgcaggcaatgaaattgcatttcagaagtaaaaccctgtgccaatatgccttgggagaggttgtccttcctaaagattgcttgggagaaaaagatgtatggatacagatacacattcaaggaaatatgattttaaagcatttttctcaaagagacactgtatgaacagatcagaagattgtctggatttggaccagagcagagcagcctgtcctagggggtccatgagggccaagggagagattgctggcttgagtcagaatcccagctggagtctgttaatgtgttagtatcttcagtgacaaaataattgcttgttgtgatagtatacggttggaactgtggtttttttttattcataatctgttctctaaaattagaacatgggggaaacaaagacaaaaacaacaacaacaaaaaaacctattgttctttgttttcaaaaccttcgagccaggagcaggactaaaatctgtcaataaatggtgggtgttacaactgatctatcattaatcataggtcacggccacttattttctatatttcatcctgttttgattctcttgtgagccattatccaccatgaaagtagcttctttgatgagggttgagaactgtactcatcatgagtacaactataaataagtagtattagattgaaatcctttaaaattgacaatctccctttagttaattaaaacaactcctaggcagtgctgagcatggtgtgacagacacatgatagcctttcagtacctggtgtgtatgtgtggtatgtttgtgtgtggtgtattcatatgtggtacaagtgtgtgagagtatagacgggtatatggtgcaggtacatgtgagggcggagcagaatagtgggtgtctgggattctttctgtgtcatttcctgcttttgaacctagatcacttagtgagccagaagcccaggttttcagataggcttgcttgacagtgagtactcgggaccacttgtctctacctccaacagctgggttatattaagacacagccatgtcaaatttttgacacaagagatgggaattcaaatcagaatatcaaaactgcagagcaaatgctcttgccactgagcaatcttgtcagcccctatttacccattattttgatagcaatgagtagaataaacttcaattataagttgcattagttaattataatcttaattctttatattatccataatttgtatcctctctctagtattttattaggctaagtattgtacttaagctcttcaaatgaaaattcatctcaatgaccttgtaaaattcctataagttatatatcaccgaatcttgaagatttttgtcttacccatagatgtgaggctgataataattccgtaagttttctagaatgtctgatgagccaaatttattttgtcactctcagtatagtgcacattagagaatacctcctggatttcatggtgtgtgtagcatgggggcaagttagagattcacagctagccagatgtctgttttctataaccacagatgaactcttacaacaccataatttgctttttctatataaaatacatatctattaacatcaaagtaatgcaaaaccaagatctattaaattgtcaataaagaaccgcagagaaagggtcaggagaaaggagggaagaaagtgggaagagagatgaatctgatcatgctatacaccaagtctaatatatacttctttgttaattgcagccctgaattcacaacagtaagctaagttcaagactccagtcaatgtttgctataatacagtgttacttaatatttcagtagtctaggagttgaagaagatgatacaaacacttatcatattgatattttatcagtaataagcaccattcaccatttcctagacaattgttctgatcttatggctatctttccattcatctcttgtctaaatgccaaaaacaggagaattttctgcagatagaagagacttttgtaaaaaaaaaaatgtgaatcctttgttttttgtgttattgagacaggattgctctgggaagtccagactggtctggaacaccacatagaacccagattagtgaagtttacactcctcatccatgctaggactgcaggcaggttctcctgggttcagcttttgagtcttgctcaggatcgtactaatataaagtccataggctttctgcagacttcattaagtacaagcaaaacctaattatcttcttttctctttattgagaatggcgcgtttacttcatacctcaaataggacccttggacctaaagagaaaccattttccttcacctactcatatctttgaccacctctgcaaagtttgacttttaaatgtaattttatacagaaccacactgtagaacacagcagtatatcgctaattaaatatttgtggggtttttgttaattcaatatttcattcttattgctcgagacagttagccaagctttgccattgtttttcattaactcatttcctctgtctaatgatcttcctctgtagctgtttctcaagtaatccttaaagcaaggaatcctaaattaaaattaaacgttataaatatgtatcagtcatttatattaattttccttttatttctatttaaattgctgtggttaataacgcctaaaattgattctcaaaaccaatgacatgtgttgctacttacttttaatagatcgaacttcaccaacttagaatctactgcaatgcaaacttcctagctgaagaatcatgttgcaacttatcacctactaaggtaggttaatttccttgccatgtgaaacacaagcagtgagatatatttcaattggcattcgtcatctgtaggttctatgtgtaggactttgtgaagcatctcagttgaaactgggtgagtaatttattctccgtatggagccattcttagaaccagctcaacacttcaaccacagggttgcacactgaaatttgatggtgatttgtgctcaggttggtctcagtgtaagaagaaccagtctttttgtttgtttttttctgagacagggtttctctgtatagctctggctgtcctggaactctctctgtagaccaggctgcccttgaactcagaaatccgcctgcctctgcctcccaagtgctgggattaaaggcgtgcaccaccactgcccggcgagaaccagtcttaatgtacaccttcctgccacccactgtacctgttgccttgtctcatctgaggccccagctgattggaggtgctgtcctgggcatcttttctccttcaaaccactgcacaggaggagtgttccatttcttgatttgtcagctacaaaatgaaaggctttcaatagggaaaaattattttttaaaaaccctcctcaaaataacatatgaaaaccaaaagtccaatattcaatgaattgtttctttggatcttaatttctccaaatttttacacttcctaagaaatctatatgaaatttttaatcagtgatttttttttcaatttaaaaacccttgtaacttctttcgtgtggtgtgtgtactagagtgaaatctagccaaataactcagagtctttcaaatattatgccttgcttatataacttggctatataaagcatatctcaaacccaatttacggatctcattccaagtaaagtgaaagtctgccaaatatctttctttaaatacctaaaaagatagctcaaatgccagtctacagacctgaaatactgaggtttcctgaacctatacctttaatcatttttcttatttcaaaagtgtattgtaaatcattatgaatgtgttatattggagttcttaaaataactattttctttcacttaaaagtaatgtaatgatgtttttatacttataagttttatattcttcttcattattcattgccttatgttaatagattactatgaaaacaggttagaatagaaatggatgaagaattggatgaagtaacaagtctgacatgacttcacacaatagtttagttcacagtgctaaccttaaattttaataaaaagataaataacaatctttacaagtattatttgaaaatcaggtttacagttgaaaataagttaagaatttagtccaagtatgtaaaaataaccaaacgatattttttatgttgatgatcatttgtgatgatcacatcaccatccattctgaaattaaaagtaactagaactctgatacatttttacaagcaggaatacataaataagataatcctaaaagccattaaatacagtggatgaagatttgaaaccaactgtcttgtatgctttttagttttgaaaactgtcttaaagggggctagagagatgtctcagtgtttaagagtgcttgttgtatagccatggtgagctgagttcttgctcatctcttagccctgatactatagtgggtgggcaaagacaaaacacccctgaggcttgcaggctgctaccctcttctaagactacaagtgtgtgtttcagggagagaccctactgcaaagaataaggtagaatatgataaaggaggacaactaaccccccattgacttctgtgggagcacacaggtacacatacctacacacatatatgcacaccacatacacataaactatacacatattgacacccacaataagtatattcataaacatataaatgtctaaatccaaaaatggcattatatctgtgcatttatagctacatattaatattaaaccgcacatgctattttcatgttaatattttatggagtacttcaaagctgaaatttattccagactatctatagacatgttccacttctaataaagtcagattttcagtctctgaaacaatcaaatgtcacatgactgagggtataaagtaaaaagtgcataggaaataataaatcattcaggagaaatgaactgtgtagcaatcttgtttcatttgaatataattctaggttattaaattgaaattttattaagataccaaatgattattaaatatagaggcgattaacatggaatctctcgtttcaaatatgagaatatggtcacagtgtgtctgggtgtgaagtttattgtgggtcttattgttactacaaatattagagtgatacctattattcaagagtcatttatgaattctatttgagaaaatgcaggaagggaataaacatcagatatgaagatgaaaataatacctaccgtgggctcacaccacagtagcaagccattgactttttatttgcataacttgaatgcagttttccactcatgtataatttgcatccagtgagtttttccatctgttgcttcatcttcactgaagcttcaaataaagagttagccatggggaacagcgtggtatgagttgtcagaacaagaagataaattggaattccctttagaatcaacatgtgatacttcctctatatttaaaaatatttattatatctctgtgtgttgatatgcttgtatgagtgcaggtatagaagagatcatcagaggttagagtaacagctggaggaggtctccagatgtagggcctgagaacaggacttgtgttctccacaaattagccctggcttttaactgctgtctctccagtctcctgcatgaaattagagggggaagattctgcctatttatagccgtgttcagcatgttctaaactcaccaggttcagaatcctccacttttacgtctttaaagaacactggattagaatagactatattgtaattagccgtcttagagtataaaataaattcatttccagcttgacttacacttaccaccagcttgctgcagtgcctatattttaccaaccaaatttatatgcttttaaacttttgtttgccatatactattcacattttgcttgtgtgaagtattttattggaagaatgtactattattgatatataatatcactatacttatcataaggccacctaatgtggctttaaaatttctcaataatcacttttcatatgctctttgtgtgtagtcaacatggttaagtacactgcaggcttagtgatagagtaaaaaatgtaataaacttttataaatggttggcaatcttggttactaagaaggaaggatggcaggcatccagacatctcagcttgatgggagctaactgcaagaactgacgtcattctctaaattctctttggggattttagtgtccagagcaagacgactttggaagtactacttcatcctgggggacctctaacactggtaaaatgtcttcatatctgccaggaaagcaggaacttaaagacacatgccagtgtattccaaacaaggtatgtgagctttcatatgtgcccactaaaaggtcactctacacagtggcctaggctccttggctgtatcctgtggtacacagaaggtgcctcatgcctagtcaaatctcagatacaatacagtcacagagaaggaccagagaaaggaaattaaatattgcaattttggatatttattttcctttcaatgtatgggagttacaattaatagaaagttgagaagaaatacatagtagggaagtgttgcacacagaacacattaggaatgggctgcagttcagaaattcagttctagatggaaagtgcctgatcttcaacatagacactcaaaaaaccagtacaagtatttctctttgctgcctagtgcctcaatttgcacagtgtctgcaaatttccatccagctgcctctttcctattaattcctattaattgattgtctctgggtggcatatccaattaatgagcttcatctgaaaacatatagttctttgatcagtgacactgggcccataggcctctaggaatatttttttatgttcatagcagtcatggaatggagtctctgtctctgtctctctctctctctccctctctctctctgtctgtctctctctctctctctctctctctctctctctctctctctctctctcattacttttgctttggagcaatgaaacagaatgattgtgacacaggcattcatttttccccctcaggaggaagcaggattaccaggaactctcagatccattggacataagggcgacaaaggagagccggtaatgtgcacacaacttgtactgttgggatgaaggagtttgctcaaatgtgatttgaaaagatgtgtccacctcatctttatgataaatgcatttcaaaaaggccctcaagaaatatgttgagatgaagatctctgtaaactagtgtcataccagcagctgagtctcttgcttaggacacaggtttaggaaatcctgagaaacctacaacagccagtgcttgtacctgtaagttccacacaacactataaagcaggcacatatcccagcgactcccagctttcctcgtcacctgcttctccagattcctaggaaacatattttccttgtctactgatgtgtcctcactgagtaggattttaatgcccaacccctactaagtatctgtgggaggacctctgctctgtgggaggcataatgctgcacatttgaagaggagtaaagaataggataaattgtttgtttcctgggatatcactcccaaagagagatagatgttataacttttagagcctatgtaagagtttgcaaaggtcctgagaaaacaatctgggcaccctaggaagaattgtgtgctcttgatctctcagtgtacaacacaggccatgactcatgcatcaagatttgtcttccttttgactaagctctaactaagctgtaatattttctagtcttttgaatgtgttttccaaccaatcaaattagggacctaatataacaaaaatcacatcagttgctggagccacagaataaaaaagcacaaggcctgttctcattgtgtgtaaagtcttgtggtgatgtaagtcaccccagaaatgacaccagtggaaagggactaagaggaattagtaaagacgacaaatgttagaaaattaataatacataaggttcataaaatattttatgcaaagatatatcttagagttgcaatgtgttgtaagactcccatcaatatgttgctttaaactatttaatttggttagaattcccatacataaaattcacagtgaaattttagtgtcatgtcaaatcaattggtatatagtttattagtaatctactacacaaaacaagtacttattgtacacttctttaattttccccctttgtgaacagtctcaaaaatctgtaaatttgattaaaccaggacagctactgctgtgtaaaactggtttcagatgaccatgaccataaacacaaccaacttttcagaaacttgtaatcaacatgaacatgtggtttcattttaagtagtgatgacattttaatatgtaaaaatgtaggctttccccggtgtttgattctggtataaaattttcatagttctaacaggtgcccagactacctgcattttggaaccatcaaatgttactttaagattgggcagattgaatagttaccattatgaaatgaccaacatttcaaagagtcactcagggagacaggtgttactacagaggcttgcatttgggtattaaatacaaggaagaatattcatggaattagcatggagtgctggaatgaaaatagccttggtgcccaaagtcttagagaatatctcttagtggctttgattcctgaatagtatccaatcaatgactgagtgtgaaagacaacactgtaacacatacaagtcacttacattatagacattcgatggatgtgtgttttcctcttctttctattcagtggggttgaaagagaggtcggactcagcctttacagggttttatgttctttcatttgtgactcgataaaacacaattcttcagttatgaggcaatgtctaacaatttccaattgattgagacgctcagtgcataaaagtttggagttagtttatgtcctttgataaataacaatattgcattaagtttctatcttcaagtatatgaatattaaattctgtgttttgtttccaatattatctggccttttctagatagtggttaccagtttatgaatgtttctttgaattttaactagatcataatggattcgaatttgtggacattagataagaagatcagaaaccatttggacatttttataatttacattttctcataaactattagatacagtttagtagcctttggtaaatttgagtttttgaaacaatgagaatgaacttgagaaaacgactttgaaacaccttttctaattatttggaagggcgatatttctataggtgttatttgaaggatctttactgtaatgtcacaaattaataaaggcaaattttcattttttatttgtggaaagctattaatagttaaataactaatcaggataaaaatgtaagcaaatccagtttcatctggtccaatgtcttctaatgactccatgtctctctgaagtcatcgcctaccctctcacatatacttcaaggcatcacatagttttgtaagattgcagctaaaaccttgctgacaaacatgcagaataatgagttacttgtgccatttttactcaggtatggcattattatcatgttggcccctcattacccaccctggcatctgtgtcccctcccaccttttctttcctttcccaaagagccccctttaaaaagctcctaaacgttaatgttcttgaacctacatgtggtctgaataatttggaaatttattttcaagtttgctttcatatcattctgcatttccatgtaaattccccaaatttgctgttcatgaaaaagttgtttagcaaatgaaatgatattgtatattcataaaatttcaagcgatagagccaagctctagtgatagaggcactcatttaaaaagtaacattacattccaccatttcaaggatagatttggtggactatttaatgatgtgggcagtatgaggaagaatctgaagcatattctttggtgcccacttaagaactcacttgggaaatgctaactccttttgatgttaacaattaatgtaccttttatgaatgtctaatgaataattcaggtgttttagtgtatagctggtggtaaagtcgaatttggcaccatgggcattcctggagaaaagatatgctgactggctatttgattaaccttagtgcctgttttatataaagctgagtcaggcaagaggggaaaatgcagaacttttatctcttggggatcagtgacccttagtccattgctagggctgccaaagatacccactggaaggttttgtaaatgaacttccagagaaatacaaactcacttgctttttctgttgttcaaggctatctttgagctacacaaacagactaaggaactgtggcagaggctacaaggccagtgatgcccaaatataaactgcacagctctgtggaaagaatgttttcctcaggaatgtaaaaaaaaaaaaaaagtctgttaacaactgggcttcttacattatcagttttatggctgatacagtaccttaatattttaattttatttaataatgttataatttatataaaattacataaatgtgtataaaatatatgtaaagttacatatatcaaatcatttattataatacagactgcattttatagcaccgtgtaagatatatgactaacaatacaagaactacatttaggtctatcaataaaaggatctgatttaatatctagataatgaaatggctgctttttcgatttctcctcaaatgccatagggttgttgtgaataattgcttccctcacaggaggttaattctgaaattcaaagtattacctggagctagcatggtggttcccaccagcaatggcagcactcatggggctgacagaggagaaaagtgaaattcgaagccagcctgggctatgctgcaagattctgtccccaaacatgaagaaaatgctaatttttttcacgcaatctttataaaatttcacatttgcgtgttaaaataattagcttatctttactatgcatattaggccaaactagttagatgtcacatgttgatgctaaagaaagactttctttaggaaagtaagtttaaggtgagcaggagagtccctccaccttgttatctttaagaccacgaccctgtggtgtcactcatatgatgctcccacaggcttaactgaggctgcttggtaggtcaggtgccgggcagcattttgtgttaatgtgtattgtcctcgttgtagttgctgttttgttatttttggtgatagtggtgatcaaacccaaggtcttgtgcatgctagacagtgctagaccactgagctctgtacacagcacttgagaccagtacttctttttttcccccccattaatttatttattcactttacattctgatctcagctctcacctcttctcccagcctccccttcacataaccatttcccccatctctcgcacccttctcctctgagaagaggaatgaaccccttatttaccaacccacctggcacatcaaatcactgcaggactaggcacatcctctcctactaaggccagacaagacagcccaacaaggggaacaagatccacaggcaggcagcagagtcagggacagcaaagactatgctgcacttctgtttcatctgtgcagtgtatggagtggtggtggctcatgtgtgctcttcggtgggttggttgtgttacaagaagaaaggcagattcttagaaaggaaggaacatacagggcaagttgaagatgcattagaggaagtcatcacgacaacagtcagtaatgaatattactgagtctctgtatttcaggtcttgtttctttccctagagcaagctcttggaggcaggatgctgaataaggtatcagtttactttgatttctctgtagccaggttcacgcaacttcagagaccccacttcatggctagtatcatcctagtacttaaagaaacacttgtctttgaccacatcctcttcccaggtggtgccagctctgctcccaaccacattatttagctgtgaaatggatttaacgctcacatgtgggaaagaattaccactcccagggtggtggcctcactcttataatccaaggtttatcacttatttaaaatcatgctaacgactacatgcaaagtaaagttaacaagaaagtcgctgttatgttattttgtggtatagctgatatatattgcaaagtatttcattctagggaagaaacatcaatcttttaaacttcaaaaattttaaatcacattgtagttagtgtttcagatagaatacttctcttgacttctaataaaaataccttatttgatttttggtgctttggatgtgagcataaactttccttaattgctgagtcatctctcccagccctgatttttataaataaatttctaaagaaaattattagttcacaaaccttatgtgattaaatgatgagagtcacatatcttcacagctcaatttcctaaatttccatccggtattttttttattctaataatttatatattttttttattcagtttacatcacaatcacagctctcctccctcctctcttcccagccccacccttacaaatccttctccccaatgaccccctcaccctgttctcctcaaagcaggggaggcccctctggggtaccaccccaccctggggcatctagtccccacaggactaggcaaggcctctcactgaggcccaaccacgcggttcaggtaggggaagcagagtccatggcagggaccagggaactgtcccattctgcttgttacggaatcccacatgaagaccaagctgggcatttgctataaatgtgtatgggtatcacaccttatgaacacgtggatgccttctgtgtcacctaaaaagcatcactgtgcttaactaagttacagccctctcagtacacatgacttgttgaaacatcttggagcaagaacacaggcaacctgccacagaacacacacctctagcacattatcctcaagtggagtgcttttatatttaagccagaagttgatttatgaacacgcaatgaggcatattctgagcagcattaagtagagtttgcatgctggcttcaatttatattcccatacaatatgatcctactgtaataaattaaattatatgcatgcaaattttattgttctaaaatagacttgcactttgacgttcggtgaaatgatagcagtaattacttttaagtgaagactctaaacagagtagtagttctccacggttgcctttttttttggcgacagaagcaaaataatatactatgtagcactgttttatgacatgtacttttggaaatggagtcatttggactttaaagaggaggaattatagcaaccaattaaattcttttacaaattaccctgtgaaccagtgcacacttagagtaggcattcaccgctgtgtacacacagcttttctgtcatccatcataagacagccactatctgcattacactgatccagcacacctacgaattttcccaggtttgataaattagctgctgtacattcatcggggaaaattccattctataaagaaatacctgtttacttctggtaaacttagacggtagtgaggagctactgccaatagaacggataagtggaatggattggtttccaggagaaatgaatgctttaatgcccagaatcacacacccacacataataacacacacgcacattcccacatacacttgcacataaacctttccaacacacacacgcacacacacacacacacacacacacacacacacgcacgcacacaccatatacacacaggtactttgtccttctcgtctgaagtgggaaatggctgaggatctgaagagtggatgaatgccctgcaaattcagctctagagtgacacttgccctaactgatgcatgtttcattcaagatttgtcatattccctacttcactgatgagccagaataatgtgcattgtttgggggcaatgtagatacttttagaaatatgattctttaccaataatatctattttaattatgtgatcataaaaaaataacaaaaatagagcctaaatcatgctaaagtaatatttacttgccgaatgactactttattccctaaggaaaatctgctttatgagacggggtgtcaccttgtagcccaaactggggtggaactcactaagcaggccaggctggcctcaaactcgggaatcctcttttctgtcagttgagtgctggtgttaaaggagtgcaccaccacgccagccaggaggaagcagttattaaactacttttcttccttatgaagtaggtagaaagccaatactagtcctcagaaatgtgcctgacaataaacaagcagagttacactgcctggatcagggttctaggacaaaaatccttctcctttatcaaatgggaattatagtggacccacgttagcctgatcttaaggacagaatgagaggtttatgagagagccaacttaatgactggcagaaatgtttaatagctagaagacacattttaaacacacagcttgatgatactcttgctctaagctctggcttactgtgagactaaatcagaactcactgaagggaatttattttattcaaaatttatttagcaggaaatgttaaaataaaactcaaatatcttcggagtgtttggcctttttaaaaacaacaacaaaattaatgttcctagaccaatggacccatccaaaagaattacacacagcatcacacgcttgtatcatgttgataaaacagctgcttaaattaatcctaggtgctaagcactgccaagaccctcctcctttccattagctaactcaatacttacagacactttagctcagatttgtttttattacttttggattaagaacctaatatataaagacaattaaaatattcctaagtttcatagctagcgaggagtggagttaggagtgaagctctgcccacgtgaactcattgttcatgtgccttcctgcagttgcatcatcaggatgctgccaagttccctgcttccttttcacactctgttagaattaaatcacaaatccattttccttgcagcttagggagcagattgggaagtccactctctagatcctgctgtgtctctttaagtctatgaacccctttaacgtaagatcttctaaccccaacacgggcagaagactatctctgaagaattactacaaattagttcattcagtaaatgagaaggttttatagttttacctccaggaacaaacagactgaaaatatgatggtttaattttttctgtttgtcaaatttgaaaagagatttgaaatactctcatagtgtccagaggtgactccagagacctgtagtctgctccccatgggccacagcccactcacgtctgctgtctgggttgacctgaacacccaacataagacattctacctttacacccattaccaaacatgcttttgatgcatggccacacatttctatacacagagtactacagagacaatagcattaaacgcacttacctggcattattaaaataacctgtaatggtaatgacacagtgggtcagttgctaatttgcctgtcgtaagaaaacagagagactgcctccagtataagaaaccttgaagacaacaaactttgtcttcataaactctgagctcccattcactgcactcaatgtgcagaaacgagactttgcactcttcattatctctgcgtttcttctcttctggggactgaaatgatgctttttgaatcttgatattttccctaaaaaggcatttatgagaacactccagctccaggaaataaaggcagatgttgtttcagtttacgtacgtgcagacgagccctgtagctgtcgtgaatcctaatgacttctgttccagcctggtccagatgtggcgttaatgcctcagagactaagaaacttataggcatttagcaaaaataatttttgtttaagtcatttggcttcctctgtgcatttctagtttcacctaatttttccatggataatcagaattaagctcatttccacagtttctccctaagttcataaaaaaagaaattaatatgtatttgcacataacaatttattattgaaactgaaaccactaaataagaacatgcaactttatccaacagtagaatttttttagatttaattacatttcttccttcctttcctccctctaagctctctcacataccctccttgctctctttaaattcatagtctcttttttattgctattgcctatatacatatgtatattcatatactgatatattcataaatgtaaactgcttagtctgtgtaatgttttcaggtatcaccatttggtattataaaataatcaatttgtgtgttcttcctcagggacaactatttctcctgctctcaacacccctcgttgcctgcagttctttctgtaggtttgagggcacatgtgctctcccctgttcactttggcatgtttgtcaccttcattcagctccctttgagtgatacatcattttgtcaaggctgataaaatatatgtggaatttatgttaacaaaaaaatcattgtttgcatttgtatcaatactgccaattataaatgtgctttctgtaagaccaagacaatgaaatctgaatgttttattttatgtttccactaaactaataacagtttgtagggttatcaaattagctatatattcaacttggactttaccaaaaaggaatcatctgaatgcctgtgtcttttaaaaaaattaataatgggggtctcatgaaatctaataattaagcaatattcatagaaaaataatcaaaaaattatagtttcattactctaccttctattcctgactaacatcccaaggctaacaggaataatcggtggaaaactctggcttgaagtggagcgtgttggcattaccttatcagtcagtgcgtactgatacaatacagctccaaataagcagaaacggaagaagcacagaggtaatagagggacaggaaaaagaaacctggccactctgcagctgactttatttctcaatggtttcttattccctcctaatgccttccactcacatcccaagtagagcagttggcagggagcacaacagatggatgacaagctcagcacatgcagcgactctggcaccaggcacttgacttttatttaccaaatagttaggcagatctcaggaacccagtctgctaacacccctatttggtttaatgtgcaatcggtatctagcacataaatatgacaatattactgggagaaaaatcactgattctttacatagttcactggctaatggtcttatttttggtatagattactaacatagtgaacagtagatttaaaaacataactgccatcatttaagaaatctgtgactgtggataacagtcttcctgaaggggctccatcagaagcatcgttcagccagccaagccaggctcaactgtaccagggtatggtgatgggtatgactatcatgtaaaaacgagagattggagttcagataattgatatcttgatctcttaccagaatcttcacaaatgactaccttcaaagctcaggcatgtttttatgaagccttctggtctaccaatcaaaactgcaagcacgtccattctcctaacttagtattttatttacatcgccaagtgtgtatgtctgtatgcttgggagcacctagaatagaaggaatcataactctcgtatctctgtgatgcctctgcttggaccaacagaggatgcccaggttgatagactcttcgcaagttcaagctgaactgcacagaactcaaggaaacttcactccaaagtacaggagagaagtaaaagagaactgttggacatctatgttgagggaagagtgagaaaggtactttagtaagtaagaactcccaaggttttatgcaaagcagacttcagggaagtagtggggaggagaatgtgtacctagcaaagcttacaagtgaggtttcctaggatgaaatgtaataggggcagtgggtacagctccagagcttgcttcccgtttccccatcacctgctctccctgcactcttttaagcaagccttactgccagtctgaagctaagttacccgatggctttagcacagtgaggctccagtagaggtaactgatacggagtcacgctatcaattactcatcacgaggaatactctggacaggaagtggtttgctgcaactggtatcttactgtccttaattgggagctgactgatggcgctgtgttctatatcttaagtcatctttcatttggtggagtgcttgctgtgggtgtcaggaactgcaggcatcagatacctcaacagatgattcagagtaaacaccttgatttcctaccgtggttttgcagtttcagaactatctacactgtctttaacctactctgacagtaggctcaaacctttctttctcacataaccttcaagaagatcatcatatcagtttcataggatcccagaattttattaaattctacaaaagtggctgggtccccctaactccactaggtattcaagaaaactttcaccacctctccaaataattcctaaattgtttatttttttttcaaagctcaaaataactgtcgttcgtctaatttggagaaaggttagaacttgatttttttctttgaagaaaaatcttagtagtgcttatacttggttacatactcaatatatgcaaatttacacatttttagaagcaaattacattaatagaaaaacaactttagcacccaaaacaacatggtgtgtgtgtgtgtgtgtgtgtgtgtgtgtgtgtgtgtgtgtgtgtgtgtgtgtatgtgtgagttatggctccatttttgttttgtttgggaccacatctgacatattatactgagttctgaaagccacattttaagagacaggtatgctcagagagcaggatcatatatttagaaactctaaactatggctaatgttttagtgaatagaagccttcatagtgacccaagtggatgtcctgcttaagatccagaagtaagaccaggaaatgatttaggttcagaaagctttgattcagtaagcatagatgtgtgtttctttcttttttttaaatttgtgcttcacaatatgaatcagacagaaaaattaattagaagcttataatagtaagctttggtggcaatggtgaatatgagactataaatgcagtttctgtattatttaatttggggagtgagtatgtgagcagtgctcatggggaggtcactggacaactttcgggagtcagttctctccttccaccatgtatgttccaggaattaaaaggcttgtaattgaaagaatgtccccagaaataagttttgaaaggtctgatttgtttggaactactgattgtatttttttccaattatgaactaaaatgttgcttggaagatagaagagaagcatcttatgttttctttaggactagaattggggggaaaggaagcaggaactcacacgcacacatgtgcacacgcacacacgtgcacacacacatgcactaaatacataaaacataaaacagatcagttccctttcaatagcattggggagtactgattttgtgggcagaaccaggtttaccctggctgccagccgttctctgggctttgctcctatatttcagaatgagcactaaagtgactggtattaccgacataatgttttagattaaatttttatagagccaacacttggcatcagcatgtttggactatgtcctcttgaagttttcatggtaattcatacacctccctcctttttgatccttggtgggagccagtatgctcactctcctctggtggactaacggcaattagaagtgattataagcctctaagtagggaaagaggcaagatcagttaacatttgccgtagcggaaacctagtacttttaactacaggaatcacagaatgtcagctaaagacacatcggtgccagcactccaggcacatggtatgtaaaagcttgcagctagctaagctatcagcactcctttttctccgaaacgggttgctggcagtgtgaataccgtgtcattgtgctttggaggattatatgtggtatctggtgatcctgagtaacttgcaatatgatataaaatattatattggatcaactgagggaaataatctgcttcttagggacaagtgggcatacttcagtgatgagtaatgttagaggctccgttaccatagaatgttctttggcatcagatactaaatgcgatttccttatctctttatcaaatgtcactgcagctttctactagtcttgccggtgcatcaggtcaagaaccatactaactttcaagagaggaaatgcttagtacactgataattatgctattttcgatgcttccacatctaattacatatctcaaccaaattttgcctgtactatgataacagcagttatactatagagtactttgatagttaaatcaacaaagaaaacccttaactcttaaaagaaagtgtgtgcatgtatctgtcaatacacttctggtgaaaaagaaaaaaaagaaacagtaaagctttccaaaaatgtattagtaataaaattaagacctcattattgaggcagagtatctcattgttgtcttaaaatgtgaagatgtggtgtttctcttcatatacttaaacttcctttaaataattgttagaaatgatatctgtgttctagataatccttaagaactgttattttctaagtgaattttctaaatattttacaaaaatagagcagatcatattttaagctgcctgaatctcgacactcaggagccagagtaaattcctagactcaagtaaacgcctgagggtccacggagaatgtatccaccctccctgaagtttctctttctgggtggtgtactattcacaaagcagacttgtcagagcgatgaccaagaattccagtaatggaacctgataggcatctgctaaaaacatttacgcccatgacaggagccagacaagtggagagggaactgtttcatgcagaattgccttggtatgcctttagaattcagatcccagtaatcaacagatatggataacgaagtaagtattttcacattgtgacaagaatatcaagatgtacgtatatatctcagattaggtaagaagatacctataaaccacaattaaattggttaccagggaccatgtagggaagccacaactgaagggctacacccccatcactgtgtaacagtctatagaagatgattatgagaatggtaactctcgatgaatttgttagcaaatcctacccaataaaagcatttactcttgtacacaaggaaaagagaaggaaggaaagaagaaagaaaatattgaaggaaggaaaaggaaggaaggagggaaaggggaacaaggaagggaggaagagaggaaggaaaaaaggaagaaaaggttagattattaaatagcatttggaacacaggatgtaaaaccattgagcacttacttgaaatgtcaggttatactacaagttggataacaataagactgatccttaacatcccagagcctccatacactcccccattcctttaccttaaaatttgaggtgattgccctgtacatgtgacatgacagaaattggaagcccagatgcacaagagatatccaggagaatgctacctttcctcatactagagggtgcccctttttgagggtcttttacagtatcatttgtgactaatgacattcattttggttactctttttagggtgaacatggcttagatggtactccaggattacctggtcaaaaggtaatgagtttttgtaaatgtttctttcaaagtaagctaataacccagattttcaaggaggattcatagaagtctttccttcttggagacccttcaaggaaacattcattacagtattagtggcatgcttccccaagaatcagtagttatgctttctaagaaccatgggcgacttagaggggcaccagaaacactttgactgttatcagtcagagtgaaaactggaaaagtatttttctgcagctgtttcctatttgcacaggttgcatttctcagattggattaagcacaagtatttataatgatctaaactttctggcattacaaggatgctatatacacaaataagctcttcaaaacaaaactttctttgctttggcctgggtagtgcagaccaatcatcctagctacacaggagacagacacaataatattacaagttcacagcctgccagcctatagtgtgagcctaaggccagcttggacaacttgataagatcacatctcaaaatgaaaagcaaaaggaaggctggaaacagttcggtgaacagttcttgcttagccagtaggaggccatgagtcaaccgcctacatgggaaaaacaaacctgcagaatgtcacattcatattcatcatgaatgagaactttaacaccatccagggtgagtctctcagtgcctgagatctttctcatcaccaaaattcatttcctctctattctttactatctattcagggattgctttctctggaagcaaacttgactgtttgtgccaagcatattgaatgcacagaaactaatacactccagattccaagagggaagtggagtaactttaggtggggccacctgtcatgatacaactcagacaatctcaccttgagggagagcatcattggtgaaatttcagatgtcccctcaatgccaaacatgacattacgttccagtgacgtgttaaccggttttaaaggcaaaatgtctgaaagcactacagagctaggttttcttatatgtagttggcaatgtcatttgaaaagatacacttctatgtatagttacagcagcttttaggaatgtttccttacatggccccttagagagaatgaggttagattgggaggcatgaaatggcatgctctgagtgtcgtcatagcagttctagaccaagcccagtgggacagcatgttctgtatcttcgagtggaggtgcaagccaagggatgtgcggatttatctgctgggaaatagttttggactttccagcagctgtttgtggtggccacatctcattctgacaatgtggctgaggcactagggacatttaacagcttcaatgtcagcttgaattaccagatggagttaaattctatactttaggggaaacactattaaaagaaaggtagtcccatgcacctatgaactaatctattgttttctgttaatgttttgaggcaaagtgaagcaaaaaagattatttacttatgtttcaaaacacacatatattttaatgtgattgtatttgtatgctaataagagctcacactcttaattaatgtagattttaattaaatcacatgccactttatggaggcattgaaaaaaaaagctgagatctgaaacttttcacctttagctacatatgctggcatatgtttatttattatcccagcaaataatagtaatggaggtaggaagatctggagttcatgaaaggccattgtgagctatatcatgagttcaaggacagcctggtctacataatatcttctctcaacaaacttaaatagaaaaataaaaggaacaaatgaaaatattggtctcttatgcctgtacactcagaagatactggctggatgccttagaccatgaccctcagtgggtgcatggcagatgtgaccatctctaccactcatctcacagctatgcagccgtagctccctggcatgtaggagactttcagcatttactaaattttttattgtaatgtgatcaacctatttatgtcaaattaaatctgaaaataaacttatgacattagaaaggaatcaggtgagcaagagatgctggtaccttctagatttgaaggacaaaatagagaatgatccctctctttgtggctgtgagttgcatgagcaggacagagagaaacctggggctgcaggcaggtggacttaggacgccaaggttcacagctaaatccacttactatgaacttctcattagatgctcattttgtggaaggtagatctcaaagaagtctgtcttctatatttaatgagatgctagtgagagcaagaatgcaaactcagtctgtgccatttaattcaattttcaaagcaaatgacgatggtagaatcctcagaagctaacttgtgggattcttggctttatgaggtgaaattttctagagggtagggaagtattcagaaagctgttcctttagtattttgcattattcagactttgttttgtttaatattggcttggagcttcacatctcaaggaactatttaagtgagtgattatttactgttagaaatatcaccattattatgaaaagtctatgaactgtaagtctgttcctattactatacaccatgctcttcatttacagggagaacaaggacttgaaggcatcaagggagaaattggtgaaaaggtattcctttccatatgcatttgtaaggatgaattatgctcctgaaatagcttcatgtgacatttagctcctaatattctataagacacatgaaataattttatagtgatgctaaaatatttgcatcacttagagtagtcttagtatattggtgattgacagaagtagttctaaacttacttagtggtcaagtttccttattaagtgtatttcatttatacgtaaaagatgcaaagatttattgagcactgtatttttatgttatggtgtcattggtccactatggctgatgactgactaaaagattcctagtatggacactggtcattggatttctttcctgggggtaggggtggggtgggattaagaaagcaaaagagccaactataacagaaaagatacactaccctaagatcagaattattccaaaagatttaatggagggacggttagaaggtatgagtgatatataagaaactcagaagactttaaagtgccttgggtcacattacataagacttgttaatgccacgacgttacagatccagagtcagagaaaagtgtggtgaaggcttcgggcaggggctgaaggaagccctttttccaaagcagtcagtcccaagtgtgaaccttgacagaagaatctcactctgccctgaactcttgttggctaagcaagcatagccagtcgggtggatgtacccatgaacatgggtaccctggggctcaaatggtggatggtagttctcgagggggcaggcacagatgtcattcctgtaactcaaggatcatcacaccatcctctcacaaaattgaactctgcattttatacctttaagcagtgttatattttataaataaataaataaataaataaataaatgctaaagacatctcgtggacctcaaaaaccatctaaacaaccattcttttacaaacttacagcttcagcaggtggggtaaatgatgtcaaactagccagtgttgcttgcttatgtttaccattcttggcagtgatcagttatttgcatcttctataagtatttatagagacaatgagcatcttccataattacaggacaaattacacacattgtaagcctcatgataattacttttcttcactgaagtgagagagagcaccatataataaccatgcaattgagtaaaaattccattaaaattacaaccgttaaaaagggtcttttagaaatctcttgaatatatatatatatacatatttatatatatatatatttgctttagaataatatgtattatcaggccatgccttttggacttatttacatgtatttttggttccttagtagtattatacttgtagaaataaataaaagtaagcaatgtataatatgctttctataatacctttaaaatttggttattttgttattctttgaatatagctgatgtttcatggtaataagtggattcccacagactgaacatgaatgaaacatattatgtgtatgcattacaatgctataataaagtccattatgtataattaatatgttaatcaaacattgagaaaaagcacatattcagtgtactttgcttctaagtcttcccttctgctttctcgtgtatattgactgtcgatccatttatctgaaaatttcatggtttagtttgttcttaacatctgactaaaattctgttgtgtatatgtctcacatttttccttatctgtccattagtgaatagacatctaggttgattgcagttcctaggtagcaatgaacatgagtatataagtatctctatattagactataacgtcctttgggtagctgtgaacagctaccactaatgatagatatgagccttgcatgtgattgagccaagtcatttatataatgaagcttatcttaaggggtggttagttctccccaaaacagttatttatcagataggattctctaagaagacaggttctcttttttaaaatttacaatgccacatgatagctcataactgtaactttagttgtagcacctgctctctggcacctgcaggcaccaagaccacatgtgttgtacataacatacatacatacatacatacatacatacatacatgtaggcaagacatccatacatagaaaggatttaaaatgaaatggaaagtttggctctgctaaacctgttgtaaaattccagacaaagaaacacagttgtatccacttactgaaggcatatttttcctgaagtgcagttggtttagatttactcatgagtgatatttattcatgagtggtcaatctctctctctctctctctctctctctctctctctctctctctcacacacacacacacacacacacacacacacacacaaaatactaaagtgaacaagattttcaaatctcttaattttaaaggtaaaaattagttctttttggagactgtttgagcctgggggtgttgagagactgcagcacccaaatcatcctccagccttgagtgtccacgatgaactggttatagggnnnnnnnnnnnnnnnnnnnngcttatgggaattgcctgtttttcactatgctgtttgttgatgttttctgctcccccaagggttaggctaataacaatgaagaagctactaaaccaacaaatgcaggctcacactctcttaaagtcactgctgaaagactagaccttgtaaacggctagtgatgtgagttttattgtcctgctgctaccagagtcgtctttacatgctgaaattccacaagatatatgtttgtaagccagaaaatcatgtttagcccactattcctctggttttataaacgctgcatggatattttttactagagagtatctgctggaaaaatacttcactgagccccatttctagttggctcccttaaatgcacactatttaattccatgaaatgtgtaacattcaaataaataaaattacaaaaatgtatttataatctagaactatatgcctaaacatacatgtacatgcatatgtacatattcactttaatatttgaaaactgtatagattcatttataattaagccatgtgttcaaacattcataatctttaaccagcaatccacatcaggcaattttcatgttatataattcaaattttcagatgccagcttcaaatggagtgtgtgtgtgtgtgtgtgtgtgtgtgtgcgcgtgtgcatgtatgtgtgtttgagtatgtgttcctattgttgattctattaatgttgagttcacttgtattagttacacacgcaggaggtttgtttctttctggtggctgcttttgatgtttcagtaggaaagacagacaaagcttaatggaaaacatctatgcacttggattggccactcacgctgggcttgcgtcaagtgaaaaggcagtattgaatccattctcgctgttctattgactagtatttgtagaaggaaattgtagcagcatcttcaggttctatgtctcacatataacaatgatatgtaaatgcaaagctagtaagtggggtgggggtgaagttggtagaattttgtccatttatatctgacagattattacatatttaatttataaccaaacttgagagatgagataatatttttataccagtaccagaaataaatatcactcgtgaataaataactcacacacttacttccaacagtatttatcatgattatacctaatcaggaaatcaatagtaattatttgcccccccctaggatctattacccagaaatcgtgatcaccttagcctattgtttatttaattcttgacatgttaaaggcacaaggaagtcgaggaactgaaaagaatccatgagctttggccacataaaattgaatgagaaaatagcacaagggtaatttatgcaatgtttattatcttttctttgggacattctacagcagaattgtaggtcactcaatgagtctctttacccaaatggagaagtccacactagctgagacattgtacatccttgtcagtgtctgctggtgtgtacaccgatggtaacggtgacgaattaacccacatcacctacattttatgtaacagaacaggagcacgtgcttccaacctacccagtagcattccaaagagaaactagattgaccacctcttgcagtacccatggcagcccgtgattggcgtaaatgttcctgtatgctgctttctagatctagatcatctctgctatgctatttgtgtgttctttaccgtaggcatttcctttataagatactcaattcctatttaacaggatagttgtaggaatttaaagtatgtgtaacaaataaaagctactctataaaaaagtgattcagcaccgggcatggtggagcaccttttaatcccagcacttgggaggcagaggcaggcagatttctgagtttgaggacagcctggtctacagagtgagttccaggactgccagtcttatacagagaaaccctgtcttgaaaaacaaaaacaaaaacaaaaaaagtgattcagcaatagccaaactatgaaacatatacaaaatattgatattttgagagaacaggcttgacacaattaatatctttagtttttaaattttcacagtgttaactcctaaatttccttgtaaacaagcaagcaaaatattcaagaatatcagctcatgtacaaaaaaattactccaaaccagtaccagtgtaagataccattgatatgtttagcatgtttttgcatgacttagcttagtgattcttcagtcacattgatcctgtctgctttgttcaggtattacttgcatgctggcatgttggctgagggtagctagtctacgctggattttaagacactgtgtctttattctagatgcacactctctttcccaaagctatcatagacttttctctaggccagggtccgaaagaaagaaagaaagaaagaaagaaagaaagaaagaaagaaagaaagaaaggaaggaaggaaggaagaaaagaaaagaaaagaaaagaaaagaaaagaaaagaaaagaaaagaaaagaaaagaaaagaaaagaaaagaaaagaaaagaaaaccaacaacaaccacaagccatttaagaccttttgaggctccttcttcagatctagctggcctcatctccacagggttctgttaaaaaaacatacaaacaaacaaacaaaaaaaaccaggtcctacacacagtctgggttcgaaaggtgtgatattgcacccacccatcttttggttgtatggatatatgcaggaatggcaagtagctagatttcataacaaatatagcacaaatgagataaaactcttatctgtaaaccagtggtttagcaaagttgcttgatttaatactttgattgttcacattctctcataacctgaagtatattagtcattcttagtggggtgtacagactatgaaaaaagtgtattttaaacttgattgatagtacagctttgtatgtaagaccattgtagaaaaaataaactcattgtagtagtgacagaaaggtgctcattaactacatcaacgaattgcgttctacttttatctaatgtcacatgcattttaattttagtcacaataaaattgttagaataaatggaaaatacacatcagaaattaattgtatttttcataattttactattaatgctgtcttggcaattatacttaatatttaatattcagaactaaggcaaggttgctaaattctgttattacagtgaggcactttgccatcatcactacaaagtgaccgtcaacctgtcaccttacttcctgtgattttcctgtagttcacctcatggagttctcctgcacattagcctgatatagaattattccatttaccctgatcatgtgcaaaacttctccaaattttagtcaggactcacgtgctccacttgacagctgacttgaagcaagaagagaacagatggggagaataactataatttcaaaaatcagagcaatttatgtgtggccgctggaaattggtatgggagcaaccatgccaactttcaattatgcacggtgataggcaattggagctcaggaatggcagtgccaagtcagaggcttaacattagtcagtgcagattgtatgttatttccctcaatcctaactgtgctgttgaataaatactaacatggagtacagttaaccttcctttactcattattaatacagaaaatggaatgttaaagaggcatgcatatacacaaataagagaatggttttcatgagcatttgtcttttcaagtattacttcctatgtccatatattgtttcactatgtgactacacattattttatttaatgattccctttttggaaataagtcttttttttttaatctgttctttgtgatgttgactaaataattttggtgtggggattgtttcattgaagactaataactatcagggacaaagtaaagagtccactcagcatcctctatagactgggatgtggagcactgtagcaatagtacatacaggagctggaggggcacttgtttactgcagaggaaaatgtttttgcatcaaaaccaaagaatgatctttgaaagaaaatattctaaacaagatatgggccaagaggaaaggatggacacactaataggaaatcagaaaaatcttatatgccctaaggactgtcaacctaaagctggtgacatctcacttttaagggatttccactaaaatctacatggtaaaactgtcaccattgttatttaacagtaccctggaattttttgagcagtgttgattttacttctaaactacgtataacagaaattaacctgtttgtttgtttgtttgtttgtttgtttgtttgttttcgtctgcctgaacaccacctaaccctaaagactcaggggtcacatcttgttctcaaatccactcttcaaaactgtggccaatgaatctttaaaaacaattgtgtggctcccatttttaaaacattcttgagtttcccactaggttgaggtccagcccttgtggcgtctgacctacactttacccctagaaccccttttcccctcgcaccccttcttgttgccttttcttctttcaattcttcgacttctccagactcttccgttttgttcttctgttgtttttgttttgtttcctgttgctgtgacaaaaacaacccggttacaaaattccaggttacagtccatcttcgtattggacatcaagacagccagaacttgaagcagccagtcatatcacatccacattcaagagcagacagcagtgaacgaatgtgacatgcctgtgctataccactcttgcctttacattaccttcaggatctcctgcatagggaatgagtccgctcaggaggggcaggtctctccacctcaatcaatgcaatcaaatgaaccctctacagacgtgcccacaagccaacttgatttagacactttctcatcgagattccgtctccagattattcagccattacactttgaaggctccttttcctgctgtcataatttttaattaaacctttaacactataactcacctgtgattacgtatcatgatttacaattagaagttcctggcatgtgattttctttttccttcatgctcatttcccctcaggcaaatagaaattctatgacagacaatatcagcctaaaattttgtttttgtctctaatacctaatataatgcttagcacataaaagaacttaattcactcattaccaccaggaataggtacacaaggcttagggtttcttttcatcttcttaaagtatttgataaatattttgatgtacggaatatcctgtttttcaaactactgctattaaacttatgaggcagagttacatgtatatagtgtccatatacataatgttacatatacacaatgtatatgcatatgcacttactctattatattaattctatatgtcttactgtaattacattgaagatataaaacattaatatattcagcagtatactaaaatatgcacatagtaaattgatttaaaataatccaacttttattatttacaaatcacatttggcaggaacaacaatctagctctgtattatatgtcaaaactatagagtgcatttaataccagatatgacactgtctcttaaatttaatggtaatattaaaagttatctaccgaatcctgtgctgtcatattgaattataatcatggcagaattgttagctgttaactgtagcgaccttaaaatgcttttattaaagaaatttattcattcattattttgcacaatttgagaacagagatatgaaaatccggggggggggactttaacaagggccaagcagaagaacctagaccttattaataggttagaaggatttggctaatctggtggtttccctcttgttttgactttcactctagtgagcccagctctttcctcaggctctgagctactcaggtttccctcctcctgctctggcttcaggttcttgctctcacatcctgtgctacagcctttgtctgccctctgctgcgtcttgctcactccagcttcttcattcttttcttgacctctaccccttcctctacacccagtttacttctcgcctttcccttacacccgtctatgagttcctcctcagatactatcatttctagcaactctaaaaagatcattttaatataaatataaatgtatgagttccttggcaagtgacttgaaagtgttttcacatcaaggaaaaggatgttattcagtcctgcccctgttaccacccctgagcttttttgcatctcagaagactgaatccagggctctgcacaagctggggagctactctatcactgaattgttcccccagttcctattcttgaacatttctgaataagatcgtgtcctgtgtgaagagtgaggtcaaggttgtctttaagttttatgacaatgttctagtatataaaagaaaactatgcgatttaagatgttttaactggaatggattaaaaattacttaatcttgtaattttctcagccagaagtatacattattgacagaatttttaggacatcccagatgctagacaggtaacccgtgtcacaaaatattagttagcaggtgcattgtttttttatttaaaagccactgtcttgtaaacttctctcataataattgtatgaacaattcacagtataacaactgctgaaaggatgtgtctcaccaaaatagcagaattcctgtgcaataggcagagacactgatgtagctgctgtactacgtgaggtgtgtgcactggctgccgtgtgaggcttataatcccggcttatgaccagccttcgcctcttactctaatatcctcaagaaactatcttcagcttctccgtgtccctgatcatcctcacaatcccctttaagccatacagctttaaataggagaggaggcttaaagaaacaagacaccgaaatctgttaatatcctcttccattttctgtccttttcttcattgtctctcactgtctgtctgatgatgatcatactgcatggtgagacacaaggacaaaaatgatacaacagcgatgcttggggcatgggtttcacagaggcttattttacatacctgcaacagtccaaccaagggggattggagcaatgcagctggtgttagctggctacattccaggagcacaatggtagggagattgcctcccacttaaggttgcttatgtgacctgatgattcatgggggtagtatcctagtaacagtgtgacaaaggcatagggtcgcaccctgtaagtgcaggttgaatcatttctttcttagttaacaggaaattagatggtcacctacattagctctcactgtttagattctgttagcccccatagaagatattattttgttgttgttctaagtcaaaatctcttattttgattatcccatctgagttctgaaaaccctttagagagttcaagacagctgcaatactttctggtacattgttaatatcttggtattgcattgtgcttcattgatatttattttttaaaaataatattttttacactccatcttccattccccacccccatctaccctctgactgctccacatcccacacctcctccccaccccacccccatgttcatgtggataccctcccccccccccacctgacctctaaactccctggggcctccagtctcttgagggttaggtgcatcatctctgaatgaacagagacctggaagtcctctactgtacatgtgttgggggcctcacatcagctgttgtatgctgtctgtttggtggtccagtgtttgagagacctcgggagtccagattaattgagactgatggtcctcctacagggtcacccttctcctcagcttctttccatcttccctaattcaacaacagggatcagaagcttctgtccattggttggatgcaaatatctgcatctgactctttcagctgcttgttgggtcttctggaaggcagtcatgctaggtccctttttgtgagtattccatagcctcagcaatagtgtcagaccttgagacctcccctgagctggatcccccactttgggcctgttgctggaccttcttttccacaggctcctatccatttccatccctgtaattcttttagtcagaaacaattatgggtcagagatgtgactgttggatggcaaccccctccctcacttgatgccctgtcttcctgctggaggtgggctctataagtttcctctccctactgttgggcatttcatctaaggtccctcccttgagtcctgggagtctcttacctcccaggtctctggtgaattatggaggtccccccaacctcctatttcctgaggttgcctgtttccattctttctgctgatgctcagggcttcagtccttttctttcacccaataccagatcaggttcccctctcccccagaatctccatcctggtccacttttcctccaaggtccctcccctctccccaattgtgattgatttcttttctctcccaagtgggactgaggtatcctcacttgaccacctcagcttggaccttattgagttctatggactgtatcttgggtattctgtacctttttttttttcctctagtatccacttatttgtgagtacataccatgcacctccttttgggtctgagttacctcactcaggatgatattatctagtttcatatatttgcatgcaaaactcaggatgtccccattcttaatagctgatagtattctattgtgtaaatgaatcacattttctgtatacaatcttctgtcgtgggacatttaggttgtttccagcttctggctatcataaatatggccactatgaacatagtggaacatatgccctgtggcatggtggggcatcttttgggtatatttccaagagtggtatatctgggtcttcaggtagatctatttccaattttctgaggaacatccagattgatttccagcgaagttgtaccagctttcaatcccaccaggaatggagaagtgttcctctttctcttacaggctccaaatacttcttgtggctgccttctaatgctgctataccacaccagatactgatgcatttcagaaatagctgtaattatttttgtatgtgtacacgtgtgtgtgcgtgtgcgtgtgcgtgtgcactaaataacccaggcagtgtaatatatgaacagagccacaattcagttccaactccagctaatttcatgaatatctcaaagtcttcacctgggaaaatagagaatgaggctgtgttgcctcatctagagtcacgagtgacctgacataaactctcaaaatatggagggattctactactgtcagtttatgatcttgaaccagaatataagcatttatatttataagtggtcacttctcttttggatctgtggtcttctagtctccttgtatgctgtttactgtgttctattacagttagcaccttttttcattttgtaatgattgtgaatttcatacacatgaattctggtgacttaagtcactgatatgagtactgaatagaaaaaggcttgccactgtctccgaatcctctttctgggaaacagccaaacatctctgaagatagtattgctgttgaaccacttttttttttaacctcactggcatttaacatatgcctctcaacggatcctttgctcaatgtctgactcaattaaagaaagtgaaatcacaacatgaaagttttgttttagagatcatcttgctccttataaattccttgaaaccactctaaaaactaattcaatccagatacctgccaaaaatcattattaaattatttttaatgtgtgtgtatttttaaaatgaggatgtatcattgtatcacagagctgcctttccttcaagattcttagaaactcgtgccagtgatagccatggactctgagttatctgtccttcatctgtgccccctagcttgatgtctgccttggtcccaggggtctcgagctacagttaattaaaaggccttcgatgtcaatgaaactcagtaagatacagaattccttcaagacacatgctgggctttcaaacatatgtgtttgttcaatcacccattcattcatttgatcattgaggacctactccagactagatactgtgttcagcattaaggtaacatgaaagggacagaacctcctctcaaggaacatgtgcgatgtgtttcaccgtggcttgtataggatcccattgaaggaagagaatggagcacacacactgtcttggatggaggtaaagttaggtcaaattttattcattagtgaatcctgaagggaaagtaagatttctctgagcaggaagagtcagatgaaagttcacaagttcagtgcaatactttttgggatgtgtagggaacctgatggagtctattgtgtgtcaaaatggaaagcggtggccattgcaagagaaataaaagctcttcagaaaataattgaagcacagcttcaggctgaatgtccaaaagatggtgaaagaagaaataccaaaataccaaaaataccaaaaataccaaaaatacaaaaaaagaaagaaagaaagaaagaaagaaagaaagaaagaaagaaagaaagaaagagagaaagaaagaccaaagaaataacatcagagggtcatttggagcatttgattcctgatgtctttagcttgctttcctcagtaaaggcaccatcagaccaccaagaaactaaccaccttggtaaggaatattttgaggggaaacttctcaagagaacgcccacctgaaggcttccagacagatgattagaggctaaaagccctttgaaagccttagggcagtattagcaggacttttgttaagctctctgtttcttctcaaaatgcataaaaactgaacagtttagtctagggaggagaacaaatctgacctgtagtataagcttattctcctaaggcaaaatctttaggcaatggtataaatccaatcaattaatcatccctttgagtaagagagagagagagagagagagagagagagagagagagagagagagagagagagagggagaaggaggaggaggaggaggaggaggaggagaggagaggagaggaggaggaggaagatgaaacatagccacttcttttatgaatcaaacacagtttggtgttggttgtcaagtgttgtggtgagttactgattttacctgatagcaagcagatacagttactcaacaataacaacaacaagacatgtaagtttcagcagtcttctggttaggtgtctagtctttaccctcagtcttgctcttctgtccgagaaacctcagggattctgtgttacctctaggaattggtcgacatgttattcacaagtttctttgctgagatttcatcttggcttttgagaagtaaaagatttcagacataactatatttagcaagttgagagggagaaagagacaaagagacacagagagagacagaggcaggaaaacagacagacagagacacagagagagggagacagggagagagaccaagggaagagaaagaccagcagaactatgggaggggtgcatgttagaacatgtaaaggaaggaagaagaacagagaaaaagactgctctaccttttatctaatacgtgttttttcaaggtgtgtgtgtgtgtgtgtgtgttcccacacatactcatatgttggcaaaggtattgaacagagcacatgtggagaccagaggccagcctttcgtgtcagcttatctcttccaccttatttgagaccatttcttcttctgtgtactagatctcctgtcccttgagtttcagaggatttttctgcctctgcatcccatctctccttaaagagtactcctatttcagatgtgttgtgtcacttctgcctttacctggttctgggagtatgaaatcaggaagtcctgtttgcacggcaagcactttaccctgtgagccacttttctagcacctaatacctttcctttgttcttttttcttttcttttttgttttttagtatttacatgacatacataaaattttatgtttcaatgacaaaaagataagattaaatgtagagactatgtttaaaaaatcccatacctagtaagaaaatgtggaaatcaagaaaatgctgattagaaaatatagcaaatgaagtaaagttcgtttaaaaaaaaaatcaatgcacaggaaaatatctacaaacccatgggggaaggcagatacaaagctacaatgagggtgcattaatacagattaaacagtgagtttaaagaatcaaatgcaaaataaaggaaaaataaaatagaaataaaaggaataaaatgaaaagaaaaatagaaacaaaagagcagctttaaaataaattagtaacaggaaattcataagcatggttggtaaaatctatgaaacgacagccataaacttgtagaaatggaaaaacacattaaagctagtttactatgtgagcaataaaatgaatgagtaaaattcaggtaaacagacagaaagtaggaaaaagaaaaaaaagacaaataaggaacagaagaggtgatcacagatagtaaatggacgaaagagtgtggggactctaacatgtaccctaaaagagcaaactggttaacccgaaggacgtgtacaaacataatcaataacacctggaaaatacgccaatgttaaaaactatggaagaaatgggagaagcagctgaaaacacaccaggggatgaaggagcaactgatgttctgagttggactttatggacccatatttaaattgtatttaaaacgttctaggacaaagaaaagatagttttcaagaagttggcatatttcaaccccacagctaatgagaaatgaactaaaactagattctattcacaagcatatatagggatgtatttaaaaaggctccagctgatagaattgaactgttcagcaaaactcagatagcacaagattaggatgcccatggagatgcctgctaaggaattaccaagtgcacttcattaaccagttaaaatattgaaactgagttgtcctattgacatagactgaagctttggataacatgaagtagtcactgttaattaaatccttaggtaataggatctaataaaatatctttactgaaatccaactgtaaatactgcttgtaaaaagataaaactactagaaattgaatatgtgaagctaatttctaaaggtaaagttttcatcgcatgaaaattaaataacatgaatttgaaaaaaaatattaatatcctcactataaagtcagttttaagaaaatttcagagaacttgttaaaaaaatacttatttataagagaagttaattcattaatagaagatatattgaaaattgatattttatccaaagtcaacatgcataaaatgataaataagtgataaagttttaaaatcaataataattaggaaaaatttgaggaaaagacagaacacttgttaacacacaccaagtatagaataaactctaaaggaatatacattgaaactactctccaaaatgacaataagttagttaaatgataaaaattaattcacaattaattaatagcaatatcaacaataaaaatagcaatttcaaatgttttcaattttttttaaaagttggatactatctcctgaattttatatgcatagttaatgaatgaacatagccatttttttaacaggggcagggggagaagagaaatgtttgtcttataagacatcatcattatggatttatttttctttataacattccgggagcattggttattaatgttggtgagatgggtgacaccgtgtgagcttattattattacaatggatggatggaaccctgtggaggttaggacaacctttcaggttctgttatttccttccaccacaggtcccatggactgagctcagctccaatcaggcttacacacaagggtctctgcccactaggataagttacctgccaaggatatcagagcactcttcatttcatcttaggcaaaggctgagaagcacatcatactaacattccataagatttctgcatcgctgtaaatattatatcacatacaggagcaagatgcagagcccagaacctgctctctctcttctatgaatgaaataacccttacgtttcaatcaagtcttctataaagactctggaagtgttgaactttttcatatgaaggataccttacttccaacaaaaataaatttcaaatggatgaaagagttaagcaaatatcaaagcagagtaagtatagtgtatttgtgaaaactaataacggggtatgcataccaaaatataaaaagaaaatatggaaaaaatgtttattgacccatataaaaattgaacatggcaaatggtacaggccattattaaccaaaatcaagtaaaattattaacatagtaatgacatttgctgtttccagaggatttttaatttttgaggcaaaaaaaaaaaaaaacaaccccaaaactgagtttttaaatgtgtaagatatatgaacaagcagtcactaaatagcaacttcacaatgttaacccagtaaagctagagcttactggtagtctgtgatgtgtaatttaaagcaattatgagaagtgacttaacacccatttggcacctgttgctgggtggaattcaagggcaaaggcgtgcccatgcactgctggcggtatgtgcagaactatattctctctgggaaagcaatttggcaacatctgttcagaaatgaaaaatgcataagccctttacctagcaatcaccatcccgagaatcctactactgtgaagaatgtcacaggcaaacggtggtgtttacggctttaagaagtagaaagctttaatgcaagtcctaatggagccagctgaattcaaccatttattaagatctgcacagttggcccacagatgtcataatataagtatcacctattatgtatacagtacaaactgtctagagagcttccttgtggggaatgcattggcgtttattgcagtgttacttgcaatggcagaaagctggaaagtcaatgttcttaacaggaaatgatttaatacattatagtatagctctattatagaatattatgaaaattatattacataatatatattattcattatgcattatacattatatatttacatttatatagacatatttatgtaatgtttaaatatataatatatatgtatatatgtttatatttatacatttgtatattatatatcttgctatataatgatacatattatatattgtatatactaatctaatacattaaataatatataatattatattatttgttatgatatacaataatttataaaatagtaacaaaaatagggttatgactacatgagtaacacaaattaatgtcatatgtaatgttgaaagacaatataaaattataaaactgtaagcatggaatgaccatttataatggccaattgttttgaaaatgaagactatatatgtgtatgtgagttttcataaataaactggaaggatatacacctcattaataaaaatttgatatcccaatgagtagatgccattttaccattgaatgtgctggagatagagttcagcaggagagtgctaagggacctgcatctgagatgcagctcagtcaaagtaaagaaaagaaaagaggtaaatagtgaggccataggaatgattcacactttatcttggaaagatgcatattatacataaattatattttagaataacggttaaattcataacaattactatgtatatttgtattatatattcatagaatataagtgttgttattcatatacaaatattacataacattttaatatctgtattagcatatatatttgtatataatattcatatatatgttttaggtactttttttaatggtacaggcgatcaaacataaggccttgctcacagtagccaagcagtctacttctgagctaaatttctttcctggaaagttttataataaaaatatagcacacaagaaatgtattgatgactggaaaccagcttagataactgctataatgatcaataataaagttgaagcacaaatatgagaacagtaatagcaatgccccagtggcagtgggacagggaagtggcagacactaaagtgattgggaatggagatgacacagaaagaaggaaatgaaggaagaagtctctaatctgatgctgtacttacttattctccatttgtgtgacaatatgacactgcacaggtaactcgcctccagtgagcattcagaaagaaacacacacgtactagctctttaaggttgtcttgggcaaatcagtatcttagaatttgtgtatgaatttccaaattaactggtcagtgtgagctctcacatacaacctgctgaaattattaaatgattagttttggtgtattgttttgttttgtttttatgtaagtcaattggaatttatcttacaatatcaaatcatccatttcacaatatgcatacttaaattttttgtcttagggtttattttttagttatgtgtatgtatgtgtgtttgtgataatgagtacatgtatggtgctgtcaatagaatccagagacactgggttccctggagttgagtgacaggcagttgtcagctgcccacagtgggtgctaggaaccaaattctgggtttctgcagaaaagaacattatctgctgtgttctaagactgtgagctgtattgctagcccaggctttctttattcttagtaatatcttgtcattttcactatagaggtaacctttgctagagttattactaggtgtctggtgtgtgtgcgtgtgtgtgtgtgtgtgtgtgtgtgtatgcccccaggtgcataagtggtgggattaatgaggatatgaaggttgtcttctttcatttctctccacttcatttttgagacaaggtctaagactttgtaggtcactgtgtgtcatagatagttccaattatttaccttgaatctgggaagacagaaccacaattgaaaaattgctttgagaagcttggcccatgagcctgtgagtatgtctgtgaagcactgtttaactgctgagagtattaactcagtaagcagagttcttttatggtctcaggttcagttttgccacctggttcctgccttgagttcctagcttggctttcttccgtggtggactgcaacctggaagccaaataatgctttactccccccagggtgcatttgttcagaacacttactcagagccactggaaagcaaactagagagagtatcatgccatagaaacaaacacttctccaattcctttcgagttcctatttcttaccactatgcaaaatagtgtatagacagaagtctttaggaaagcggtgcagtgtagatctttgccagttttctacagtcaagagggagaatttaatatttaatgttctttattcacaaggttcaaaccataaagtataccccaacacaggcctcttcggggagaattcttttcaccagcattgcaaaacttattcctttctgttgaaatcttaatagtacaaggttcaaagttacgctcagcctaagttctgcagcaggggagtgttctggtcatcacctgcatcaccacacgttctgaagtggcaagacttgcaaaggagcttaagtcacaagaactgacgagaaatggctgatgccaagcgtgaggcgatatgatctgtggtctagaacaagtggcccaaggatgacttcatcactgttacaataggaaggaaggctgaggggctgctctcatgtctcatgtagacccatttgtgagtgacctggtcaggaaaactaagactacttacaagagaatggtaagagtagaagcaggagtcacaattgtaagattcaaacaaaattcttaaatagttgagcggaagctgtaacagcgtggatcctggaactaagttccatttattatttatgaacattttcaaacgttcagcttacgttgctttgttcagaaaattgtaggaattcctttttttcaacagctcactaaaaaataaatctccctcgagagtctttgaaagtttggatcatttaaaaggcatattattaattttactgcgttaataaccattatgatctagtagtgaggataatatttatcatgggacatcttaaaatgcatattatcataaaatgcataataaggactttccacctatataaattgaagttaatagattgtaacagctcaagtgggcccagtagggtcttctgaaaacctggtttaggacctagttaaacatgcattcctttcatgtcatattttagagattttgctctacctatattcaaacttgaatatgtttgttttgtttagttgtgcaaagataaaaatagaaaaatatttttccagtacattagactacaaaagagaaaaagagattttttatggttaatcttattggttttagttttaaataacacacatagaaaaatgtctattaagagtaatagttactgtacaaaacattttatgacatattgccatgcactgagaaaatcctttttttttgcatgtcacagtgtgagaaagtatgtgtttctgtttaagctgtagttattgttaattaccaatgaatatactttaatgagaagcaccagatataaattatactcagcgtctttcataatatggcttgcagattgcctacattgaaacctcctggtccactagatcagtagcagctatatgccttagaaatttaagcagtaccctcagagatcccttcacaacaacaaaagattgaagagcagtggttacctttatctatagttatatatacacatgcaatgcagggaatacctggggttacgtctataatgaacactgcctctccctcttccaacagactatatgcttctactcactgcacagtgtatgtaacacatctataaacattaccctaggtgaaagtatcacaccaggcctagtattagttttctgcattcaaggagccatacccactttggcatgcatgagaagtcacctagctttgtgactcacactgcaaatttggacacaattatcttctacatattctcttctaagattcaggatctttggcaaactccattttgatggatcaaattaaagcataacaccaatgtccactcaagtcctgtggacgatcagtgactatctgaatcatcatgctatgcctacataaacacacaaacaaaaacacaagaagtctaaaccctgccctgtcctttcattctgcaatattcctcaaaaatggaattaaaatgtcaaattatatgatgttgaaactccctaagtattttttattctttctcatgatagaactgcatgcaatatctccaacccaattcaataaaatttgtacatttctgtggccaagacacaagactccactagggttctgtgttctcttgaaaagcttaaactctgaatcttgaactaaaatggagccatgactcatgtcacctccacagctcaggtaatatagtcagaacataaagtagaattttatgtatgaattatcaagataagatctgtttccactgtaatgttgttgttgcagactagcctttctctaatagatcccagcagaaaattagtagactaaactgtccttacagagacaaaatgaaggctaatctgaaccatttgagagtgttcttcttttgtgaaaatgcctgacatttcttagacatctctacaaacacaagaagtttactgagtactgtgttatacaatcaaaggaaataaaaaagaaatagataccagcatgtgtgcatgagaacataccattgcttagaagaaacaaccaccatcttcttctcccatggatgttgtttttgtgtgttggttctgtgtgtcaacttggcacatgctagattcatcaaagagaaaggagcctcagttgaggaaatatctccatgagatccagctgtaaggccttttctcaattagtgatcaatgagggagggccccatccattgtgagtggtctcatccagggctggtagttctgggttctataacaaagcaggctgagcaagccataagaagcaggccagtaagcagcacccctccatggcctcagcatcaactctgcctccaggttcctgccctgcttgagttcctgtcctgatttcctccaagaatgaacagtgctagggaaatataagccaaatcaaccatttcctccccaacttgtattttggccatagtgctgtttttgtttgttttattttgttttcattttgttactattattattattattattattattattgaaaacagattcttttcttatacaatacatccagaccacaagctcccctccctccactcctgccacaacccctctcccccagatatccccatcccttccccttcagaagagctcagatctccaggaaacagcaaccaaacgtgacaaaacaagacacaataagacaagacaaaagccctcacattctttgccctgttttccttcttttgagaactttctgttcaagtctccagcccatattttgagtggatcgttccttttcttgattctttttaaattttagttctttatatattctggatactaatcccctgtcagatatgtagctagtaatggtcactctctttctgtgggtttttttcttcacccagttgattgtttctttagttgtgcagaaaatttttagttttatgaagtccctcttgccaattgatgaccttaattcttagacaaatggagtctgattcagaaagtttctttctaaaactatattacttatggtgatatctatgttttcttctggcagtttcaatgtttcaagttttatgtttaggtctttgatccatttggtattttgttgttgttgtttttgcaataagatagatatgtgtctaactatcattttttattattactttttcatatattgcatgcctcatttcatcttctgagtgtggctatccagttttcccaccaccctatgttgaagttgcttctttatttccagtgtgtgtttttggtgtcttcatcaaatattaggtggctgtcttagtcagggtttcaattcctgcacaaccatcatgaccaagaagcaagttggggaggaaagggtttatttggcttacatttccatactgctgttcatcaccaaggaagtcaggactggaactcaagcaggtcaggaagcaggagctgatgcagaggccatggagagatgttccttactgacttgcttcccctggcttgctcagcctgctctcttatagaaccaagactaccagagatggtcccacccacaaagggcccacccccttgatcactaattgagaaaatgccttacagctggatctcatggaggcatttcctcaactgaagctctttctctgtgataactccagcttgtgtcaagttgacacaaaactagccagtacagtggctgagttaaattttgagtcatcagttttgtcccattggtctacatgtctagttttatgtatatgtgtgtcatattgtttttattacagtggccctagaacagtggttctcagcctataggtggcaatctctgggagctgagtgatcctctcacaagggtcactgaagaccattggaaacacagatatttatattaggattcataacaatagcaaaattacagctatgagtagcaatgaaaacacatttatggttgggggataactctaacctgaggaactgtgttaaagggtctcaacattaggaagattgagaactaatgctctatgatatcacttaagttatggaatggcaattcttctagcagcgttgattttcgttcaggatagtttggctatctggggtcttttgttgttccatatgagttttaggatcattttcatgtttgtgtgaaaagtgacaacgggattattattgggattgcattgactctgtaaagagctatggtagaatggtctttttcacaatgttattctaccaatttgtgagcatttaatgtctttccattttctaatgtctttcttatctctctcctcattttagagatactttactttcttagttaggtccttccctagatattttattttctttgaggctattgccaatgggagttctccatgatctccatctctatatgattgtccttggtgtataaactagctaagttgattctgtactctggcacatcactgaatttgtttaacatatctagaagttctcaggaaaactctttgggatctcttacataccaatatcatgtcatcttcaaataggaacagttcatcttcttctttccccatctgaatctctttaatgtcctactctttgcttattgctccagctagtgctttaagcacagttttgaagtggagtagggacacttgacatccctgacttgttcttgacctcaaagggattgtctgtttcaagctttttttatttttgataaggttggctgtgattttttttctatatagcttttattacattctctctagccctacattctaaaatgaaggtgtgactaggtttttgtcaaggtctattgagatcaccatgtgtttgtttttccttaagtgcatttatgttattacatgtgttgacttgcttgtgttgaaccagccctgcattttgaaaataaagctaactaggtcacggtgtataatctttttgatgtatatatgtagtctgtttgtaagaattttattgagtgtttttgagtctacattcatcagagatattggtttatgggtttgtgtgtgtgtgtgtgtctttatttacctgtttgaatatcaaaggggattgagagtactccttctgtttcttttcctctgtttttatttctcttttgctcttccttccttccttccttccttccttccttcctttctttctttcttttctttctttttctttctttctctttctttctctttctttctttctttctttctttctttctttctttctttctttctttctttctttctttctgccttcctgcctttctttctttctttctttctttctttcttcctttcttccttcctttctttctctctttcctttggattagtttaatgattggctgtagatatcctttgaaaatcaggtaattctgctgttaattcatccagtactgaacttttattcttaaacctagaatgctttttattattatctcaatcttatttgttacagtgtatttaggttatcacttctgcttggtttcattttagtggtttcgctgaatcattcatttcttttagatttccttgcttaaaagagtaaaaggttgacagtattctgtaatattctgaatttatttggtgtctcttgtgttgtttccctgttcattttttattctgtcaaattgactctgctttttctttggttgtgtgtgcgtgtgtgcctgcttgcacatgtgtttgggtctattttattgattttttgctcagatttttatcacttcttgacattgactgtgcctagatttggtgtgttcttcttttttcaaacttttgagttgcatcattaaaatctgtacttccccccccccccccgtgggcagtttaaaccccccttagagcaatccatccagtgtgcctcagtggttttattatgtcatgtcttcattttaattttggtccagaattttgctttctttattgatttcttctttaacatattcatcactaagtaacaagttgtttttatctccatgagtttgtatatttataacagatttttttttttgctgatttaaattttattaccttgtgatcagataggatccatggagctgtttcagtctttgtgaatttgtaaagatttgctttgtgtcccaggatgtggtctattttagaaaagcttccaggtactggtgagtagagtccatgttctttgctgtttgggtagagaattctgtagaatctgttaagtctctctgaaatatgatatcatttaatcctatgtatccacctatttcttgtctggatcacccatctgagaaagtgaggtatggagtcacctactattaatagattagttgatgctgctctgaacctttagttccagcagtagatattttgcttaatgaaattgggcacacctgagttccgtgtttataaatttagtaaagttatgtcttcttggttaactgttcccatggttagaatgaagtgtctgtgtttatctcttctgattagtttttgtctgaaatctattttgttagataccaggataacgatgtctacttgcttcctggttccatctgattggagttcttacacctatcctttgactatgaggaagttccaatctttaaagttaagatgtatttcttgggaaaaaaaaaccctacataaatggattgtggtttttaattcattcaaccagcctgtgtcttttggttggaggactgaagccactgatattcaaagtaattactgaaaaatgtgtgttagctccagttgccatgttgttgaattttggtgctagtgtgttctcaatggaattttgtgctttaataattacaaattcatattttccccacagtttcccaatcatgctcataccttcttcatcctgatatattgcttcctttgtttcctttagggttggtttggtggatataaattctgtaaggttgtttatgtcgtggaaactttctccttcaattacagcatatagttttgtgtggtatattagtctaggctgtgtgtcatggtcttttaggatgtgaaatccattgcttgaggctcttttggctttcaaagtatccattgaaaaatctgttatcctgatgtgttttcttttatatatgacttatgttttttctcttgtaactctcgctacacattctttgttatgagtacttagggttttaactacagcaatgccatggggatttctttttctggtctgtctactgacgttctgtgcatttcatgtgtctgtataggtgttctttctttggtttggggaaacttttctactgttgtattgatgaagatctggtctatgccattgacttcggattcttccccctcttctgtgcctgtaattcaaaggtttagtgttctatgtttcctggattttcctttcccatagaggtgggtttttttccccatatttctggctgcttaggtctagatcctctactttaaaggtagagttctggtgttctgtcttgcttaattagctctgcttcttaggttctcctttgagttttctagcagagttattggtcttttccactccatcttcagtgtatctctctgtctgtgtgtgtgtctgtgtgtctatgtgtgtgtgtgtgtgtgtgtgtaggggaagtgtacatgtctgtggaggtgtgattacatgcggagcctagaggacacatttaggtgtcctcctcaagtcctctccaccttatgtgtttgagaccaggtcactcgctgaagctggagtttactggttgggctaggctgactgaccagtgggccctgcaatctgccaatctatgcctcaccaactcttagaccatgcacctcacctagggctttaatattagtctttttaaatatgaggggtctgaacttggatcctctgcttgtataaatgaagcatctctcaagccaccttgaagttctttttctgggtgtaaaagtcatttatcaccaatatctcgacccattcatttagggcagcataaatggtgatatttgaactttattattctctctattttattagctttaatatttctgtaataagaaactttcttgaatcaattccccgattaccaccagttagaaagttttgttaactattttccactttatacactttttaaagctgagagttcacatctataaatagttgcccattatatttttattttttgggtttttgtataatagatctgttgtaattcattgaacttgtcctcactgataataaaattgtccccagtttggttagtaaaagaaatttcacctagtccctgagtctcgtcatcacgggccattcatctctgtgagctgcagctgttaggatggcagatcatttaggttttaatgtactgcaggggctgacttagcttttgtctgcaacataaacgctccctgagtatgaccactctcagtactttctttactcttgaactcacatggcttttaatattgaggtttcccttgcaaagtgtcacagattactcctccccaaacagcagtgttgaactcttctatctgcagtgcttagtacaaggctttgaataaaattgggatgctatcaatttgtttgattatttaacacttcacaacttaagtgggcttatcattgtagaaatgttttcaaaattcagtagaggtacccctacttgtttatcatagcgattaaatctgatttagttgaaaatgctttccattctcaactgtgtagttgagtgtgtttcttcagtcaaggtccagtgactagaattaagccacacaatttataatagcaataagataaactctttaaaacattgtatttagaaaccaattagaaagtgtaaacgtagaagaacagatgaactagtcagaggtagtataggaaaagtattcaccttttcctacatgattgaataattagctattaaagtatcatcttactcttgacataccaagagcacatttttctgtgattaaggacaccatctcattttcctatgtggcttttctagaggacctgagcaagtgtgtgtgcatctggggatgaaacagatcatagaacaaggaaatgattccgtacaaatctagcttggagaaccaatggattttggggggttccttataggaccatgggtaactcaaagacagaaagcttacaccagcgtgggagaagacgcgagaaagcttcccagtgaagggtctttcgatcttcagctgttgttcaaataagcttagggagcagctttgagtccctgtagctttctgggcttcctgagccttataaattttgttagctttttgagtctgaatgaactttcctcctcgttcttgaaggaatgtttcaatccagaggaaagaattacacagatcatagcaaggttttcaatatcatgaacttatagtaatggatgcttctgttttgacaaaaaaatgtatggtcagttcataaatacctttcccaggaggttagctcaaaataatagctaggtaatacccttagctcaagtttacagataaagaaactacagctcaggaaaaaaagtcatattttttttctatcataaaattctttatgctcagcatctagttaattctaagagagtggcaattcattttaaagatgtattagaaaatgaatgttttagaaactttcattcccaaaacagaaaatttaaaaaaaaatctgtaatgcactcatcctagttagacaagaaatgagttagggacagagaggagagcaatggctcctggacccagttgaaattggcccaggatgattatgtagaattccctggatctgtcattctgtccagacaccaggcagcagctgcagaagaccgaattgcttctctcaaatgtgtattgagtttcatttcctttccgcatcagcaaaataaaatgaaatggggaattttggaaatggtctgaaatattattgctgacatcgctgtaatttggcaatggtcggaccattacacagatgatttagcagtttggggaatttactctgcatgtggcaccaggcctgagtcagcctgacactgtcatttcaaattccaccgtttccctcgggattctctgtgatcttcatcaaagagttgtttgtgggagacctactctgtgtgtctgcccttgtgtacatctgagagctgagtcagtccacattagtagctttgtagaatgggcctttaatgtttcatttgatgtcttgtttttgcccatcatctatctcctcccgtagacatccctttggacctggctttcccccaaagcaccactctctcgttctattccactagctaggatttatggctatgctgtctccacctataaaaaccagtcacccctcccccaccccctttctgtttctctgtttttctatttctgttgtcttgctctctcatttttagaggacttgcttcttacaatttgccatttatcacctagaaactgcagttgtaagtgattggaaggggtaggctgtaatgtggagtttgctaatgtcctgcgctatcatgtttcccatggtgcactggttaactgcagcctgtcaccatgaggagttatgggaacaattctgaaaatgcctcttttgtctctattccaaatattcgggtttcaggagcctggaaattctgagacggttttactgagcatgaatgaccatcgcctagatgtatcgttcccaaaggctgattctaagagagtcttgaattttgcagtgctcgtataaatgtccactgggcagttttcctcctgcagaaattagcagagttaactgctagctatgactctggaaacaataataggctctaggttaaactgtttcttaaatggaactgtctactgtttgagtcagcaaattatcacagatctttctagatctatcgctgttgtcacttgttgttgctggctggctggctggctttcaactcaagtttgtaaatcaggctaggctcacagaggtatgcctgcctctgcctttcaagcactaggatgaaaggcctagaccaccactccagtctgttttgaatgccagtgactagagataaatttttgctagacatgcattttttgtgtttcaaataatagaccttacattttgtcttagaaatatttttgaagaaccccactgaacatgtctcttgaaagttttattctttgattatagaataggagacatctcaagaagtaggactgcaggaaggctgttggtgagctgcctcttattgagggcacctgggcaaatgctgccaaggtcgcctcaggaaagcagaagacggaggtgtggaactgtccctctgtcaaagatgacatgctaatggacaaactctcctcaccgttgatactcagagcatcagttcctctcacccctctattctgtcttgccagggtcaaattaatttattggcttcagaacaattccagagaaaggaaaccaaggaaagcggcaagggtagagttagaaaagcacattggcagcacacacaactttataagagctgcccatcagctgcagccaaaaatcaatgaaagccctaggcctgtgggcaacgggaacttacattccgatgagtttgtacttttactgaacaagtaatttgcaatagtggaagttctttgagcatggaagttacttagagtctctgacctataccaggaagtaggggtgaaaataataaccacttgtggtttctgggagaactgaatgccgtgcttgtggagctggagaaatgggtcaatggttaaggacatatgtgtgtttacttttctatcgtgaaagcgccatggccaagataacttacaaagaaagcaattagggctttagcccaattagggcttatatttcagagaattagagtccatgatggcacagcaaagccatggcggcaggaacagctgaaagctcacatccctatcccctcaggtaggagtcagtgagagacacactgggaatcttttgaaatctcccctccccctcagtgatacacctcctccatcaatgtcccacctgctaatcttcccaaaccattccaccaactggggtccaagcatttgattcatgagctgctgggggccattctcattccagctgcaatagagcatatttttgcagagggccaaagtttggttcccagcccctgtgttgagtgattcgcagctacctataattcctgccctgtgaggaccgacatctcaggcctctctgccggcacctgctctcatatgcacagacacattaaaaaaataatccgtcctgcgtaaagcacagatcctggtaggggaaatatgtgctgttacgttcctgatgatatatatagaaatgtacagcactaatgttaatagctcactgttttacatacgtttcagggttaattaatacactgtagaaaggacttggctactcaactacatgatctaaccttaacattagttttatgaaagaacagacagtagggaagtcatcggtgagaattaactcccacgtgtcctcgtaatttgattagaattgactagaattcttttggttagaattgattttgggttcccatgggtctaactttccgggtttatatttttaaagaaaattttagacattctatgtcttctaaaaaaatatttcatcgtttaaaaccgagtcaaatacaaagaaacaacctctgctcctcctgtttgctaacttcctctgatgtcaaagtgagtagagcgcttcttaaattcaagaggaaacttagaatgctacggttttgttcctgctcacttccctccagtggagagaaagaggcagctgttgcttactattttcaactttcttttgtttgagatgtactaaatatgcaacacatgaatgtatgtttttttttcttgtctggatttaaaacccaccacttcatttttctgcaaacaatgatagaatttaaaacagagaagccatcgagatcatctgcttcctgcataggacctgaccagttgattccacttaaaacaagctcgtcatctaacatctatgcacttctttggtgtttttcccctacatacttagcctgactgctagttagtatatacttctctttctaatgaacaatgaaaattctccctgttaattattttaatcaatctaccaccaaataatatttttaaatgtattctcaatttagattatattaatcttattagtctgttaatagtttatcaaacacactacgttttctcttatggatagcttgttccatgcctggggatacactctctgctcagagccctggctgcattcggctacccattcttttcatcctataacacttacaagtattatttgatcaacccagaattaagtgccagactgcacatttcatcccttctttgcattcttttattacaacatagttttggtcactgaaatgtttcatgtcatgagtctattacatagatataccatatatgcaataaatttatcaatggttttcttcattggaagcagtgttaccctctaggggatatttagaaatgtctgtaaatattcttatttgctgttatcgaggagacatggctggcttctggcctacagtgaaaagtggcccgggatgatgctaaacacccagcagtgtaggggacaccccacagtggagagctgaccagagttctgaggttagacgacccaaatgacagatagatatgtatgttggtaaagagtgaatggacctttactgtgtaccatgaagactccgacagttgcacacccttcagtaaaaaccctgaccagcctatctggctttttaaaaaaatatttgtttatacatttagtgtgtggggagatgagtgtgtgtgtacacacacatgcacacacacacatgagcacatgtatatgtgagcatgtgtttgcccatgaagaccaaagcaatcataccccctaagagctggtgttacaggcaaccatgaggtatccagtgtctcagtgctgggcacgaaactcagcattctggaagagcagccagctctctggaccaccaagctgttgctccagcccctgtgtgccttctgggacccacactgtgaacattttaagtaactttgcctctttctttgaagagatccagatgctctgcatcttggcttcataatgattttatgttttgaaacaaataaatttaatatgtttagaatgctggctttaaatcagggtgactgagttgaattagggaccttgagcatatgacctaatatctcttgcctttggtttactcctatgtaaaatgttggtgcttatagtagattattcttattttttttttaattaactcaagatcactttgaagtggtgtgctgcttctctggctttctgttacaacgcaccctcttaccctacaggattaacttcaacagactatcagctctgttcacggcagcatcacagtcaccacctcagcatcagcagcattactaccaccatcttcaccatcaccatcctctccatcaccatcctcaccaccaccatgctcatcatcatgtcaccatcactatcatcctcaccctcaccatcaccatcaccaccctcatcatcattacatcatcacaaaggcttatctctctttgcccttctttcagccagtgccaacttttctaatgtcctgtaagaatgtacaattttaactctattttgaggtgctcaaagctgaaccccagatttcacacaagttactctaggcatatgatgtgcaatagaactgaatcactggccccagagttatttcaaacttgagattatgtttgtgatcaaatacattttaaatattgatgatagtatctgtgaaattctatttgtcttcctatgccaaaaatttcactccacttttataaataactgttatccaccttataggcaaccctttttctaaatagataaatattttcttctctgtcgatgggactgttttttagaatttatttgtatgtatgtgggtcttttgctgaatgtatgccagggtaatatacacatgggcctggtacctttggaagccagaagagaatgtcagatgccctgggactagaattacagacagatttgagtttccatgtgcatacaaggaaatgaagctgagtccttggaagagcagccagggttcttaactgacaactcatctcttcagcctcgttaataggacgcttgtcattagagtctgaagatttttaaggtccctttgcacactccattagccacagcctatggtgctagacacacaactcctaagctttctgtcatgggtagtattctctgtctagaccatcactttccgggtgaatgttctgtcatgacagacaattcgtggagctcagtgaaatgatatcccttgaaatgtgtctaggacaattagaagatgattcttaaaattaggttccttcatggtttttttgttttgttttgttttgttttgctttgctttgctttgttttggatttggagcgtggaggtagagaaggcctgcatactgtttcatacaagggggggatcagaggacagctcaggagatcaattctctccctccactatgtgggatgaagttattgatctcaggtcccacaccatagtggcaagtgcccttacctactgagccatctcattggatagagaatcaatttttaacttttaaaaaagagattaatctcctgagactctggagtaactattcacctgatattttaagcttaaagtcctcactgcatttctagtctctacatgctatgaaaattgaatttgttcgttttattttacctgtgcgttatttatacttcattttattagatgccaataatcttagatcattagaactacacatatgtatttctgtttatagagtatttcactctttaaaatgttctaatttcttaaaattgggtgattaatattttttaagatttatttattttaggtatatgagtaccagaagaaggcatcaattccagtacagatggttgtgagccaccatgtggttgctgggaattgaactagaacctctagaagagcagtgagtgttcttaaccgctgagccatctctccagcccccattaatttaatatttttgcaagagaaataacaatgctcatcaaaaaaattgcaaagatataggtgaaaaaatcaccttagtgatgcaatgcagatatagtacagcctgttcataccttacacatacacaacatacactacatacacaacacattctatatcacatactcacacacactaaacacacacacacatactatatttacacactctctacactcaacacacattctatacacaacacactctatacaaaatactgaagtatgacctgaggagaaacactaatagccacaaaaatgcatcaattatcattttaatcattttactttgtttttttcccccactcttattctcaagacctgttgaaggctgatgtgcagataattagtaaatggataaacagactagcatttttaaaagaaattcaattgttaggtttgcatgatatactaataaatatatccatctttcagacagaaattgagcaaaaaatatgtcactattgttatgtatcatccaccatgatattaatgttcatcttgaacaattgtgacttaataagaacatatgtcctctgccagaagcccattattaacgggtagagcctataatgtatcgctaccatctatgccagggttttgactgacttggtcttgtgatggtaactgtcttagtcagggtttctattcctgcataaacatcatgaccaagaagcagttggggaggaaagggtttatttggcttacacttccatactgctgttcatcaccaaggaagtcaggactggaactcaaacaggtcagaaagcaggagctgatgcagaggctatggaggggtgttctttcctggcttgcttcccctggctttctcagcctgctctcttatagaaccaagactaacagcccagagatggtcccacccacaaggggcctttcccccttgatcaccaattgagaaaatgccttacagttggatctcatggaggcatttccccaactgaagctcctttctctgtgataacttcagctgtgtcaagttgacacaaaactagccagtacaattgcccccttgtcaacttgacacacaaacacatcactagtaagcctcaacccttacgttcttattcatccccaaggtctaaataactttaaacgtcccacagtctttacatattcttaaaatttcaatctctttaaaatatccatctcttttaaaatccaaagtctttttacaattaaaagtctcttaactgtgggctccactaaaatagtttcttccttcaagagggaaaatatcagggcacagtcacaatcaaaagcaaaaatcaatctccaaccttccaatgtcgaggatccaactcacaatcttctgggcttctccaagggcttggatcacatctccagccatgccctttgtagcacatgcatcgtcctctaggctccagatgcctgtactccactgctgctgctcttggtggtcatctcatggtactggcatctccaaaacactgcatgaccccttcaatctgggccgtcaattgcaactgaggctgcaccttcaccaatgccttctatggcctcagctgctctgcgtgaccccttcatgtcttcaaaaccagtatcacctgggtgacccttacacattaccaagtcccactgcagcaggagtacaaccttggctatctctggaacacagcctctttgtgctttcagaaaacacttcccagaagatgtaacctcaacgatgctggtctcttcttctttttttaaatatttctttattaggtattttcctcatttacatttccaatgctatcccaaaagtcccccataccctccccccctcccctccccaccgactcccactttttggccctggcgttcccctgtactggggcatataaagtttgcaagtctaatgggcctctctttccagtgatggccgactagaccatcttttgatacatatgcagctaaagtcaagagctccggggtactggttagttcataatgttgttgcacctatagggttgcagatccctttagctccttgggtactttctctagcttctccattgggggccctgtgatatatccaatagctgactgtgagcatccacttctgtgtttgctaggccccggcatagcctaatcaccgctaatttcttagctccaactaaccagcatcaatagtcccaataatgcaaaggttttgctttagtagtcctggtatcttgttaattacacctgattcttcagccccagctaaccagaaccacagaataatcaaactccaaaatagcaatggccctgaaaagagtctttaattttccctctgaaatttcacaagccaggcctccatcttctgcactgttctcaacataactcctacacaacatctgacagagcttttaacaacgaatggatcttctagcccaaagtccaaagtccttccacagtcctccccaaaacatggtcaggttgtcacaggaataccccactctgctggtaccaatttgtcttagtcagagtttctattcctgcacaaacatcatgaccaagaagcaagttggggaggaaagggtttatttggcttacacttccttactgctgttcatcaccaaggaagtcaagactggaactcaagcaggtctggaagcaggagctgatgcagaggtcatggagggatgttccttactggcttgctcccctggctttctcagcctgctctcttatagaaccaagactaccagcccagagatggtcccacccacaaggggcctttccctcttgatcactaattgagaaaatgccttacagttggatcacatggaggcatttcctcaactgaagctactttctctgtgataacttcagctgtgtcaagttgacacaaaactagccagtacattaactataggtgctatgtgttagtgaatgtggtaactatgtcttgtccagtgtgacaccctacagactcctctgcctccttctctttctgcctccttccccacaaagttccctaagctttggtaaggagagttgaaataaagatgtctcaattggaataagaacctagtctctttttttaaaaagaatacataatggttgagatatatacactgcacttttaaatttgttcttcaggttctactgtttagattccagtaattttatagtataaaataagcataacatgacttttgtagctacaccatagtctatttatctatgtgtaataatttattggatcgggtagctgcaccacagtccatttatcattgtgtgataatttattggattgggtccttattcctgggcatgtggaatgtttctcgtaaatacctctgtgttttctataaggtgccttaagcttttcatctggttatttccttaggatacattcttaaagtaaattcacaaggccaggtggaaggaactgatttaagagccttgatatatattgccaaattgccctccagaaagttctttcttgcttatagaagaaaagaaataatccatcttctaagtctaccctaatcatttttatgtagtattcctttgaacctttgaacttctctggttttagggctcagaattgcttatttttaaatacatgttcccccctcccagaggattagcaaactaatcactgtgtttcatatatagccaaacgatatagctctcttgatttttcttagaaaaggttttgaaatacaacatttttttttattgtttaaattatttctttccagggtgaaccaggagccaaaggagactctggtctggatggcctcaatggacaagatgtaagcctaattctcctttaaataatgttctgtttagatttttaccactgacatattctttctaatgcaattaaagctggctgtccttggcagagccagccacagtcaaacaaatggagggatggaggcagatttttacacagttattttacagccgtgttttcgtttcattactgggctctcaaggcttcatttgtctcatgaatgtcttttcttcctctttatttcttgctgacttttaaaaaaagcctcacttttcactatcaatttcttcctgcatatgttcagtagtgacctgtgttcccagctggcagtcatggttcatgtcacccatgtctccctctagagaaaggctgtgtctgtagaattgcatttatgtagagaggagaagggagaaaaggaaggctatgttctaggctcatacactcttacagaaagcaatgaccttttgaccaccccatataactgtagagtgcttcaagcttaagcatggtacagcctttaacatgtctgcaattcaaatcctgccctttcactagagagctattgctcctccttacagagtgctaccacagatcttaggctgaaatttgaacaataggctaattttccattttattttattttttatttttggaatgtacctattcaaatcaacagtcacttctttctattgaaacacagattgaactgggagcttacagttacaaccctcatcccccatttatattttcatttatatatacactgcttatatggcttaaagggccacattacctagtttacaaatcaagtctatcaaaggaaacactacctacagctctctctgtctagttgcataattcaggaagcctttgaaatccttaacatggctagaagtattctgaaattcatcttgtgtgcagtagaccttcacagcaggaaagaaggctgaaaaccaatctttgtggactgtggaggaagtaaaagagtttgtaagagacttgcttccaaaagagaaatctctcaggagtcacccccagcacaagctttgttgtaccacgcttggctttagctcctgtgtagttcccaagaatatccattcacgttgctactgggacaccaaatgtccattcacattttactgtgataccactccttcttgctcttcaccttcacaatgacttccctagactgtggtggcactagaaccagtggcttcccaccaaggagtctgtacatactctcaccgccttctcttgctacatcaggatgctgaccaatttgtttaaatgcagcatctaacctactttgatatcactgcacaatggtactccattcaatggtaagagtttgggagcaaaggcccatattttaccctacctttgccattcattgaacaaggcactatggaaagtgcacttatggggagacaagaattcctcctgaatgggatggtcctgcaggacgtaagcacaacttcagtaagaaaggtttctattcctttcatcctgtaatttcttgagactaaggaatatgccaccaagcaagaaacagcccactaattttctcagcaagtcacctgccataatgctttgatctagcatgccaaaaaagctagcagaagactgagtttcagatttctaatgaaagtagtttctgaaaaagaatgtgttcaaggccatcttcccagctaatatgactaaagaagaaagcaagctctcattacttgctcctacttcttggtcatggtttctgaatatctcgggggaaaaatcaaggaaggaaaacaccatctacatgtcaactagggaaatagtaaaatcaccctttaattctgaatggctgatggaaaagtctcattttcccactacatcatgcccctcaccactgcatttcagcacttgtgacaattcatgctgaccttgtaattacaggcatacctttcagggaatatattgtatgttaatggtgattttaaatctcactaaagctgagtcactatagggattttagcttccagaacattcagttagaatgcaagcgagcaaattcaatatactaagcttgccaccttctaagctactttctacattacagtgacttgtaatggtttaatatttccactaaatgaattcaaaaaggcctgtcttgatggctttcactgttgcatattggatttagtgtgatgtgatgacccgtataatacatctttctgtgccaactttttcaaaaaatagctagtctacttagcttagaaaaagaaagcacactgtggtccgttcttttcagctgggcactgtgggatttaggacaaggcacttctctgccatgtgagattgtctttatgtatatgtatgcatagaaatatgcatacaatagcatttaacttaaaaagaggccatgaatttgaaagagagcaaggaaaggtgtgtgggagagttgagagggaggaaaaggcaaggagaaatgtaactacattataagctctaaaaaagaaaaaggaaagcagaatatattgtgtcctcaaggttcccaagtaatatgaaatagcctttattcattgggacaacaaggctattctctctctctctctctctctctctctctctctctctctctctctgtgtgtgtgtgtgtgtgtgtctctctctctcactctgtgtgtgtgtgtgcttgtgtgtatgtgtgcttgcgtgaacttgtatgaactttgggttttaactctaaagtattaataagagtatttctactgcagtacaagtgattgctactaagcactatagaaattgcaaaaattttaaatttctataatttatccttcaaaatatcttagaatagacttgatatgtatatatatatatatatatatacatatatatatatatatatatatgtatcctattgtaaccattgaggtcagactgtctggttccaatcccagctcttccagtagctacaggtcacattactctatttttcctccttgttcctttttgtgcatgatgggaaactcagattattagtacttgcagatgtgctgggagaatcaacagagttatcatgcatgcagcagtagaagggtgctcagcacacacaagaattgtatgggcaatcattctctgttatcaaaagcttttagatgtgatgtatcatcttaatagatatctctttcattagtttccttccattcaaatgcacaagagtaggtttcagtcattcagcttagtctttatgtttattttgatctttgaaacatcctacgacaaaattactgtaactggcatttctcgaattaccacccaaatctccatacaccagtgtgatctgtactactaattataaaaactctgaaatgacaaaaccagaaagtaccatctggtgatagctgttgccattgctaagaaactacattatatcagtagatagctcaaggaattaactagtagtttaaatttttaaataaagaatatcttatactgttttatttttttaaaatgctatatatgcacagtgatttttttccaataagacctctgcagtctatttgctttatgtgacagcatccctcagcttttcttttgtctttagagaaaactttccatctcacattacacacagatacaactactatgcttcagggaatagttttactgagatccctaataatagatacccatccatgtgtcaagtttaaaatccctttcatttgatgctttgtgctttttaacttaaagttttatagattaaaaagataaaaactttcgtaggtgaatactgtgtttgcaatattgctcctccccatctctccctctcatttctcccatatcttccccaccactcctcaaattcataacctcttctataatgtttctttacacacacacacacacacacacacacacacacacacacgcacgcacgcacgcacgcacgcacgcacacgctcacatgcatgaccaactgagcccgttttacgatgttcttatgcatatgtgtttagagctgataactgctttaggactggataacccatgactgggcacatcccttgggggagcagattcctttcttacagccattgattgctgatggctcttcatcccgagatgggggtcttgtgaattttttctaatctgcactggcttgtcaacaggcgttgccattatgcaggtcttgtttaggcaaccatattgtcagggtttcatggccgcaactctgctatctagaaggcacagctcaggcattacagaccaacactcatacttctaaacatgttttatgtttttgctctgtgtcttttttcttccctcaggcactcaataacattgatagcagcaacagcatgacaggagaagaaaaatcgtacttgcaaaagtattaccgagctgcttttcagagcctattacaaacccatagccttaacattacggcactttgtcacaggggacatgagttacatggtctacttccatggccatagctgtaggagcttgatgaacacagagcttctctgctgcattttattctctatgacttaaagcacagctgttagatatctgtcaacctgagtgtgaaacaccacaaaacgccattaattaacccttacttgccctaaaaaaaaccaataaataacctttgttaagagacagcaagctactgacagtactaatcattacaacaacgattctgagcatctcttcaaaataactattgcatatacctttttttttttaaatgcaggtaccttgactacctaggacgatgcaacaaacactcttcttttcctgactccctaatgccatattgcaaagtcttgagcacatataatagatttgctggctaataacattgaagtagcttcccacttaattaaaattaaaaaaattattcccatatctatatgctttgacctctgactgaccttgacttaatatcatacatcataagatgctaccttagtgactattctacttgctgtttatatcacctgtacactttcccctgggacttttctaggagtgaaacctcgaatagcacacagtcccctgcttgcagaggtggtttcttaccatcccacctgaggcagctttctccagcatttgtctcatcacatctactgaaatgtctactgtccatctcacaagtcatacagatggcaagaatcttaactttggggaagaaaaatacctgcatttatctatctatctatctatctatctatctatctatctatctatctatctactgactgactgactgactgactgactgacttgacttaacttacttatttgtagcaaggaagactttttactcaaaacggatgtaatgggggaattgcagtaagggaggggggtcaggcgcatctccagatacaaggaggacctggttgtagttgcagacagcagcatagaggagacaatgtgggaggaattactaaagggaaatatcaagtaaggcacagttctggtctagaagaattctttgtaaagacagccaagaactagatgttaaagggaggagatgaagagcagattcagttaatactgagatttgccagagaaaaaccaattacaccatatgggccaaatttaaagtaagccttatttaatattaactactgaccaagggatggagttttgtcacgcccattccctggaatttccccactgaaaatggcctcgagccatgagtaggagtttatatggacaaatctataggccactgtacttttccatgaaactttattattttccaagaactacaactcccagcatttcaggaagttacctagtccttggggaggtggggcttagggattaatttaggggattgccattccgagaatagaagagatttgtaagctgacttagcaatacttttagataaccaagttgagcaagccaagggcaaggcattaggaagagcacccagaggagcctgatttgcatgaggtaatagaggttacttttgttatcaccttcttctcttgtgtctgatctccaaagtgatgcagaaatatagagaaaacgaaaaactcaagacaagagtaaacatgttacagtttctattagtcatgatggagaagggaaaaggattggacaaaattatttctaacatgattttcttaaactacacattataaagcaaacgggaagtacaacacagtagtcaagaacttgacagcatgaccaaggctctgggctcagtccttatcactgagaagaatggggctggagaagaagagcgtccaatgagaagctactctatcagacagagtaggtctagggtagtgagtggccacaaggtactggaaaaatatttagtggacatgtggataaatgaatgatagaaatccattcacagaaatggcatgtctccctgtgagtggttaggatattcttctgccagcttttactctcaagtatctactgtttcagaaaggaagagatagatattccaaataatattccagatacagtgtagtagattactacactttaaatattatttattaaacactaaaatgattaaaatatattaaggtatttattcatttcaaagttgtttttcaagttgaatgttttattcatcctttgttcttgttaatgtctgacatggttttcacattctgtgctacaaaattgtttcatctaattacttttattaccatggtttgtccttcaattctataatgaatacctgtaggtgctggggtgtgcattatttatttcctacaaaactcccaagaagtgatagctagatccctgtgctaggaacagcaagatgtttagacttaccatatgtaacatcactcccaaatgcacccttcccactattcttcctcccccatcccatgtgttcaaaataaaggaaggtatcctccctgctcacatgtaatcaggatgtgtccatccgactcaccttcttttttccacagagaacactttcagctgattgaaagaattgatgtggccatcaccaactaagtacctccaaacacccaagaatcaggaggatttgacatatttgaaaacacatatctgacaacttttctgtctcatgtagttccctttgatatctttataaatccaggttttaaaaaaagaaaattagaaagctgaaacatagtttcaaatggacaagcactacattttgcctccagccccgtgagtgacagaagaatgcagcctctgtagttctcctcccaataattaaatttcttgatagagacatgaacatgttttttgatgtaactcatgattttttttggcaagctctataaaggctaaatcaatgctaaatcagaggtatttacaacatccacaaatttaatccaaagaggatatttcaaggctcatatagatctaaatgatggtcccccagatggtgaattaatgtaattttagcaggatgcaaagttgcacaaatatgcaatattgaggccgagtgctggtttaacgtctctgaagcacagatacgatggagtacacagcacatggaccttaccacagtgatgccattgccggtttctgtactagaaaggaaagattgggatttgggagttcagggaagcatgaactgttttttgtttgtttgtttgtttgtttgttttttgttttttgggttttttttgtctttttttctaatactctatcagtaattgaaacttttggtgactcttccacagaaaactatttttgttatgttcttttcagggtttgaaaggtgactcgggtcctcaaggtccacctggcccaaaaggagacaaggtattgtatctacccaaaagcacacacacgcacacgcacacgcacacacgcacgcacgcacgcacacacacacacacacacacacacacacacacacacgcacacacacacacgcgcgcacgcgcacacacacacgcacacacacgcacgcacgcacacgcacgcatgcactcgcaaacacacactgcctaaagtgagtgacttcttgtagatcctatctggtgacccaaacatcctgaatatggcagaaggctgttgtgtgaaaagcttgtgagtaaggaaagccttttggttgcttcagtgtgagagactgtgtgtgcagttactcgttgacattaacacaggagtgaaacctcctgtttctcacctttgcttgacagcgtgagcgttccatcagcacattagcaaaggtgtcctgtgtcaggaaactcagccagtaacaccaagctgtcacctcttaatgatcagacaggtggcgttggtggaaaggaagctcgctctgtgcctccactttaaatcaaatgaaccatttcttgtgctttccccctgtaccgtttcataacagcattttggaagtggcctttcagtgcgcaccaaccagtattaaattcaagggttgtattgagtgccgtaattaggcaattcagatttcgtgggaattgtatatatctgcattttattcttcatgctgagagcatacagaattccttcctatcttaaatatttatctttgcactagagatgatctcacagagcaatccttagtaactgatttaagttccttaacaactgttacttgtcccaaaaagaaggaatatacaatgctatgccttagaacttaagatactaagtttaatgagaaaaagagaaaatcctagatttagcatgacaacctgatggctcatgccacagacacaaagactccatgacgttcaaggcaacaaaagcacagccagagcactcggtctccatgactacggagttctctttaagtgactagaactcctgagacagaagagcaccagggtgacacaacatgaactttggagactgtttcaaagacggtttttaaaagacatggtcttactgtgtaaccctggctggtctagaacttgcagtgtcagtgaggctggccttaaagtcacaaagatcctcttgcctctaccctgagtgctggcatttacattgtgtactaccgtacccagcattttcaaagactttttaatagtcaagatacacacacctggaaacctgtattcacgtaggtcagcaaagcatttctagtactggaaaatacagacggagggagctttctcagagctagaggcacaagtgatgccgatgcggcagagcctaggagaggatgtgggaacagctccttgcagctggaaggcatggagtggggcggagagatccacttattatttctgctgatcctcattcaaactttgtcagaaaaattatctgccttcatgacgcttcccagctgctcttttggcaaggaaccatatttggaaagataatttttttctaattttagattcatagtcaaaagaataaaaaaaatttagattattttagtttttcaaaacacactttgctattgcagaaagcatgagggcacacaaggcgatttttatatcataagccccaaagggaacatgaaacagctatcattgtgcaaaaatttttaagaaaaattctatttttatgtcctttcaaagtatgaattttctggtagggaaattgagaagggtttgggggaattggaaaacgggggaagaatatgattcaaactatatcacgaagttctcaaaaaacagataaacatgtaaaagaaaaagatttatcattttatattgtttctctccataacctcttaaataatgtacagaaaggtgctgttgttaactgcaacttttctttcatctattttagggtgatatgggacctccagggccaccagccttaactgtaagtaattctaaagaaaaaaaccaaaaatcgaaatgttccatttgctttttatactacatcatgactgagatacaatttaagtattacaggaattgatagtgaactttgaatttgcctagcaaaccttctcactttaaagatgaatttctgccctgagcaatgacatacttgacccaaagccttaggggtgttttttttttttttttaatagaagtctgtaatcagtatctacctcaagcatatttctacatccttaccatggttcataaccatgtccctgtggttgattaggcattattttttgaataaaatatatattatgagaaattgaagtagagagttccacttggcctaaaaattgtaaaagtgacactagatataatcatcccacagggaaaagctcctccccctccttctcctctccctcctcccctgcccttcctcctcctnnnnnnnnnnnnnnnnnnnntcattcccctctgttcctctcccccctcccctccccctcccctgcctcacacccagatctcagaattctctatgttgaccaggttggctttgaactcacagagacccattgaactccgcctcccaagtgctgggattagaagtgtggaccaccacactcagacaagagatacactttcacactggttgttactttgcttgcaaacctaccagagactattttcccatgatttatttataagatttgcaaatgataaaacagcaggagattcgtgataaaagttaataatgtgcacatgataggatagttgtcaggttaatatttcatcatttcttaagtatctaatcataaacatatggagtattcccatttacatacaatctactactacaaattccctacatagagcattaaagattctcatttaacttaagaaagattctaagcttaatgaaaaaggaaaaaaaaataaaatcaagtgtagcctgaggcctgtcattgatattattaatgccgtaaatgaagcatgaagtcactaatattcaaagagccatcgtgatggtagatgtctcccagttctggccatagaacaatgaaacttgaagggctgtgatcttatatgtgtgtattttacctagacttgaacaacccaaatggaatgaaagtattttctacttcaaatcattttccaactggcacttaaagaagaatacggtttcttggtatataggaaatccaagaagtgagacaaggggctttactttagaagaacaaagctcttgaaggattttattttcaaaattgaatgaagtaattttgaaagaaacttttagctttatgttttctttatttacatttcaaatgttatcccctttcctggcttcccctcagaaagccccctatacacccctccccccacctacccactaacacatccactcctgctttctggccctggcattcccctacactagggcattgagccttcacaggaccaagggcctttcctcccattgatgactgacaaggccattctctgctacatatgcagctggagccatgagtcctaccatgtgtacactttggctggtggtttagtccctgggagctctgggggggggtggtactggttagttcatattgtggttcctcctatggggatgcaaaccccttcagctcctcaggtcctttctctagctccttcattggaccctgtgttcagtccaatagtagactgtgagcatccacctttgtatttgtcaggcactggtgaagcctctcaggagacagctataaccgacttctgtcagcaagcacttgttggcatccacaaaagtgtgtgcatttggtgattgtatgtgggatggatccccaggtggggcagtctctggatggttattccatcggtctctgctccacactttgtctctatcactccttccatgggtattttgttccccattctaagaaagatagaagtatcctcactttggtcttccttcttcttgagtttcctgtggtttgtgaattatatcttgggtattccaagcttcagggctaatatccactaatcagtgagtgtgtaccatgtgtgttcttttgtgattgggttacctcactcaggattatgttttctagttccatccatttgcctaagaatttcataaattcattgtttttaatagcttggtagtactccattgtgtaaatgtaccacagggctaaaattcaatatatacaaagaactcaagaagctagactccagagaaccaaataaccctattaaaaatggagtacagaactaaacaaagaattttcaactgaggaatatcaaatggccaagaagcacttaaagaaatgttcaacattcttagtcatcagagaaatgcaaatcaaagcaactctgagattccacctcacaccagtcagaatggctaaaataaaaaactcaggtgacagcagatgctggtgaggatgtggagaaagaggaacactcctctattgctggtgggaatggaagctgtacaaccactctggaaatcactttgacagttcctcagaaaattagacatagtactacctgaagacccagctataccactcctgggcatatgcccagaagattcgtcaacgtgtccaataaggacacaggctcccctatgctcataaaggctagtgactatttcttcagctcaatcacatgtctaactacctcacttagtcacttggtttgctggttgttttcagctcctgtgtgaaagctgatagatgaactttgttcattatttcacttgaaatgaaacctgggacccatagcagccaagaaattgtacgggactctatctgtagtatgaatggttcatagcaactgattcatttcttctaaggagccccccatggtggtctctatgccagtcatccaggatgcattacagagaaaaaactaagatattttgctctgtggtgtctaaagatacgacaaatccagtctaataaaaatatattgcaatttattttataaaatgaaatcataataatatgtgcatattactatttgatataattgccacgaatttgtttccttgtgtacacagtcatcatctaaaaataagggtgtgcactaaatatttaattgatcttataatgcatgttaatattttattaattgaagtaactgatatgagtcttccaggaagccaaaatgactaaccactctgtaatatattaaacaagacaatgataaatcagagtcctaattcacagtaattctcaaaacctactttccactaaaacccattggcatgctttagaaaataccagccttgggcctccaccccaccagattttaatttaataggccgaatgtgggaccgacacattttttaggtcccacaagtagtgtatggaaaaccattgtttacagaaactggagaaacaagctttcttcctgtcccatttttttttttttttaatgagaatgttgcagtggcctggctttcatttgaagtccaactcaatgaactagtaataaagaaatatctctatcattggagaggcatactggtaaaaatcaagatagttttccctccaaaaatccccctcccccactgctccccaacccacccactcccgcttcctggccctgcattcccctatactggagcatagaaccttcacaggaccaagggcctttcctcccactggtgagtgactaggccatctattggatggagcacagggtccccaatgaaggagctagaaaaagtacccaaggacctaaaggggtttgcagccccatgggaggaacaatatgaactaaccagtacctccccccccccccagagctcccagggactaaaccaccaatcaaagaacacacatggtgggactcatggctctagctgcatatgtagcagagaatgtttctttttcttaagaaagcccacatcattgacaacttcaagacagagagtcctaaaggctacccaagcttccacagctgagctgagtaaagagtgagccggctagacacctttcctcatctaaatcatagcatttagttatcttaatggaatttaaaactttgtttaacagtgaatgcaaagaaacagtaatgaatgataatgcctttgcatgaagtttgtttgtgagtggttaagtttatttcagttatttctctatatccctgtgaatcactgttctttgaccattggtttatatttttaaaactaaagaaaaaccacactgtaagtaatccaatactgaatgtcaatccaataggtatcttttctaaatacagcaataggtatcttttctaaatacagcaagccccccgccaaaaaaaaaaaaaaaagtggctcttcctctctcagcagcaatcaaccatcagctaggtctggagtctgtcttcatccaagctaaaaaaaaatttgagataataatataatgacatcatttgccccttccctttcctctctccaaatccttccatatatacatccttgctttctttcaaaaccatgtatttttactaagtattacttttgtttcatatttttaatttccaagttctcatctgtgattgggtctcagtgaaggaagtgaataaaggataagggaagccaatttgcaaggaatagagagaaggaaagttggtgaaatgtcatgaagtacagaaccccggaagcaggctcaccagagaatctcaatcatggtgtctttccttccctgccacctcaaaaccatggactttttcccttatacaggaagccatcgaaaaccaatgtagaaaagagggctagcaagaagattgaccacaatggtgctgcagtttaaatgcagtctgtactaaatgcccttttgactgataaaaataggtcatgttcagaatccatattttgattcttttgataacatttggatctttctgtagattcaccttcacaggtcatatagacagaactccaaagggaccacatgacagggggtgggggaggggataaaaaaataaaactaaatgaacagaaaaggagttggaagaaaatgaagagacagaaagaatgaaagggaaagagagaagaagggggaaatgcaggatggatgggaggtagggagaaagaaaggaatactttggggactgaagatgtagaagtgggtagcagttacacctctgcctcgtctatctttagccataactaaagtcgacttgaattgaaaaatctgaatgatgacttttgacatcgtgtgaatcaagttgcagtcttcccagttgctggctttaaagcttttccagattatcctaataataacacattaaggaataaccttaagaacaaccctgtgaacctgggcatgaaacagtctacaaaacctcgtccaagtatctttccgaaatacaccaagctcaaagaaaagcagcttttcctccctcagcagccatcaaccatcagctaggtctagagtccctcttcctccatgctagaaaaaattgaaattataatgtcatgtcatcatttgcccccttccctcttctccctgcaaaccctcccacatatacatccttgctttctttcaaactaacggtctcttttttattaattattacatatgtgtaacatatatatacatatacatgtatgtaacatacatatatgtatatatactaattatataaatataacctgctcaaggaaagcaataagcatgctaacatggagaggggaaatctcatgaggcctctattctacacaaagaactacagacaactaagggatgatgagagtcagagaaatggtctccaccagaaaagaacacaccaattatttgtccagtatcaaatggtcaaccttgacaatgtgctagaattgcttggtaaacacagccactatggttttatgtatgtaatagccatgctatgtccagaggaccacatttcacagcacccaccaatattttccagttcttagattttttttaattaggtattttcctcaattacatttccaatgctaccccaaaagtcccccataccctcccacccactcccctacccacccattcccactttttggccctggtgttcccctgtactggggcatataaagtttgcatgtccagtgggcctctctttccagtgatggccgactaggccatcttttgatacatatgcagctagagtcaagagctccagggtactggttagttcataatgttgttgcacctatagggttgcagatctctttagctccttggatactttctctagctcctccattgggggccctgtgatatatccaatagctgactgtgatcatccacttctgtgtttgctaggccccggcatagtctcacaagagacagctatatcagggtcctttcagcaaaatcttgctagtgtatgcaatggtgtcatcgtttggaggctgattatgggatggatctctggatatggcagtctctagatggtccatcctttcgtctcagctccaaactttgtctctgtaactccttccatgggtgttttgttcccaattctaagaaggggcaaagtgtccacactttggtcttcgttcttcttcagtttcatgcatttagcaaattgtatcttatatcttgggtatcctaagtttctgggctaatatccacttatcagtgagtacatattatttgagttcttttgtgattgtgttacctcactcaggatgatgccttccaggtccatccatttgcctaggaatttcataaattcattctttttaatagctgagtagtactcaattgtgtgaatgtaccacaatttttgtatccattcctctgttgaggggcatctgggttctttccagcttctggctattttaaataaggctgctatgcagttcttagattcttactgctcttctaagacatttcctgagcctgtgaagagggttattgatacagatgtcccacctacagtcaatctcttaatctcaacattctgaacaacaatgctcctctgtattagccactacctactgcagtaacaaattgctctgatggaggttgaagaatagcaacataatatttagaaggcagtttgataacatgaccactttgaaagtcctcatcaataggcctacgaatctctattcctgggccttgactatgcttaatgaattccttcctgtagagtaggcttccaatccaatcaggggactgattggtcatctccaccaacattttactgttattgcactggtagaaacatctttgctggtaggtcaatattcagtatccagtactgggcaagactgttgctgtcttttctcacccagcagcctgcatagcatcttgaaacaccatgaaatacagccagcaggcagagtttcttgcttagttgaagactaattctgtatcctacaaccaaaatgtgtggtgtcttcaccaatagggtcttactgtctagttgaagtagataaccaaaagcaatgacaatagactccattgcttccagtgtctctgaggcctctctggccaaaaatttatagggaaataactgctactcactgaacaaaggaggttctgtggccaagtatgagagcagtagaactctatggctataaatcaatatttaataagcagtttgacaacacgaccatttagaaaacaataataataggctcttattcatggcctgggatctctccaggaattggctcttgtccaggttaaaataataggcataaattctctcctgtttaatgaagactatggaacataatggacactgcatttattatttaatgtaaacaagtgttaataacttatattattgccttagatgtttttaaacaaagaaaatatcattagatgtctacttttctcttttcattctaaagaaattataaaagaataatgactcctgattactacatgtctatgttatagacatgtacttaagatcatgttagactacaccttttcatacatggtattttcctggaataagtatttgctgtatgctattccttattagcttttgagctctgtccatgtggatgttatagattatatttatacttttcaaccgacttatcttcttctaataggcaaaagctttcccaccaataagtatagaaaaatgtttctgttgctgacattttcctgtactaacaatgtacaatgcatcaatttgtgcctatctttcatgaacatgggtgttttcttggttatatgcatataagtaaatccattgcatgataaagaatgtcttttgtccaatgtaataatatagtgtctaatttccctctccaatgtagcgatatgaattattggcctctttgtcaatttataagaattataaaggcaactacatcttaacaatatttagcatcgttaaatgttttagtttaagcattttcaaagccctaaaacacattcaaatgcttatggggtttggggatataatatggaaaacattacaaatcaacaagagaaagagcagaccactccaaatattatactgagaaaacagctttcccaagagacaaaaaatacactattctctaatggtattcctttttttatgctggcatgcacttacaactttagtaaggtatcaaatttgttcatatggtctcatgtatgtactcacagctacctatgcagccctcatcttatgacaactttcttcttcaagcatgcaagctcatcagtttcacactaaatgtgatctttctgtttcttgttttctgtttgctttgatgttgtagattgttatagttgccaattaatctcttcttaatggaccaggtgcctgctatgagttccttgctcccctccccccgtgttctgggttcctgaaagacacactacacatgtacacacatacacacacacacacacacacacacacacacacacacacacatacagacacacacagccttacatcttaatatgccttgaacagctcaatgactgagtcactcccaagcctccacattgtaaacacctcccctctgatattactgatatttactaaaatctatatttcatttttgctgccctagaccgagtgagaggaggggctgggactgggaccactcttccacagttcttacatgattgctatgttctctcttctgcacctctcaggcctggtctttccctgcatggcagctctatcttcttcctcattccctggtcccttgcccgggaatcctaaagcccagcctatgtctccctgccctgtcattggtcactagcaactttatttaccaatcaaaatcaactgaggacagggaacttcagcatcttacatgcagattatggtgcaatttgggggaccctagtaacataacacaaacattagaccaaatccacattagacattattgttgttgttgtttttaagggtagcttaaataaccttaaactaataagggagtagaaccgtcttttggaatctaagtgtgccgagtttacagtaagcctgtaactcgtatgaatgtttcattctgattttagatttggctaaagaaatttgtttctagttttatttggcaggtttttttttttaaagtctagatgttgaatttgtttttttttctgtagatattagagtagacatgtactgttttttctcttcaacatcttaatattgtaaaatagcttatatatattttctgagtgtgtgcctgagaaagtaagccctacttggccatgctgtatatttttttaccatattaatgaaagatgtgggcttcagtctgaccactcaaagactctcttcactcatctaggctctgttatttctgataagaacttgccaatcaaaatgtctcatttttcataggctgctttcattatttttaatcacgttttaggtctttaataatgatgcagctaggtgtatatatgtttatactttttctttttatcccttctttagaaaggaatcatttctagtgcattgctgtcaggcctagtaatgttttggttatcactggctatagtgttagatactatcaatcaaatagttctcaggtaaatctatcatgactaatgtcaagctggtttcctgatcaggctgtttgtagaatgagatatatttataccttccttgtttgtcaaataattttctcttataattaccagtgaattaaaagacctctgtcataacttgctttctattgctgtgacaaatactataaccaaaggcacgctggggaggaaagtgcttaccattgagagtggaagtcagggcaggaactcaaaggcaggagcctggaggcaggaactgaagcagagggcatgcaggaacacatcttactattttcccagtggcttgctcagcctgctttcttatacagtgaagctcaggcccatctgctaatgggtgatactgcccacaatgtcctggaccctcagacatcaataatcagtcaagaaacttccctacagacacagctaatggagaatctgatggaggcaattcttcagttgagattcctttttctcagatacatctagatttgtgttaatacaaactaggaagcacaaatcctatattatgttatatttctctgaagatcaataatgtagttttaatgagttacattggctgaattcatattacaaaacccttttcattctaattggcacttgttgaaactccactttttaaatttttccccctaaactagaaaagaccagcaagagatttgaacagtatttagattccgaatttgggacaaacttttctccagggctttgtaagccccacccatttactttccaggaatggcctttgacataaaccagtggttctcaacctgtgagtcatgacccatttggggatctaatgacccttttacagggggtgcatatcagatatcctgcatatcagatatttatattataactcataacagtgacaaaattgcagttatgaaataacaacaagaataatcttatgcttggggctcactacaacacggggaactgcattaaacggttactgaattaggaagcttgcaaatcactgtcctaaactctaaatttggatctttcaattcaccttttcccacaagcttttcctttagctacacagttaagtccttgtgctcagcctaaacctcttataaataataaaatggtcctgtgctgtttaatttttccaaactttgactccaatccagtatctgccaaatattgttacatttccatgacttttattacatttccagtgtcttcaggtagttgttagtgcacatactcacacacacacacacacacacacacacacacacacacacacacacagacacacacacacacacacgtgcacatgcaggcacatatgtgcatatatcatactttgtgtttagcaatacaatttacatattatgtaaaactatattatataaaactttgatttttcaagcaggagaaaatgatgaaattttcagactatagaatccatctactaggttaaaaaaatttaaacatgtgttaaaagagggtgagtgtaacagcttcattcagtgacatgtgacctgcctactctccacccttccttgttatgtctttatatttagtccagagttaataattatctgtgttgttgctccaataggaactttggatcattccggaaacttaggatacattttatgtaatattgaattgcatataattgtcttagttgggttgcctttgtgaacatgagcatatagactaatctctctcccattagccttatatttgacaactccctgggatctaaccacttctcatagtgtcttctactaccattcactcacagttagtaccatttgtctcttggttatttctgtcatctctctactacttctgtccaccttgagacttctttctactaggaattgaacccacggctttgcacatattaggaaaaccttcacgactgagcctttatccctgagccttttctgaatatagaaaccaggccattcctgttactattctgctcaaagtcaacaatgtcttctgctttgactttaaactgacatccaaatgcaatacaatagcctgcaaaatcttacagaattaaattcttattgaatttcttaagctgtctgttttttctttctgacaatgtcataactctctctctctctctctctctctctctctctctctctctctctctccctctctctctctctctctctctctctctctctccctttctctctgtctctctctcacacacccacacccacacacacacctccagtcacactcccaccataggagctacacatttcctcttactcttcctaatgcatacatagctaacatccttccctgtggatacttacagggacgtattctcctgagcaagtatatgtaactgcttactcatcaccctctcagtgagcacacaggctcacttctgttataaggcacattagggtatctaatgcccatctgatggtcttacagcacatctcttctaatgttcatagacttctgtttactactttgatttcccttcccttctccatctgaatattaaccatacaaatgcaagattctttgatggctctgctcattgactatgagcacactaggagttagacacagtaagatgctgaatgcaggaattacaccgacccacttaaaaacagagttagtttctttgaatccccagccatctctaacagtgcttgacagattgtttaccctcaaaaaataattggtggtttagtgactaaattctttcttaactttgtaatattatactagcttcagtcattaagcttactggattctctactctaacagagcttatttaccaacaatttgggtgaaactaataaagtggtgtgtttttaaaggtttttccatcactgaccccattttttttaaatctcctgaaggtcatttgtttactgaagctttctgcttcttaagtgactttctcagagagttgtatactgttcagcttcaggtttccagtgaagggaagggtgggtaactgttgaattctaatccctgtgatatgtccactaattattaagtctttgacttacagttgataggaactttacctagagtttgtggtaaatcttaactgtattccttcatccatttcttagcacattcttgatctcttagaaggtagatgtagtacttcatatatcgaaatatcaaacaaactattaattgtgtccttttgcttttattagtccaaatttcaatagcaccacgattccagctgaaattctctttaatacattaccaaccacaaagaatagctccatatcaatgtactatgcatatgggtacaaacatctttaaacaatgagtttaagaactgtgactaaatcagttttcctcaacctctctggtcaccactataacagaaatgatgatatgtctaatatcattgccaaatactaaggtaaaatagatatcatttaggagaaagagttctgaataccctaataaataatagtttattttatgggttacaacgtaacatattgagaagactcttcagaaccagcttgtttctaatatatcatatccagataagtggcaaactatatccttaatgtcaagtcgttttaaagaacaaattactattgtgtttaaagtgtctcttcttgttggtattataatatacaaagaaagtaatgtcatgtctaagtaagaagagcatttattattatatgtattgctatttccttgattgtgatgcgatttatctaagattagagtatgagggaagaaaatgaaccatattcccttttacagaaaaggccgccatagttttgaactaaggatttactgaaataacaacccaacagtggcttcagaagcaagacaggggctacgactgaaatatgagagttggatgacctctccttcccgctcccatccttctggtctgtatgtcatgtcagaagaaagacaggtgtaggaggcacaagactgctattccattcattcatatgtgtgtgtgtgtgtgtgtgtgtgtgtgtgtgtgtgtgtgtgtattctaattttagttcccagcaatatgactgtttgttctggccccatctcactgggaagttattaaatactcatccacatggcaccaaatgtttacacagaggccaaagtttaagtcagtcagcagcaaatggggctttatccatgctcactaaatgatacttaaggaccagctctttggggcccaggtaaaccctgcttacatgaaagtgaggcactgagtgagggagagcatgctgtcactctaagaaatctaccctacatgctgtagtcaatggagggaaagcttcagctggccatctataaataagatggcactcagttaacagacgagcctgatgcccaggagcacatgatgtacacgcactggggcagacttgaaataactctttctcagtatgtacaaagacaattcttcagcaaacatgatatgacatagtatctccccaccttcctctcacctgaatgcttggcatggacagacactgtgaggagcatggggaatactgaagtaaatggcgctagctttgccttcaacaagtgtaagccatcacttagttaaggttggttccttttaaactgatcatttatagctagtatgcaaatagtctatatctaactatagttagttggtacagtatacatacatgtggttatttccaaggaaattgttacttatacattttttaactttgtaatataagaatttatttacattacagttacaaactcatctacttatccatgttttcttattaaaagccccccaaagctataggcagcttgttttaggtaaataaaaatagaaaaaaatgtacacataaacctctagtacatatacatatacatcatatacatcatatacatatacatatatatgcatatgcatatacatcatatacatatacatcatatacatatacacctgcatatacataatatatatatatatatatatatatatatatatatatatatatatatacatgaggagtgagtcaacctaagattcttttgaattcttgttatattgatcttggttattcacatgcttttttgatggatgacataacatttctcttaaaatccaactcaacattggaatttttaaagcacttgttagctgttgggggatatctatagaaatgctttaatatgttttggagcttacttttggtttttaaatcagtgctttttaggggctgtgcaaatggttctgaacatagttaagaacatagccgttcttccagagaacccagattcagttcccagcacccatgtggcagattacaactctttttatctccattcccaggggatctgctaccctctctagtctccacacataggctgtttacacatgtgatgtacagacatataaatacccataaatgtaaaataagagtaaaagacaaactttaatattttaggggtgttgttaatgttgtttgtttgattgattgtttaagacagggtttctctgtatagtccctggctgtcctgaaataagcccaggctggccctgaattcacagagatccacctgcctctgtgtactaagtgtaaaggcaggcaccatcaacacccagaaaacttcataactttgaaaagaaaaagaaaaagaaaaagaaaaagaaaaagaaaaaaggaaaaagaaaaagaaaaagaaaagggggaaggggaagggaaaggaaaagaaaaagaaaaagaaaaaggaaaaggaaaaggaaaaggaaaaggaaaaggaaaaggaaaagagaaagaaagaacaagctggggtgggtgagaaggccacgtggcaatgtctaactgttaatatagtcatcttttgaggaaaagtttaaagaaacaccgtgcatatggtcaagaagagactatcatgaaatatactatttcttttattcatttctccctctcatatgtcacttattaacatgtaggggtcaaaacagattataaatatcatttgtaactataaaattttattatagtctccttcaccattgtctttggaaattttcattttcttagctatagggctaagtttaactcagtattagacatgtgcctaacatgcataaggctcaattctcaataccacaccaaaaatcaatcaaacaatcaacaacaacaaagcagttcaagtaatctttaactagatctaatatctatcctttcataatatattttatttaaaatgtctcttcatcactctatatataaaggaaggaatggcttgactatagactcaacataaagaatcaccagtgtcaaaaactatggaaggtatggcatagtcttctactgagggataattagcctgctagcgaccactatgtgaagcactgaagcagctgagaccctcccaactctgagcaaaccgcatgtccatgattgagaatgcttacttagtttcagtgctgtgaacttggcagcttctcagcccctttcatctcaacgcactacagacccaagtgggtgctccacctgctgtggatttatcaaggttaaccaactccaaaataagggaacccaagtattttataacggactgcaaggaaggtttctctttgtctagagagagggttaatctctgatatcccaaatactaagcaactttcacattgttaggggggaaagtctttttaagaaaagagtctgtccagatgtggtggtgaatgccagcaatcccagcactcgagaagctgcagcaggaggattggagtttgaggtcaaacagtccttagcaccaccggggaaatgctgaacaaggcaaagggacagttacaatccgcctcacaaaacatgcagaaatggaaacggcacgtggaaagacccactctcctctatgccattcctcctttctgcacggtcttggtttctgaccagttttcctgcatgagctatataatcaactgcttgcatgtaagctcaccgaaggaagccgagactaaaactctgtcgcttatctcacatggcatttaataaaaggtactgatgacaggattctaagcaggtagctgatgaacagtcagtgcttctggggaccccaacatccaaccaatagaacaaaccccaaaattgatcgagccccgtcttaaaagccggtgggatattctctgtatgtttctgctctgaactttcttcttgactgaatacattaatccaggaacatcagtggcaggcatgactgtaagagttagagactcattctgtctactttggaggaaagtagtgggggtgctttattaggtatcattttttgctttatttttcattaatttatttattatttcactttacatcctgatcgcagtccccaccccatcttctcctcccaaacacacgttcacaaaccactccccactaccccccagagaaggataagccccctatgcgtaccaagccaccttagcacatgaagtcattaagggcatatctggatcaagaatattcaggtagccaatccaaaatggtttcaatctttatggcctccttttgtccagacctctatttgaaaagcccaggcagatgctggcaaggatgtggagaaaaagggacactcctccattgttggtgggattgcaagctcatacaaccactctggaaatcagtctggcggttcctcagaaaattggacatagtactaccagaggatccaacaatacctctcctgggcatatatccagaagatgtcccaacttgtaataaggacacatgctccactatgttcatagtagccttatttataatagtcagaagctggaaagaacccagatgcccctcaacagaggaatggatacagaaaatgtggtacatttacacaatggaacactactcagctattaaaaatgacgaattcatgaaattcttaggcaaatggatagaactaggaacactctcttggaagcacgggggtggggggagaacaggattgggggcttccagggaggggccaggaaaggggaaaacatttgaaatgtaaataaagaaaatattcaataaataaataaatgcaaaaaaggagaaaagtctaatagaggattaaactgttgtgctcattagattttgtcaactcaaaacaaactagtgacctgggaaggacaaccctcctttgaggaaccgcctccatcagattgatctgtgaggcatgcatttctgggcaatttcttaattgttagttgatatggaagagccaagactactgtgggcagtaccacccctgggcagtaggatttagaagagctgtctgtgtaagaaaagtaactgaacgagcctcaggaagcaagccggtaagcgtggtccttcatggtctctgcttcagctcttgccttcagctcctgcactgacttcctttagtgattgattctaaccagttacaagttactttgttttatcatagaaatgtaaacgcagctaggccagccacttacaaacaggacaaatggaaaagtgtgagctcatggagtgtaacaataaccaggtctttgtattgcatttcttttcaagcaagacctagggaagggctgttctgccctctccccaaccactgctaattgtattgcagaatcattcaacttctaaatagcactgatccttgagtgcttttcctctgatgctttgctgtcctctctctttatgacatggtgttaatttttcattccttttgttgtagactatcatccaattttacagtgcccttccaaatataacactctagaaggcttagcactttcatgaattaagaatgtcatgagttccctcattattaagtctggtaatactgacctgaaccgcccttatcacattcaagtgaagcagatctaaataccttctacatcctaagggtttctttgaaagtagaaattgaatatattagaaataaaatagttttttaaaaatattttattaggtattttcctcatttacatttccaatgctatcccaaaagtcccccataccctgcccccacccccctacccacccattcccactttttggccctggcgttcccctgtactggggcatataaagtttgcaagtccaatgggcctctctttccagtgatggctgactagaccatcttttgatacatatgcagctagagtcaagagctccagggtactggttagttcataatgttgttccacctatagggttgcagatccctttagctccttgggtactttctctagctcctccattgggggccctgtgatccatcgattagctgactgtgagcatccactctgtgtttgctaggccccggcatagtctcacaagagagagctatatctgtgtcctttcagcaaaatcttgctagtgtatgcaatggtgtcagtgtttggaggctgattatgggatggatccctggatatggcaatctctacatggtccatccttttgtctcagctccaaactttgtctctgtaactccttccatgggtgttttgtttccaattctaagaaggggcaaagtgtccacactttggtcttcgttcttcttgagtttaatgtgtttcacaaattgtatcttatatcttggtgctggcgaggatgtggagaaagaggaacactcctccattgttggtgggattgtaagcttgtacaaccactctggaagtcagtctggcggttcctcagaaaattggacatagtactaccagaggatccaacaatacttctcttgggcatatatccagaagatgttccaactagtaagaaagacacatgctctactatgttcatagcagccttatttataatagccagaagctggaaagaacccagatgcccctcaacagaggaatggatacaaaaaatgtggtacatttacacaatggagtactactcagctattaaaaagaatgaatttttgaaattgctaggcaaatggttggacctggagggcatcatcctcaatgtaacccaatcacaaaagaactcaaatgatatgtactcagtgataagtggatattagcccagaaacttagaaatacaatagttttgatattagacatatttggcgtatgagctaatcttcacaacttactcatagggtcatattcaggaagtgtctttatatataagtaaaagaaaataattctatttttgacagtttttaaagttattcaattaaatgtccattctcccttttccagtttattgtttgaatgtgtagagatcatgcaaagccatgtctttttagttctgtgcaaagaagagtctttttgtttatttgtttgtttccttttactgaaaatagatttttttcctctcatatcctgattacggattccctatcttgattcctcccagtctctgcccacctacactcccatctgaatctaccccctttctttctctcactagaaaacaggcttctaagagaatataatataatataattataattataatataaatgtcttagtcagggttcctattcctgcacaaacatgaccaagaagcaagttggggaggaaagggtttactcagcttacatttccacactgctgttcatcaccaaaggaagtcaggactggaactcaagcaggtcaggaagcaggagctgatgcacaggccatggagggatgttacttactggcttgcttcccctggcttgctcagcttgcttgcttatagaacccaggactaccagctcagggatggaaccactcacaatgggttaggccctccatccttgatcacaattgagacaatgacttacagctggatctcatggaggcatttcctcaactgaagctcctttctctatgataactccagcttgtgtgtcaagttcacacacaaaaccagtcagtacaataaactaatacatcagaataggaaaaaacaaacaaggaaaagaacccaagaaagggtacaagaaatagatatagatgaagaaacctattcattcaaacactcaggattctcataaaaacactaaattagaagccataaattatacacaatgacaatcattccttctcctcattccctgagcactttgggaggaattgaatggaaacattctgtttagggctgagtttttcaagctctctcattctatgcatgatgtatggctgagggtctctgtattgttccatctgctgtaggaggaagcctttctaaagacacagagcaaaagactgccccatgagtatagcagaacttcatttggaatcattttgctgctatattttatttgtacatttgtttgttttccaacagtaatatttggttttaccctaggaccctggctatttattctgatgttttcagtgtcaggtataggttccgtctcacaaacctacaaggagtaagtaactaaggccttaggttaagtgagatattggctggttacttccacaagctttgtgtcaccattgtactagcatatcttgcaggcaggtcaccactgtagaacaaaagatttgcagatggtgtttaggatccttcatttgtagtatgcagagttctttcctgtactaaagaggtgaaggctctatgtagaccccaggttgacttgatgttcagtgaagttgtataggcactatctacagcagtggggactttccattcatattttgtagagagcaacatataggcaacagcctgcgttgtttgggattctcatggaacccctttggccaataactatattatacaataacaatattaaacgtaacccaattcaaatacttgctgttacatttgtaacaagaggtgaaaagttggggctctatctacctcatttttttgggtggttttatcaagattgtctttatatgtgtctttctttaaaattctactgttttagattcccataccaccctacaaatgggtcgtaagtctctttccatattccattcatcatcccacttttctctctgccttccttcttgatcctcctgttccagacgcccatccatccaaaactacctattctatttccctttcttaatgagatttatctgccatcactcttactctatacctaccctctgtagtactatgggttatagctttgttatcatttactcaacagcaaatatccacagataagcaaataggtattatatttatctgggttcctccctgaggataggtttttctagttctatccatttgcctgcacatttcatgatttcctttttaacagctgagtaatattacactgtgtaagtataccacagttttttatctactcatctgttaatagacaaagttgttttaatttgtgactattatgaatagaggagcagtgaccatggttgagcaagtgttcttgcagtaagctgaagccatcctatcttcctaaggaactgcaacagtgttatccctataggctgtagacatttgtacttatatcagcaatggctgagtatccctcttaccctacagccttcccttcatgaactgtcatgtgttttgttgatcttggtcatactgattggtgaaagataagattttcattttgagccgggcgtggtggtgcatgcctttaatcccagcacttgggaggcaggcaggcaaatttctgagttcgtggccagcctggtctacagactgagttccaggacagccagggatacacagagaaaccctgcctcaaaaaaaaaaaaaaaagactatataaatgaataaataaataaataaatatattttcattttcccgataactaatgtggttgagcatttaagtgtttctcagtgatttgagtttatctcttttgagaattctgtcaagatttgtaccccatttttaaacgggttagttcttttcttgatgtgtacgttttctgagttctttatatattttggctattataccgttatgagatatgtagttagtaaaacattttcccattcagtatatggccactttagcaaatgatgtcctttgctgagcagaagattttcagtttctgcaagttttcttttgtcaatgagctcaagttggtcaagttcagtgtacttggttttatgttgaggtcttggatccatttgatgttgagtttctgcagcacatatgtagcctgaaatatgaaaaaagcaatccacgctatcaccggcaaggcactggtgggcctcgttctcatctcgtggagactctcagagttccaatatctctccacccagctcgctaagttcccatagtggggtcactgctatgccagccgcacacttctgaatacaatactacccattgtactttttctctggaactcagtcaagttgcctcatgaaggaaaacacaatcattagtgtagaatcaaagggcaacacaatcattgggcacagcaattagcatcctaatagtaagacagtttaagttaaatccactggtagctgaggatttaaatctctgttacccacatttttgctccattgtccttcctgtccaaaaaccctctcctttctcctgcccctgtcatccctgcatatgaccaggaagtccgcctacttgcccagtgattggtttctttattcattagaagggtcacatgaagtcctgagtacatgattcactactcatcccaggcaacccctcttggggaagcagaattagcatcaaaatgcaaacagcaccagggctgtccacaacaggcataagtatagatccatatggatttttctataagctgccatcccagtgtaacaaacaccatttgttgaagatgcaatttttcagtgtgtatttctggcctctttatcaaaaattggatatccatagctgtgtgaatttatgcctgtgctttccattcaattctattgatctgcatatctgtttttctggccataccatcctgtttttattactatacttccgtagtactatttgaggtcagagatgataatatcggctctcttctattactcagaattgtttttagctatcctggtttttttgtgtttctgtatgtagctgaaaactgtcttgccaagctatgtgaagaactgtattataattttgatgtggattgcattgaatctgtagattgcttttggtaagatatccatttttactgtattaatccataagtataggagatctttctaccatctgatatcttcaatttcgttcttcaatgatttgaaatttttatcataaagtctttcacttgcctggttagagttacccccagatactttatatcatttaaggctattgtcaaaggtgttgttccctaatttctttctcagtccatttttttttcagttatatctaagagggcatactgatttttgtgagttaattctgtatccagctactttcctgagtgtttatcagaggtaggatttccctggtggaatttttagggtcacttatttatactgttgtctcatctgcagagaagttatattttcagtttgtatccccttgatctccttcagtagtcttcaagtactgtgttgaataggaatagagagagtggccaacctttcttgtgctaattgctttgagtttctcttcatttaatttgatgttggctatgggcttgctgtaaactgcctttatgatgttgaggtgtgtcccttggatctctaatctctccactccacgactttaatcatgaagaggactagatttttatcatgaagagaagttagattttatcacatgccttctctctttttttaaaaaatgaaatcatgtgagtttgttctcttggattgtttgttcatacagtagatattaaatcatattttccaatttaaactcttgatctatccctgcatctctggaatgatggggggatgatataattgatgtgttcttagattctgattggaagtattgtactgacaatttttacatctctattcatatgggaaaatagtctataaacctctttctttgctaggtcattatgtggtttagttagcagggtaactgtgggcttgtaaaacaaattggacaatgttccttctgtttctattttgaggaatgatttgaggagtgttatcattaactcttctttgaaagtctggtagaattctatgctttaagaccatttggctctgtgcttttattggtttagagaattttaatgacgacttctacttcactgggggttataattttgtttaaattgcttatcttatcttgatttaactttggtaagtagtctatatggagaaaattacccccttttagatttttcaattgatggagtatacgtattaaagcatgtccttatgattctagggattttctcattatctgtttttatatcccccattttctctaattttgttaatttggatattctttctcctctttgtggttaattggataaggggtgtgttagtcttactaatattctcaaagaatcacctctttgtttcatgggctttttnnnnnnnnnnnnnnnnnnnnnnnnnnnnnnnnnnnnnnnnnnnnnnnnnnnnnnnnnnnnnnnnnnnnnnnnnnnnnnnnnnnnnnnnnnnnnnnnnnnnnnnnnnnnnnnnnnnnnnnnnnnnnnnnnnnnnnnnnnnnnnnnnnnnnnnnnnnnnnnnnnnnnnnnnnnnnnnnnnnnnnnnnnnnnnnnnnnnnnnnnnnnnnnnnnnnnnnnnnnnnnnnnnnnnnnnnnnnnnnnnnnnnnnnnnnnnnnnnnnnnnnnnnnnnnnnnnnnnnnnnnnnnnnnnnnnnnnnnnnnnnnnnnnnnnnnnnnnnnnnnnnnnnnnnnnnnnnnnnnnnnnnnnnnnnnnnnnnnnnnnnnnnnnnnnnnnnnnnnnnnnnnnnnnnnnnnnnnnnnnnnnnnnnnnnnnnnnnnnnnnnnnnnnnnnnnnnnnnnnnnnnnnnnnnnnnnnnnnnnnnnnnnnnnnnnnnnnnnnnnnnnnnnnnnnnnnnnnnnnnnnnnnnnnnnnnnnnnnnnnnnnnnnnnnnnnnnnnnnnnnnnnnnnnnnnnnnnnnnnnnnnnnnnnnnnnnnnnnnnnnnnnnnnnnnnnnnnnnnnnnnnnnnnnnnnnnnnnnnnnnnnnnnnnnnnnnnnnnnnnnnnnnnnnnnnnnnnnnnnnnnnnnnnnnnnnnnnnnnnnnnnnnnnnnnnnnnnnnnnnnnnnnnnnnnnnnnnnnnnnnnnnnnnnnnnnnntcggtatgtaaggatcaatatgttatttaagctgtaacagtgtatcttttatgaagttgggtgcttttgtgtttggcaaatagatgttaagacttgttttcttagaattttttctttggtgaccatgtattgtctttctccatctcttttgattggctttggtttgaagtctattatgttatgtattaaaatggctacaccatcttgcttcttaagtcctttggcttggaatattctcaccatttttttttaaccttaagtgatgtctattcttcatattaaggtttttgacatggatacagtaaaaggttgtatctatcctgtttatgcatccatactgttaatcatgttagtctgcatctctttattggggaattgagaccactggtgttgagttacatctgtgagcagtgtttattgattcctgtcattttgctgttgtggtgtattggttcccctcttttgattttcttgtttgggattatttaatctttgtgttttcttgggtgtggttaattgcttcaagttggagatttttttttttttttttttttttttttgtcgcaccttctgtagggctggatttgtagatagatattgcttaaattcgggttttatcacaggatatcttattttctccatctattgtgattaaaagtttctctgggtttagtaatctgggctggtacctgtggtcttttagagtctgtagaaaccatgcccaggcccttcttgctttcagagtccccactgagaagtcatgtgttattctaaaagggcttcccttatgtgtaacttgacctttttcccatggagcttttattctttcttttcccatgcatttagttgtttgattatttattatgtgatgaggaaatattctttcctagtttggtctatttaatattctatatgcttcttgtaccttgataagtatactcttgttgagatcagaaaacttgtcttctatgaatttactgaaaatattttatgtctttggcatgggtttcttcttcttcctttattcctattattcttagatttctgtcttttcatagagtcccagatttcctggctatttcatactagggaggttttagatgaacatttcctttgacatatgtatccactttttctgtcatgtcattagtgtctgaaattatctcttccatctccccagtttgttgatgagcattgaacctgatgcacctgtgagtttatttccagatctccttcagtttgtgttttctttgtttctatttctgctttcagctcttgaactttttaatcagttccttccactgtttgtgtttttatcaattcctttaaagcatttatccatttcctctttaaggatttctgtcatatttatagaggctatatcaggtttttgtcttgagcttcaactatattttaattttcggagtctatagtggtatatttgggaggctctattgtagatatgtattgtcctggatgctattgattgtctttctagactgacatctagatttctagattttagaagattataattccaggtacaaatgtgtgtcttgtcattattggctggctgttttgtttcttagtttctgttgctctctctggcacttagaatgtggtggctatgaatttcctggtagtaaattcttctgggatcctgttaggtgtggctactaggggttactggtaaaatgtgtttctaggcattgggaactgactcttagcattggagatgggttgggtggggccctgaagaggccaataggagagagaaaagcagggaatttcatcagtatctgcttagtccccagggaatgtcatcacagaatgactagagggcacaggtagtctgctacagaactgggaatgagactgggagtttgtatatggaggttagcagagtaagtgaagatttgaagtatgcctacttgctttgctgccctacctattactcttgcaggcttgcctggctgattcctagtgaatgcctactgaagttgggaggtgggataaagcaatgagttggaggcagaaagtttggaggagaagatcactggagatatgggaggagtggggagacagagttgggtggtttgctacagagctgggtataaaactgggaagatttagaggagagggacaagaggtcaggaatggcagctagccttttgcatcctgcctagtgtggctggtaggttcccagggactgcctacttgtgtttcaggctgggatgatggagtaagttggggaaagaaagcttggaggaaaaggtctatatgatttcaggagagtctctacaagctatacttgatttcttcttcctcgatattgtggacttgcttgtgatgctctgtattttcttgacttccgagtgtagtgactctcaagtcctcttgatgtatacactagacacactgtttgtttttcaaaagcatgaaaacaactttttgattacattgcttcatcaagatattatgaaaacatgaactataatttactctcatgccaacttcttagggttttgcaaattgaaaattaggtggcgatgatggccttgtagtgtggttctttggagactgcacctgacccatgcaactgtcctagtaagctgacacatggctccagatatcctggggcctctgtgggacacaccatgatcaatctcatcattgggattagagaggcacagccttcatctctcagcctagaaaacagatgcagttacatagctgggtagcttgacacttgtttttaaaaggcacagttcaaagaaatatctgtccataagtattagcctgttgatctgaaatataatctccaccaataacaatgtcgattcttagttggctcctgaattcatctgtcacagtaacattatcaaggaacaggctttttttctcagtataaaaactgcttttacacatttccttacttagcaccacaaaacgccaaaaccataaacaatatgaccagttttcttataagtacacaaattatcaaaattcaccttatagtgtaaattcacagagttcttggggatcttgcgaatgaagaagtaactcttaggaagccaccttggcatttgtctctgtggcacactttattatatgaattgattcaatctgtaaaacacatttctatggtcctggcaccattaaggacaaattaaacaataaaataagtctttaaagattctatagtcaaaaaggtaaatttaccaccataacaatatgtttgcaataaataagtaaaaatgaattaaaaagttattaccaatgcaaagctatgcttagtatttaaatttattatttatttatttatgtgtatgtagatgcattggcctattgcataagtatgtgtatgcagatagatacataaatgtatgcatgtgtatgaagaccaggtatcaaccttaagtgtcattccttgggatccatccaacttgtgttttgggctgaagtctctcccagggctatgataacttgctgggtgctcccaggatcctactctctatcttcccagtcctgagattctagtattcagaatagggtaattaagaaaattaggatgaacaggataactatttgcttgagagagggtcttgctttgttcatgaactcacaatacttttgtcttccacttctgtgtgccataattataggtgtgtgacaccatgcctagggacatgttccattttaatcaatttaattaagataattctaaaaacaggctataatacctggtctttatgtgggtgctggaggtagaacttctgtcctcatttgcaaacgcaaagcaagtattttatcaactgagctaccaccccagctctacagacaggtattttaaataacttcataggttctgtttcgtaatttgtatagatactttaattcctttgtgttaccctattgtgatgctttgtatattcttggaccaggaagtggcaccatttggaggtgtggccttgtttgaataggtgtgacctggttggagtaggtgtgtcactgtgggtgtgggcttaagactctcaccctagttgcctggaagtcagtcttccactagcagcctttggatgaagacgtagaactctcctcatctctgcctgagccatgactgcctggatgctgatggactgaacctctgaatctgccagccagccccaattaaatgttgtttttataagattttccttggtcatggtgtctgttcacagcagcaaaactctaagacgcctatctttcaaaagtaaatactttaaaaataaatttgcagcagtataagacaaataaaagaatacacattatatttcttcctgtaatgaagagcaagcttcaagtgggagactagtgtttactttcattcttacccaatgttgtcccgagctatcattctcgccagcaagaacacactcggacaaccggattcttctgtggcaagctttattgcttcttaaggagggaagaccccgaccccagaaaatggtgctgcttatatagcccgcagcgtggtgtttcagcacctgatgtggcatgtcagctcctgatttgttgctcacccatcacctcattactatggcccaagatgggcagtgactaggcatgagttcactctcgcacttgcgcacaaggcttgcttactagttaggcacagcggaagctcgcggcacggctctccacatctccccctttttgttttattaaaatgaggctggactaggtctgtgtaattatgtccaaccgctgtggctcctgtcttagatcgttcctctaatgtcacagcctttcccgtcatagggtaaccctatcaccactgggccctgtgtcttaggttaatctgtgcatgaggaaagttgcccatccctggataccacagtgctatgtgacagtaactactaaatgacctagggcgaactctacaaaagaggccagccaaaaaaatcacaaatgccgactaattcttgagcatagatagccaaatttcaggggagaccccttgctctatggcagcaagtgcttgagctatcacgaccttgtcatatatttgttgggctctgagcttgcaaaccaaccagagcatgaacacaagtccacagcagatggcagtaccaaataaacctaccccaacccagtccttaaaataagaaaatgcagatgaaatccaggaggagaggccctctgtcaatgacaggtccactcgcattgagttgatccttaaaactgccaccctcagggcctcaagagtctcatcgaacccctcagaccaattttctgcaagatacaagaagagctgtctagacagaatagctgcacgagtaaaattttcatattggacactggtaatacacagagtgcccaattttctttcacaacccaactgggccaactggtataggacgcctatatgttcctcttttggaatgaatgagtctgaatgatacctctgcacatagggcggaggtgcactaggaccagtgcgcagcgaactgacagttgtctctagctgcttctgtcttattctgtgactgattagctcatccttcatctggctggtatctttctccctcatagcgagccgcttcttcctctaagtctgtttcctcagaggagctaagttccttatccgattctgagctattaacagctagtcccttgaactcgtctaatggtggatagaggctccttcccttatgtgcctccccagctcgatttctcttctctccctttccatccctttttctaagctctcccagggcattttttcccttatttctcttttcctctggctcaaggcccatggaaaggcctttattcttcggtgcaccttgttttgtttcaactcttaatctctctccccgctctgtctctgatagactgtcttgaacctcctccagtatcctctgccccgcctcaaccatttgctgacaatcctcgtctgttaagcacgatcttaccagtttccacaacggcatggtccctgctttaagtttgccgttctgctgttccctaactagatctcctttcagtttctcccaagaggcgatagttaatgaccctgagcatgcataccacggcgctacgcgatctatctctttaacaaaaccctctatagtcttagtggcgatttttaggccacactgcctcaagaccgaccgtaaggcggtcactacggagtgggaagttcccatactgctcactgccctgttgtctaactgtgcctgaccgtgactgagaaccagtcagcagttccagcagtggaagcagtacatgatcaaaagaaaaagaatgagccccgtgaaaacatacaaaaaacactggagaaatttcaagaccgaacataccttacagagccttacgtgtcccgcagttctgaaccggcctgcgaacagggaatctcccttgcgccggtgatggtatgcagttcctgggtttctcagcaccacttgttccgagctatcgttctcaccagcaagaacacactcggacaaccggattcttctgcggcaagctttattgcttcttaaggagggaagaccccgaccccgaaaaatggtgctgcttatatagccctcagcgtggcatttcagcatctgatgtggcgtgtcagctcctgatttgttgctcgcccagcccatcacctcattactacgccccgagatgggcagtgactaggcgtgagttcactctcgcacttgcgcacaaggcttgtttactagttaggcacagcggaagccagcaccatcttataatggtgattgctcgcggcatggctctccacacaatgtgaaaaaaaaaacaggttgtataattttggcatcaagtgggatttacaggtgaattatattattttctaaattggattttctttatctatggcaatcaatgttctcattgatccttactatacaaacgtttgattcatctaaagaattagaatctgaatacccattcatccattcatacctaacagactcaggatgcattgctgcataatgtccacacagatagggaattgaggatatatataccacatccaagtagagagccatactgtgagacagacatcagtgttagagggatgctcgtgagcaatatagatgtctctactttcaaattcaaagccaaggttgttgttaaaatatattatccccagttttatcaaatgtatcaatggcaactaagaatagctatttcagactctataacatgaaaggttgtattttctgaattcagctaaatataagtggaggtcactttggagatgtacctctgaaatcacaggagtggttgtcactcacttgggttgtttctgaagcttctggggcttatttgaattgctacatgtttgagcagtgtacaggactgctctcttttacatggatgatggtaggaaacagttggtcattcagttaggaaacttacagaagctgataatataacccaatatgtactacacatactaacatttcagaagaaatgttccaggagccatagatgaaaaaaattgatctcatgttcttgttactgggaaagctatttataaggattttttaatttatggaagggtctatactactcttcattttagagacgctgacattttagtattcactgaaaactacttataataaaaccacagacttttgatataaacatagaattcattttgagcacatactctaagaaagttttgtgtgtgtcattctaattttttaatataatataaactagcgattcctttaatcattaatatatttttatttcacttttcatagttaatatgtaactatttcttgtgattggactatgtatcatttatgtttttatgtagtcactttttcttgaataaaacctatcaaaaataactaattgttaaatgaaccacctaaacttagaagaaaaaattcattttttcaatgcatgcaatttaggaacatttcttcttgttatcatactaataataagggttattcacattgacagataaactgctctcaatttttttagtatgtattatatttgaaaaataagaccctagtagcattttgaaatgtatgcagatgctgcttaattttatgtttcaggcctatgaagcatattataatgcaacaatcataacacttaaagtatacttcaaaggaacttaaaagtatactttccacataagactttagtcaaagtggttaatagccatcgtatgcactttggcattcctggcaaggggattcagataatacttcaaaaagaaaactcctttgattttagtcagcttctttctttgattgagaagttatgaacatatcttgcctctttttgtaagtgaaaatatgttcaaatgtaattaatctatcctattaactttactaaacatctgctacatttgctaaacatttcaaaatgctgttctgaaccacttaatgctaagtaatttctcagctaaatatttacaccagctttcataatgataagccctactgtgtcttaaacaatcagccaattttcctgagagcagtaagacattgtaatagctactcactggaacttgaaatatgttagctggctaaaactacattttgcatatctttgtttctagccaaaagatgtagcactcttatgatttccatttttgtcaacgtttttaatatccagaactccacggacaatgaatgtctatatagatgcctagatcatgaaaatgcaaaatacagtctcaagagtctttcacaagagtaagtctgtatatctgtaacattatagaaaaaactagctattacaatttataacatattaaataaatagaaaaatagatcaaagggataggtactacttaccaaattatatcataaagaataaatataaagaatataagtgtatcatgttctgaacagttaatacaaaactctaaaaatatacacaacaccatgagaaagtgatgaaatattttactaagttaataatagagatgaaattcagtcatgtgattcattagtaaatgaatcataagacacacttggacatcagcccaatgatcacttcagaatgaggaagaaatgagagttaaatttattgatctattaagaaaatacgactgtaaatccatatacgctgaacactgatatacccaggctgcctgaacaaatgctactggacacagaaggacagacagttccagacacaataatattgaatgattttaacacccaacttctgccaatagctatccaaacaaatctcagcaaaggctcttctgtggtcaaccctagaacagatcaaatgaacctcacaagcactaagggatgttctgtccaacagctgcagaacacattcatcttaacagcccatggaactttatcctaatggactacattttaagaccataaaacaagccttaacaaatataacagtatgtcaaaataatttttatttatcaaatggtaataaagtgaaatgataaatcaataggaagagaaaattttagaaactgtgaaaaatctatggacgttaagtgatgtactattaaatgattatttggggatgtttttaattcataaaataggagaaaaatgggggaaagttacagaatatttgggagtcaaaaaacacagctctaaaatcttatagacatgaatgttttcatttaaaaaatatagagctttcacataaataaattaagactgatttcagaaaagcaagggaaggggaagccacacccatcattcatgacaagaaggaaaaaagaccctgatgtcattcaatgaaaagccttaaaatgctgcaaagaaataatgaagcacggttatttccttgaaagcataggcaaaattaacaaatctttgcctaaattgactaaagaaagaaaaagacccaaattaaaattgagtccaaaaaaaaggtcactggaaccagaaagatggttcagagctataaagtgcttactgctcttgaagaaaacctgagtttttgtccgtgttgaatggttcacaaccaccttcaactctagctccaggatgatctcatccctctggccttcatgggtactgccttctaacctctacacatgtgtcaggccacacacctccttgatatacaatgaataacttttattatttttaaactctgtataatacattcatacaatgcttttgatcaagtcaaactcccattctcttctatccagctttttgccctgtttactgcatctctgaatctctgcggggggggggggggttgctttgttttgttttgttttgttttgtttaaatcacagtgagtccacttaatgttgccagtatgtgatcaggtatagaggtgtttactggagcatagatgctctctgggaggttgcgtttctaaagggaaaagagaagagaaagatgactcttccacacccagcagccacagaatgccaatagctgttcagcccggggtggatttcctccccactagcccctgcatgctggatgctgtacggcttgatcatttgcaggtcttgtgcatgcaatgactgctgctgagtcatctgtgcatgtgtgctgttgtatagcaaaccccacttcactgtagtcacctacctcatctgactcttaaaatcttcttagacttgatgtcccattcaggactgggcattccacactggttattttcttcattgacttgttttgagtctctgtgttaattacaataattataaaagcaagtttctctaatgagagttgagagatatgacaacctatatgcatgatgagaagtctttaggtcttaaagtttaggaattggtttaatactgtgaaccatttgcagagtacctcttatggggcaggttttaattcagctagaaaggtggggagaagggcagagagataaagagagagggagggggattggtttctcccaaaacactcaggccacgtttgcagcagatgcccagcttacctgcctgaccattattgtagttacagttcatttcctggtgtgactgatgactcctcctctcctcaaatcgggtacatcacatttccagcattacaaaagccagccagcggtcataaagctttcatgtcagttgttggaccaacttgatttctccatgttctaagactcaaacataaagagtcttcagcaatcaggtctcaccagcaacttttgtaggataacttaaagtattgcttgcattctctcacatatagaatccagggatgaagagagaattgaaagtaaaagggtgatatttatgagtatgggatgggagatgtaagagaaaaaattagttctgtaatatactactaaaaccaagttatgaaaatgataataattttatgtacagagaatgatgttcccattatcaccaccaagctttgctctctgccaaagctttcttctttctgatttgccctaccacatattttttgagaatcttctgtaagaggggtgggtatagaatatataatacattctatcctgtagaacttgtcatcctgggaaaggttaagcacagtagatatagagtgtcatttacaaagccaagtaagacagaagagcagaatggtttcgaaccaagtgctaagttctcacatttaattcaggaaacccacagcttaggtagatctctaattttcttagtaagtgataaataaattcattgcctgaccatactatgtggaaagaatataagctgagtaactgtaaataataacatatcctcaaataatttctcagtttggaaaaatgtgtgtgtgtatgtgtgtgtgtgtgtgtgtgtgtgtgtgtctgtgtctgtgtgtgtctgtgtgtgtctgtgtctgtgtgtaactgatagatctgttttacaactgccaatattaaaaataattttctttgcaaatgtcagctaatgctcaataatgcagtataaaatgttctggggctgagaaggtcactcagtggcagtgtgaattctgagtttgatagtcagccagtaagtcagaagcaaaatttttgaacatttgggtagcatggctaagattaaatgtaagatgtcatgggcaattttaataagaagttatttgttaaagattaaatagaatttactaagatttttgttaatctgctaccagggtacttcacttagcaaaagtgaagcgggagcaaagcttgtggctctgagacacacctggggtttatgcacatacctaggtaccattatatacccagacaagcctttacacaaaaactctcatttcttaatttgttgatctaattctgaaaaaaaatgtactattttgcattacaaatataattttatttacttgtannnnnnnnnnnnnnnnnnnnaatgtgtgtgtgtatgtgtgtgtgtgtgtgtgtgtgtgtgtgtcctgtgtcctgtgtgtgtctgtgtgtgtctgtgtctgtgtgtaactgatagatctgttttacaactgccaatattaaaaataattttctttgcaaatgtcagctaatgctcaataatgcagtataaaatgttctggggctgagaaggtcactcagtggcagtgtgaattctgagtttgatagtcagccagtaagtcagaagcaaaatttttgaacatttgggtagcatggctaagattaaatgtaagatgtcatgggcaattttaataagaagttatttgttaaagattaaatagaatttactaagatttttgttaatctgctaccagggtacttcacttagcaaaagtgaagcgggagcaaagcttgtggctctgagacacacctggggtttatgcacatacctaggtaccattatatacccagacaagcctttacacaaaaactctcatttcttaatttgttgatctaattctgaaaaaaaatgtactattttgcattacaaatataattttatttacttgtacaggtattagatttttaattttatttccaagaattaagcatactcttttgatgacagtgtgtgcatgtgaatgcatgtgcgagtgtgtgtgtgtgtgttttagaaactcatgtttaaaaacattgacaaatttggcaacatttggatgaataccaaaaatgttgtatattggtttgacattagttttcctaagcacaaagacaatggtttaatctagagctaagactgtgtcagtcttgcataaaatagcatgtctgtttagttacactgtaattaattttgctgtattttaattttaacatttgatttacttacaaacattaggaatttgtcatctttgagttagcctaattctccaacatcccttgcttatatattattttgtaagtgctttataaattacaggcaaaactgatcaatttctcagtccccaagagttattactgcgtaagttcatgaaatacagggtcaccacacctctgtacaattatttttccaaaatcatataaaataatgaacgtgacaaatgtctgtttttattcaatcagttatggtgaagaacacaagtattttttcattaggaacataagcagaaattttgtactaatgttcaaaactctgttaaaattatttatatggaatctttatatcttcagtcaaacatgaatgaaaccttaaatgaaattatgtgaatgaaaatttaatatagattaatcaaactttttgttaaaaaataaatgttcagatggtaaagtcatatatgtatgtatatgttaccactggttggggatttgggctaggtgtttccaaacatgaaccaataggcctcttaatctacagaactgaaataatggctcacacaattggtagagtattaaggggatattgttcaaggaaatagtatagtatagatcttaaagatacgtgctgtcaagcatagcagcaggccacatgagtgaagaaactgactgagttgggattcaagaagaannnnnnnnnnnnnnnnnnnnctgtttttattactatacttccgtagtactatttgaggtcagggatggtaacatcggctctcttctattactcaggattgtttttagctatcctgggttttttgtgtttccgtatgtagctgaaaactgtcttgccaagctatgtgaagaactgtattgtaattttgatgtggattgcattgaatctgtagattgcttttggtaagatatccatttttactgtattaatccataagtataggagatctttccaccatctgatatcgtcttcaatttcgttcttcattgatttgaaatttttatcataaagtctttcacttgcctggttagagttaccccaagatactttatatcatttaaggctattgtgaaaggtgttgttctctgatttctttctcggtccatttttttttcagttatatctaggagggcatactgatttttgtgagctaattctgtatccagctactatcctgagtgtttatcagaggtaggatttccctggtggaatttttagggtcacttatttatactgttgtctcatctgcagagaagttacatttccagtttgtatccccttgatctccttcaatagtcttcaaatactgtgttgaataggaatagagagagtggacaacctttcttgtgctaattgctttgagtttctcttcatttaatttgatgttggctatgggcttgctgtaaactgccttatgatgttgaggtgtgtccccgggatctttaatctctccactccacgactttaatcatgaagaggattagatttttatcatgaagagaagttagattttatcacacgccttctctcttttttaaaaaaaatgaaatcatgtgagtttgttctcttggattgtttgttcataaaatagatattaattcatattttccaatttaaactcttgatctatccctgcatctctggaatgatggggggatgatataattgatgtgttcttagattctgattggaagtattgtactgacaatttttacatctctattcatatgggaaaatggtctataaacctctttctttgctaggacattatgtggtttagttagcagggtaactgtgggcttgtaaaacaaattgggcaatgttccttctgtttctattttgaggaatgatttgaggagtgttatcattaactcttctttgaaagtctggtagaattctatgctttaagaccatttggctctgggcttttattggtttagagaattttaatgacgacttctatttcactgggggttataattttgtttaaattgcttatcttatcttgatttaactttggtaagtagtctatatgggagaaaattnnnnnnnnnnnnnnnnnnnntttctattttgaggaatgatttgaggagtgttatcattaactcttctttgaaagtctggtagaattctatgctttaagaccatttggctctgtgcttttattggtttagagaattttaatgacgacttctacttcactggggggttataattttgtttaaattgcttatcttatcttgatttaactttggtaagtagtctatatggagaaaattacccccttttagatttttcaattgatggagtatacgtattaaagcatgtccttatgattctagggattttctcattatctgtttttatatcccccattttctctaattttgttaatttggatattctttctcctctttgtggttaattggataaggggtgtgttagtcttactaatattctcaaagaatcacctctttgtttcatgggcttttttattggtttgtggattttgtttctattttattgatttcagacccaagtttgtatattttgtttttttatcatctattcctttagggtgtgatttctcgcattcgttctagagcttccaggtgtgctgttaagttacaagtacaaaatggctccaatttctttatatatgcactagtgctatgaatttgccttttagaactgccttcatgtgtcccacaagcttgagtatgttgtatattcattctcactcaattctagagaatcactactttcattagtagtgtcttggcacatttatttcagtcatccgtgagtttgcttcaatttctgtaatcttgtaagcttctgctgtttccctttgtcgatgatgatatccagctttaatccatggtggtctgataggatgcaaaatgttatgccaattttcttacacttgttatgccatacactgggtctgagtatatgttcagttttggagaaagttccatacagtgctgaaaagaagttattattttatgtttgggtgaaatgttcagtggatgtcccttagttccctgtgagttatgatgccagttagatccaacatctctctggtttagttattgttggaatgatctgtctattgatgggagtcaggttctgaagtctccctatatcggtgtgtgaggatcaatatgttatttaagctgtaacagtgtatcttttatgaagttgggtgcttttgtgtttggcaaatagatgttaagacttgtnnnnnnnnnnnnnnnnnnnnatagcattgaaaatgtaaacgaggaaaatacctaattaaaaaaaaagaagaaatgcacacttttttagttttactgtaaaaaaaaaaaaaaaaaagaggctctgagttcaatttaggaacagtgccaaagaatcctaagctgtttttcttctagatagaatgagtttagacttatttatactgcttgtttgcatcaaatacttttatgcatttaatatatatatatatataatttaataagctaataataagaattatagaacctaatgtatttattctttttttttcactatagtggattgattctccagcaacagttggttttcgtagccagtaacattcacagcccctattgagtaagatagatcccacaaacaggcaagtcaggagagagaccaaagctaggttttctcaagattggattgatggttacaaaaccatcaggaagctcggcagccatgcaggaaatgatcatctgagagcctttagaatggagtgaaatggattcaaataaaacaaatctaatcaaggctggtaatccagtgtgaggaatgagtcagagaggggagtgtaaggtgtgagtttgatctctagactgagcaacaagatggtgctatgtaggttgactgtggtggggattgcagaaaaggagtgagggaggattctacactcagtacttgatgagccaaatttgagttgcctgtagatatccaagtggggggtatcgaacaggcagttggctgttcaatctgcatatacataaactaaggctagtttctatctataagtctagatatcatctgtgtaaagggtctgatgcacacaagtggaggagatcaggtacaggatgtaaactatgagcatgagtgtaaagtccccctacagcccatttgaaggttcaaaggggaaggaagaagcaataggaacgatctggaataaccagtaatgactgctgaagagaaaaagatagcaatatagtctgaggttgatacagtctgagtctcaacctgataggttgagaaggaattcttgtaataacaaatacctataacagccaccccagagacatggctttcaaattaatgacacctaggaattcctggacaattttataatctgaattttaagtgaacaaatattttcccctcattacttgatgagactaagggaaatcattcagtactatatgatactaaaaggtacacacataaagacacatagctacagctaatgacaaaatcatgtgctttctaaaaagatacaaatctactgtcaacaaaaccatagttttgtttatagaatctaaatagttaaaaggtaccttttctgcttacaattatggttattatccatgtgtggtactttagcaattacgggctttcagtcataagaggtttgtttattattttgttttggttttaatctttcctctgcctcagaacttcccactacccttttcttgaaccaggtcgaaggacaagcaagacaatgaacagccattttcatcattaacatattgatagactaaccttggaagggctcaagtgacttaaccttgttttgtttagtccctgaaatgagggtcagtcatcacgacattctttcatggcagacacacttgaactagagtgttaacatgtgttcctttccccccacagggctccataggaatccaaggtccccagggtccacctggaaaagaaggccaaagggtgagtagagttgaaacagctggtatagtttgccaacacagaagacaattatttttgagcattaaaaagaacaaaataaatagatagcaaacaggtgggcatagggtaccagctaccaaagacagaaatagaaggttagggattttgacagagtattaacatcagaatagtctacatgttttcgaaaatcagcagcacaaatgtacggaccattatttgtataaagtcagttagccctaatgtagtctagaacatgttggccagagttcccattcttgagttaagttaatgagcactgcagtggaagtcccacctggacacacattctctcaaaactgtagatagtaactaggctcttgacccaaattaactagctgacattagagactctttgaaacttgcatttcactatttgttgattttaaccaagatgaaacaggcaataaatgaatctcagcattaattggaaataccatcatgaccatctctcgccagagctgagtctttgtgtctccagcaaaaggaagccctgaagggttctggcaactggtgtgcttccctgggactcttgacacaccatccttgggtcattctgtcttcagttgactctggagtcttgtgtttttatacactctctcgtatgattgcttatgaagtccctgtgctacataaagcagccagtacatcctcaactctacaacagtgtggatgaggttcctggaacagggtttcaaatggcttgacttggctgctgaaatagagggcaagagttccctcgttgtccaactgtactgtaaatcattctcattttctcatagcaatctcatttataccttctgtgaaggaaatctatgtacttcaaatatatcagtgtacttcaaatatttgaagatcaatttccaaaggcttgcctttgattttttttccttcccttttttgggttcctagtcccactgcagtctagtaatttgtcccaggagacatgaattgacctcttgcaggaatcaagaatgagacaaaaatgtacagttcaatatggcaagtaggccctctaccatggacagtagactcccaatgcagcttaagagtcttattatctaggaaggaggaagctttgggttgtcacagtgtgtgttcagctaaacactaccctcctttgttttaatgaaaacatctacccagtcatgtctttcctggtttggggttgtcttatatcacagtgttggaacaagccatgttatttttcaacatctggaacttagtctctattattttatcatttgggcattattttcttggagttttgttgttgttttaatgtatgtgaatcttgttctccagtcaaacagctcccatctttatactattgaaatcattaataaattctaaacagaaaaggacccgacaaccagataccaatagcctatattttatcatgggctcaaggactgctaatcaaagtatgtgcaaatgtatgtgaactctacctcctcctcacccacatttcttaatttggtttgtaagataattatgagaaacctgtcagccggttgctgaaatgagaaagtattcaaatgggaatgttttcaaaacacacttcaaattgaaattgtaccttatcaaagcttgtatttcagaagacaggtcaaaggataagtgaagttgatgtatttttcataattgcagaggcaattatttgaactacatatctcaatcactattttaatgcaaatataccctacttataaacgtgcgtagtccagaatattttataatactttttattttattttctataaagagtgaccacatcagacagtaatataactaattttagagttattgttccatataatttgtccttgttgctatctctctcaaaaatgccatgcacttcaaagaaaataactatattagatattagtggcattattcatgtttaaaaaataatttctgaacattttcaatgatgtctctaattatgtagctacttaaacaggaagcgaattaatataaggaatgcactcttgtagatttgcgtttatgtccctaagtgtcccatttctcctcctcatgagagccaggtttgaatgctcctcaaaactcattaactgtatggatgggtaaggtgtcttaatgcatgcacacacacatgcatccacaaacacattaacatgcatacaaatacacacatgtatacacaccttcagaaatagaccaataatttttctatctcattgaattttaaaatagaatactatagaaaaatccatgactgtaaaaactatattgatccactgtcaacaaacatgtatattttgattgcaggtgtttgactcctgttaaaattgttaaaacagaatataaaacacgtggcaagtccctaggacttaatttctaggcacaatgtctttagtgaaagatgtttaatggtagataaagctttaccttcttattctccctccatgataacacacagaacaatatctcacaattaggatacgtttataacacagatctcactcacataaaaccatactttatgccagggccaaaaagtgggagtgggtgggtaggggagtgggagggagggtatggggggcttttgggatagctttggaaatgtaattgaggaaaatacgtaataaaaaatatatatataaaaacccatactttaaaaaataccgaacattgcagaagtgtgcaagtattgctgcagttatttttactaacacacaaaattctagttgagaaaacacacacacatacatgataagaagacttctatatattcagtgagaacactgcttttgtgggtacttaaacagaacctttaaatttttaattagtttattttatttgtctcttaaagctgttagatgttagcttacaaattattcatttaataaactataaaattaatgttctcacatttaagactgatcttaactttgagaatattcttactgtatgttttcttgacctgattttcatcttgttttctgccattaaatatttaaccttaactttttgaaatcttgtaagtaaaatatttgactggaacttttaatctttctttggagggaggaaggtgtcaagacaggatttctttttgtagccctgactgtcctagaacttgctctgtagaccaggctggccacaaactcacagagatctgcctgcctctccccccacagtgctggaattaaagacgtttgccaccaccacccagcggtacttttaatcttatacacgttattaagcaatgcgagtgttagaatagctaataataaacaatggtcttatactgtggattcagtgtgtttgagagtggtgagggcaggcaacctatgtggaggcctggagactgttcagctcaggatgagaacagaggagggagcaggaaggtacccaggacacagcagggccagaacaccaaacgagagcactttaacagttatggagaactcagtgggagtaagctcacatcaagggctacaaagatgtgacagttgttgataggggatattattcacttacatagcccctattctaagctcataggagtcccttgctttgttcccaggacttccatggtggctcaccaaagtgcaattccaggtcaggggtttgctctctaggagctcccgtacacacacggtacatagacaagttacatgaaagtgtgcacaagtacacacacacacacacacacacacacacgcacctacacataaacacacatgcacgtgcacgtacacacatgcacacacacacacacacacacacacacacacacgagcaacaaagtcatcagagaaatgtttgttaaaagaagccagcagaagcagtgttaattgagaaagaagttttaattgatcaatgggcgaggcattagaagagaaaatgagagaaaggggggaggctaggaaattagacagccaatggtgaggtggcggaagtggcaacaggaactgaatggaagcccagaaaattatcctaggaagtgacatagtttaggtggtagatcacgtgttcgtagatgctcccacaaaatagttcaggagagttgacttggatagattcctctgagacacagattccctgtggacctccttataatggaatatttcaaagtatacagagaataagtatttaatgcaaccttctacttttcttatacacgtgttgagttcatgcctaaacaatatcagtttaaatgtgaaactcatatgtttttaatcaaaggaatcatgcaggtctctttttttaaaaatgaacatttattagtgagttagctagttacccaactaaaatgcactttgcatggctatacaaagatcttgttcttgttatctgctactagaatctgattttaatattggacagaaatacacttaaattttctacactcttctccatagcccctttagtcataacttcaggttatcctgtgtgtaggggagctggggcctcagactttgtcttacaggtaaattgtacttacatataaatttactaggtttttcatggcaaacactgctttccttctttgcctgtgtctgatctggtttatatgccttaccaatgatagcataaataacacatatgatgttctgataaccactgggtttattgataccactagggcaaaggacactaaaatcactgcttccaggaacccaacagatagtgcaaaactcattcaagcaagtttttcctcaagcccacttggttgaatttacaagactacatatcagactcaatgtaaatgaccaaatctgcacacattcccatattccattttgcacaattccatagcagtcttttggcacttagcatctcccacatctgcatcaagtagagctgctgaagcaatgggttaggacaggaaggcagagagaatgcccatgtctgttaatatcaagtaaatatcagcaaggatacagttgggtctcagcagtaaacatgctctggatttgcttcttgctctgtgcctgatgggaactataaatccaacaaacaagatgcaggcagacaatatctagctcagtctaattgaagaaaggtgaaaggagacagcacaaggcatggactggacttcttgaataaaggccatcctgtagatcaagttaaatgtcacagctacttaatggcagtgtgtctgtgggccattgtggtaaaattcactctaattagtggtgctggacatgaatttaaggcaagaaagacaaaatgttccaagaagggctggcagtgaggaagaaaaatgattgtagcctatggtgacaatccaatacttatgtagacatccaaggcacaatgggccaggtttctcacatccatttaaacaaagggacaagtgacatgatttgtagtacaataagatgactataaattatctccatttggtgattagcaaagaagaaccatttcatagtttgtgaatgggacactgcctatgaatagcatgtttatgcagatctatataaaagctgttctatgtcatggaagaaccataccatggagccttcgaactgaagacatcctgactccaatgtccagagattctgacagcttcagagggattagcctaacagaagggtagcaggtcccagaacattgaataaccaactgtagagcaaacatcaaaattagagggggaaaaatggcagggccattccagcccatcaaatgaaactgaagccatagaaattcaacaatgttctaaatgaggccacagaacaagttatatattttaacataagaaaaaaaatactgtctattctgtggtcctgatagaagcagaagcagaagcagaaaaggagaagaaaagaaggaggaggaggaggaggaggaggaggaggnnnnnnnnnnnnnnnnnnnnnnnnnnnnnnnnnnnnnnnnnnnnnnnnnnnnnnnnnnnnnnnnnnnnnnnnnnnnnnnnnnnnnnnnngaggaggaggaggaggaggaggaagaggaggaggaaaccaacaacaacaataacagcagcagcagcagctgccacctagatttgcatatctttaaaatggagactattgagtttttaagtgaagcactgaccaaagatccactttaaatttcattcttaagaccacacatcgaaaggaacaatggtgccgttgatcccttctggtctccacacagagaaacgtgcacactctctccccatgaccagcctatcttgtcatcagttcataaccagaattgcctggtcagtgtgggaaaggatgggtggctgtcagagtcaacctgttccagctgtggggttactttaactcataactgcaggcaaactgcttcaaattctaatgtaaattagttttatcactacttagctctcaggtatattacagaactaagcctgagacaccagagaatattctttggtgacagatttgtactgaagcatcctataactattacctgcttacccacagatgcacttacgggggaagggaaggggaagaagcgcttgctttgaagtgagctgcgctaaccctccgatgtcactgccttactgcatttaagtcatattgaacacctcttttagctttgccagggtaaatgtcaaccaaaaagttttttgccatttgagaagctgtgaatacgggtgtaaatggctgccaacaccaagcacgaatgtaggaactacaaagagaattttaaaaatgtaaaacatgaagaacgtgggacatgttttatggcgtaatgatttaaaaggcagaaagttgcagttcaaacctcagctttacaaaactattgcatcttgggtaaccttccagaaacaagggaattctgaaagcaagtttaatgcttttgtcatttgcaacatatgataaaattctcaagagacagcagcagttgaaaaataaatgtgataatccaacagttgaaagatgattggacatttctttcccacaggattcacggtgcaccttggtcagttctgaattctacaggaaaagctaatgatctaccttttcttgttttccttgaaaatggttaacttctgaatttttcttattagaaataatggatacccacttgatatttttaataggttaaagcaaacacatccataaatgtttgtactaatgtgactgtgttcactggtagtctttatagtcactacagtgtgaaagagatgctgcatagctttcatttgtgattccagaatccaaactgcatgctaggcagcatctatctcatattgtatgactctgtgtgtgtgtgtgtgtgtgtgtgtgtgtgtgtgtgtgtgtgtgtggtgactatatgtaaatgctgcatatgctcaattaaaatgacactttaagaaaaacagtgcttggagtgtagagatggctcagccattgaaggctagggtctcagccaaaacatcaagacaagtaactgaaaaaagttacaaataaataaaagagcattgaggaaaatgattgcatgcgtctgatcatgtcttcacactttcccttgatatgtttttgtgaagtgttccatagaaaatatttttaaactttaatacatgtatttggccatgttactaggttcttatctttagcacatttgaacatactcttataaaataagttaaattaaagtctgtacactgaggggggaggggacgagctaggtaacaaagaggaagaaaagatggggatgtgacacttgaattgctgtttggtgtggcaagccatggaagttagcttgcctggggttccttaaaagcagagatatgagctgtccttattcaagtcactgactaaagaaacatatgcacaactgaagcacacagagaaagcaagaaatatagaaacgtgatttcaagaagagtctagaatcagtctggttccacatggctctttggggcacaacgaccttatcccactttgaggtaaaaggttgggcttcctctctctgggttgaataagggcaataattccccaggtgttcccccccccaacaggatgttcctcaaaactaaagagacctgagggaaaggttcatttagaagcaaatatctaattaaaaaaaataaagtattgaatgctttgaaattttttgtttttatgatcaaactctcctcgtcagtaaagtcaataagtcgtttcatagccaaaaaaaaaaaaaatagtagccaaattccaccaaccaggcctggctccaaactatgaaaaacagacgtcagtgtcagctaagcagaatcggagggcctctgagcagaagcaggcactatggtaaatttgataatcatagattcacaggaaagcggaagtagaaacctatgcatctttttagatacatagatgaaagaacataattattacataagcaagtgaaacagccagatgctgcaaacattcagaaaagccaatgaacagagagagacacaacccaatagacttaagtaccactgggtatttagggttgaaaatgtctaaaaatcattatatatgtgtgtgaaacagacattgggcaaaaaaaaaatgttttaatgatgactgaactaacaaattgaaactacccatagtgcctttgcctaatgtaggaaacgttaaaaggaaattgtctttttggagatgaatccatttaaagtttaaagttaaaggacccaggcatgacgagcacctccagctcttaaaacctggcttgagcagggctggagggatgactccatggattagagcactggctgcttttccagaaaacccaggtttgattcccagcacccaccgtgtagccatctgtaattccagttcccggatgaaatgttctcctttgccctattcaggcatcaggtatacgtgtgttgcacatacgtacattccagcaaaatactctatatacctataaaataaaataaataaatatccaaaagaaaatattttttaaaattaaaattaaattcatctgatttctcaagaaggaaggacaaatttactatcaggaggtctccagagatagcagaatagtaccagacagactgcaactaaaggacaggcttcagaaaaaaaattactggggacaggcccttgaacttggggtaactcctacatctaggagtagataaagagacccaacttgtctgagttgatgctgccaatctttagaaagtcaggggattactgactgtcactttcagaagctgatatttatcttgtccaatttacatgtttgtgtgtaccagagtgtgtgtgtatgtgtgtgtgtgtgtgtgtgtgtgtgtgtgtgtaccagtatgtgtacatgtgtacactggagggtggatgaaggatggaggttgatatcaggcgccatccttatttattgaggcagggtttctcatcagatcaaagcttgcacataaggccgatcatgctagccaactgattctaaagatgctatctctgccttcagagactagagttctgatccaccaagacttgcatgcatttgaggattaaaattctagttcctgtgcttgcaaagccagtgcattaactagtatatcatcttccttgccataagctggaatttaaagagaaatggctcaaggcaacgtcggggagacaaggacaaagtgttctcttgtattcaaatgacattcacaaacaaaggaagaaaccactgaacagggagaaattaaagatataagcctcctgaaacagcagtataaattgggtaggtgtccagagaaagttgggaaagcataagtgcagtcaggaggacccacaagaaggcatagagcagcggatctcaaccttcctaacaccgtgaccctacaatacagttcctcatgttgtggtaacccccaaccataaacttatttttgttgctacctcattactataattttgctgctgttatgaatcataatgtaaatatacctgacatgcaggatatctgacatataacccctgtgaaaggaatgtttgaccccaaaagggatcacagcccagaagttggggtccattggtatttagggatgtgagcattcattttgggaacaagaaggaaccaaagaaaatttcatcctcatgatacatatgtatgtttgtctcacatagaaaaagaaataagaggagatgggacctacaaaagtctctgctatttatgaggcatttttatcatgactgttaaaatagatataccctatttcattcataaccaagcccaggtcagtgaagaaaagtcagagaaatatacaaatgttgagaaggccaaggtaagagaccagagaaaggctggtcactgagggagaaaaagatctgtgacatcaattcagagtattgctaggttctccaagtttctagtgacgtccaggcactccatcgtaaacaccccatggatgatggtgctttcctacataaatttccagtgatacctactgtaaaaatcccttttatcagctatcttaaaacaaaacattagttttgttttattagttattgatccaactcagaccagttggatctccttatctacttctagaggtagaagacagtctaaatcttttagaaatttttattagtaaaatataaattaggtaagggtaaaactgtcagaactaaattattcttatatttattgcttctggaaaatttcacatcttatatccctgtaaacattctttgaaccctcattttcctgaattctatgtaatctctgaagcatgcagatgctgttaaccatgctaggaaaactcaggagacccatttataccacaataagtctttctcacgcattaaaacaatgcattattgaagttatggccacaaatttgtgtgtgctatgtgctcatgtattataagctggcgtgcttttccatgagagctgactagatggatgttgtatactcctttgcagttgttggccatagagctaaaaaaaaattttcagagtaaaataaggatgaaataaaatttcctaatcttctcatgtaagatttaaatggtgtactgcttgttttctttcttattttgttaaaattgtgtgaccagggtgtgcctaatttacttttattatacaattaatcatctaatgaaaacagaagtaatctatgccatttgtagaaacttttatttttaatcttttattcttaagacaacattcctaattattcccccccacacacacctctatactcttttatattttgctactcaagttcaaatataattataatgagtcttctttaaaactatttttctgctatatcactttcaaaagttatgtagatttttagcaagggcacaatttttaaaaaaatgaacaaatctatgaaactttctcagatcttgttattcatgatcagatttagagagtgtggtagactcctgtaagacctcaaaccataacagacaggaaatatatgacttggagccatttctttcagtatcttcagtatgattctattaggaaacattctataccatcaccttctaagctacatcaccattaagactaatatttgtttaaacagggaagaaacacctaatggtaaaacaatggtcatggaagttgtgcctacagaatgggagcaataggatcatgcatcagtcagctttctcatttctgtatcagaatacctgacacaaactatttaaggggaggaagggtttattttgactgtggattcagagagttcaattctcttaggttctattgattcttggtccatggggagggatgtgtgacactattcctgggaaggcatgtttcatgggaagacactgttcatgggaatacataaatttgtgctcacctcatgatagtgaaatgaggacagaccaaaatacaaatagcaccaaagtccaacttggggaaccaatgagttttactggggttacttacaggaatatagttgggttacttagagaggtgactcaaggccagctgtatcaccaatgccaactcatacatacactcataaaacctggaacctggagctcactacacaacttacaggcagctcaataagatgaagactgtcctttccaggaggctcagttggtcccagcattttttcaggcagctctgcatccctgagtggccagcctttctctgctctttttctttggccttcccaacatctatctatttctctgtcttttcttcactgacttgggcttgtccatggacaaaatagacattaagctatcttaacaatcatgataaaaatgcctcttataaatagcaaaaccttttgtaggtctcgtctcttctcattattcttttccgaatgagacaaacatacatatataatataaagaagaaatttgctttgattccctcttgtccccagaagttgtacaccaagatgaatggttttaatcttgggaaaacagctacaagacagggtggcagaacatcctagcagtaggaacatgtggaagagtcacctgtcctatcacagatgggaagtagagaagaagaggagaaaagtcttactagatatgaccttcataagtacagcctctgggttttgtgtcctctaccttcctaaattagcaccaccaggaaacaagcaatgaattcatccttggaggacacttagatgcaaccgtagcagacaacataggaggaaggaggacaagaacagaccttagatatctgcacttccttaaagttagccctatgtttgctttcttcaaagcctggactgatgtctgcctagtccaaaggaactaggagaattaagaggaggctcctttctctctcaagtgacaggagctgggaaaccatccttgtagtgtaagtggagttgttgaagcgtggtgcttaggaacccataagcaagctgtggggtgtacagaagttgaatatgcttgtttggaacctttagtaacaatggactataactgtatagtttcagcctgtgatcactggactctcctggcaacaatccttcaaggagtagcattgagctcatggggagttacagcttctgttggcttcctctgcatcataaaacagcaggtccacaaacttgtggcttttattaaagtaaaggatcaagaccgcatgccctgagaaaaatgtgatcatttgtttctgtggacttttatggtttatatcttagtttatttacatatttaaattattagtctatctttcattatatatcttgtactcatgttaaagatggaaagtgtattttaatcctaattttcaacaaaacaattttcactaaatttctttacatctcattagtagaaatcagctaaatgagaaccttgcaaaaaaaaaaaagtctaaagaaatctagaccaaattaagtctggttttcctaggcagtatgattaaacatatactgaatctgttaattgatggagaagcattatttcacagcatgctatctgcagttgtgcactgggtaatgaggcagtagattcataaaaaaaaaaagttagcaacatgtatgcataaaacttagatataaatacaaagcccaaaatatttctaggaaaacaaatactgattttaaaatgccaattaaagcaaatgtacactatttcaaacacaaacattagtattttcttcataattttttaatattgctgcaactacaaaagaaacatacagtatgctgaagcaattgtaagcaaaggcatcaaagatgtttgtttggaattgtgacatgattatgtagaaaaactgttgtttgacatagacaaaaaccaatgagtatcaatgtgggaaacaaacaaaactcatgaatcgtgttcagtgcattttgactaatatacaagtagcatccatggagcacttcagaatgaccgcaggggatggtggtggtaaagagctttcctctttagtgaaatgcagacaactatgagagactacactgccagaaaatacaattaggagctttactcttgcacaggactttgttctggaagtacagctgtggggatgtgtaaacttctcgagttgtccccaagttcggttcccagaaaccatattgggtgattatgacatgtaactccatctttaggtgacccaacatgctccttagcctacacacacatacatatgtgtagacacacacacaaataataaaagatttttaaaacctactaggtttttaaaattattattacatttttaaaaattaaatgtaaacatctagaaatataaacatgccttgtttcctattttctattttaatatcaatatttccatgtaaaaataatgcaatgtggctatcagtggcagaaaaccaattatcaaatagtgtgttaatcatggtgttttatatcagtcaaacattattaccaaatatacttaaaatgtgatcagttgccttaaattttacatttctcaacaaggaagttttgtatgtaaacattacagatagccaaattcatttacatgtgggggataaaatttaatgaagtacactatcataatagggtagattcctagaactagctactaatgaaaacctgaagatgaattttgaaaaatgcaatatcacttttcccattttataaaagtgtaacttatgaagatgactctgagcttgtgaagactagtttgaaatttctttttccatcccctttgaccaatgctactcatctcacgtatccatgaatacaatcacatactcgtgatgccaaaacatagcaatgaagctcttgggataatgagtacagcctataagaagcactgtcatttcaacttggtctggaaataatagaaagcacaaagcaagctcatttttaaatgcaaaacaattttgttcagttaaaactgtttttgtttgttcaaagtgtataatagacattttatattggaaataagtgtttcactcataatttataatcaacgtgcaggcatatattcattacacatattgttgggctttatatagacattttcagtcaagactttcattcaagacattttcgatcatgttctttgaccacattccccttctgatatcaccccttccccatctcttctcttgctattccattcattccccccagaggtcccttcttcttcttctatgatgtgtgtgcatgcacgttcccgtgtgtgtaattttatgaatttatataagatccacaaatttacaatgtatttgcctttctaattcttctgtgtctcttaatatgacaatctctgcttctgtccatttgtctacagattatttaattttattctgctttatagctacacaaaacttcgctgtgtagatgtacaaccttccctgtatccactcatctgtttaaagacatctaggctgattctacaattgctactgtaaatagtgctgcatgggtcaattttggaagttatgttcccagaagtgagtcatatgataggctttttcgcttttaggggactgtccaaactgattcccatagaagcagcaccaattcacattcttaccagccatagggttccctgtctatggatccagcatttgctggatctgttttctttatgataaccattctgaatgagaagaaataatatgtcaatgtaggttttgtagattgctgttggtatgcagctgaggtcaagtgcctctataaagctagagcctatgattgggcaatgtaaaaggaaggtggggctaagagttttagggagagagagaggacaggggacagatgggagaaaggcagagaaagatggagaaaaggatgaacagcatctacatggcttgaaatggccacaggtagctatggatatcatagaagagcatagaatattatacggcaatttgttcaatctaggtgggcagcttgtatcaatatcaattgagttttgagttctttgtgtaggcatttgggggattgagaatttactgttataaatctgactgataaattacaggcctctagagttttctttatatggtgctcgaggttgagagcaactcttggccgactgaccatagaggatggatgactaggaatgtaaggaattcagaggcaaggaaacagggaaaattgggtatagccatggggtggggagaccgctattgttggtgagtagctggagatagattgatttttaataattacacacaaggtttaatttgcatttcctaatggctaagaatgttgatcattttcttcctgtttcttgtctatgaacacatcatcgtttgacaaccagtcattttattagcttgcttactaattgagttgcctggatttttttcataattagttttctagttctttatatgttctaaatttagtcctctgtcagacatgaagttaacaaggatttcctcccattcagaaagctgtcttttccctcggttaattatctcctccactaggcagtagtgctttattttgtttgtttgtttgttttaaatgtcatccaaatccatttttcaattcctacttttatttcctaagctatcggagtccattccagaaaggtattgatcttgctcatatctttaagtattttccatattctgtcatctaacaatttcagagtttttggtcatgcagaaagaattctgactttcagaaaggtgagaagaggggggtcttagctttatttttctacatgtggctatgctgaatttctagcaccatttgtgataagattctgtttttttttctccaatatatatccttagtgtctttatcaaaaattaggtgggtatatacatttagacattttgtgtataaatactacaatctatacaatttagttttatactaactaagataaatgtgtacatagccaggtcccctctcagaatgaaccaatagaatgtgcagtatactcttagctgtgttgtatgttaataggatttagaatgccaatagccatatgttcaaagtaaggctagtctgttctattatccattctcctttattctgggtgactcagaataattcccttcgagtatccagctatgcaggaccaagcaaccactgggtctaaaagtggtgttcagatggaatctctcaaaagatcttttaagaggaaataggcattcactccttcattgtttggggtgttttcctctaaaagatagaacataaatgaccagaacaggtaaagtgtgaatagtctgacttctttctataagatctgaggatttgtattacacaaagagcttaaagagatgactcactgtgtgacttcccagaactgaaataccttaaagctcagaaaaagtctgaatgtgttgggtgtaatgcaaatagccaagaacttacagtctccaagacatcccgggaaggatttgtggggggaattaactcaaaggcagagtttagatttatgataactggttatttttaaggtagggcagacatatctgagtttagaataggtaaatctgtctaaatcataaaactgaaatttttcagaccacttgatcgatgctgataacacatgcaacatgagcaatacaaatagcattcacaacatgtgactttgcatttccctatatcagaaactcttctgtgatgagagttaatatttccattttccacacaaaaatgctgaaacataaagaagttacggatactatgtttgggatcacagagcaagacaaaagtcagcttataaccagttcctcctgaccaattctgttcatacaacagctaggttttccaagatgttttaatacataannnnnnnnnnnnnnnnnnnnnnnnnnnnnnnnnnnnnnnnnntagcccactttggagagaaccctgattcattcttctactgatcctttagaatcactttcctgctttcctctccccctccctcccttctcttcccctctccctccctcctcctcccttctccctcaccttctctccctccaggcatacattcttcctttcttcctttcttaattttgatattttagaacaaacatagggtctcatgcatactaagtatatgtacattgttccattgaaacacaggcgcatacacacacacacacacacacacacacacacacacatacacatacacacacacatacatctttgacactttttctcttcccttacctagagtttaggtgctgcagagtggtttgtgggggaaggaatgttctgtactatatgccaagggctttcttggagcccctccccagcttcaaaccttgccaatagaaaccattcatttcataacttagtgctttctatggcaatttagttatttcaatttttactaataaaacattaacttatgtacaatttccacaatgtaaatctcaaagggcatggattttcaaggcatatagacctagcgtaagtgcagcttccaggcacaggtaacatctcctatcctcatattgtgtcagggtctcagttttacaataattacaaaacatactaattaatattaaaatattaaacctggaactatgactgggaatatatatatatatgtatatatatatgatagcttatatattatagatagcatatatatgtatgcatatacatacatgtatatatgtaaacataacatacatgtatatgtatgtatatatatacacacacacatacatagagagagagagactgatattggtgcttataagtgctagctactatatcagaattactacatttaccactaactagagcacagtgaaatcctatagcatgaattccagggaagttcagtggctcacatagactctcagagccatttctggatctgtggctagcacacttgcccaggctactctatgagtaagtgtcactaaccaccaaatcgttgggaggtttgaatctagccaacagtggtcctcagggtagggctaaagctaaatgaagaatgagagttttccccctaagtcccagtagctctatcctggcccctgactcattaaagccagttcgtgcactgccctgtggaaacttacaggtgctgttgggtgggttttccacttactggggtgctaaataaatactgaccatcatcagttcccccagaaaactaacttatatttagagctgttactactagttttgactcttcttttggtcatcagacagacacttgtaagaggagcagcacaccaggactaggttatttataacacgggatgacatggaattttcaggaatgttttatggactacaaatgcttcatccagacttctcattcttcttcccatgccttgatgttataaaatatgtcaggaggaattcttaaggtcaccatatctcaaacctcttagaactatacactgtttcaaacctctaagacacagacttgattatcagaaggcttagatttaatttcagctcactgtttgtacttagatataatttgtaaatgtttgctcttatttttgctgttagagagaagtgccacaagatagttggtttttgttttaaaaagcagttggataaattaaaatatttgaaatggggcatcctgtcagaaaacttaatgtaaaattgacattacaagataaggtttttcttacagaggataatgatatgttgcttaattctcctatctcttagcttgttagttcttatattggataaaacgtttgatcttcttagtgtatcccagtacagatgacttcaaaagctactttaaactttcacttagaagtaagggcacagtaacttctgtaccctttacttaaggataattcctttcagaaatgttgcctactatcaatggagttgagcactggcagtactttaaaatattgaaacacaaggataaatattaaaacataatgcatagtatgtatgatatttacataacccagaagagtaccaaggaccagaagaataccataaaatgtgtgagactcattacccataggcagaggaaataactcttcatttggaaaggatttccaaacaggcttcctggacatattgcaatcccagctgggacaataaagatctgatattcaggttatctgataatgagtttgaggataccacaggcttcatagtaaaactttactgcaaacaaacaaacaacaacaacatttaaactgtggaggggggctgtttatttttaaagaaatttaagaaactattctgaaattatcactatttatttattctatgcctgtggaaatcgtatcattgttatgttactcattttgaataagctatggtttttaatttgtcttgggaagataatttcaagaaaatttacaaaggtttatatttactataacattaacaaaaatagcaacataaacatcgctatatcctaaagatgtttcaagatataattaatcttccagctttgatgttgatgcttgtctataaagtataataatgagtgcaatcacagctttcctcattagtagaagctcatcatttcagaaagctatattcacttctattttccttattagctcagaccaaaagcaaaaacaaatatttaatgagcaccaattacattcccatacattgcagctagagcaacaaacacaacaagggtgcttaactctttgctgctgactttcataaataaagttttattggaacacgtcaatgcccttttttgttcatgtagcctctttggttgcctaacagtagagatgaataagtatgtgaaagtgtatgactctcaaggcactggttctcagtcgtcctaatgctgtcaacgtttaatgctgtcatgttgttgtgaccccaactataaaatgattccactgctactttataactataatttggctactgttgcgaatgtaaagatctggtattcaggatatctgatatgtgacccccaaaggggttttggctcacaagttgagaaccactactctaaggctaaaatactcactttcttttcatccacaataaacgctcccaaactctgtgatatacaaaagcttttgtctttcgtggcacccattctaacacagatattcacaaaataagttttgtgtgtataacagtaagaaacaaagtataagaaaacagccggagagacagttggtattgggaaggaggcatcagagaaagtgtcccagcagagatgactgctggccaaagatctcacagaagcaaaggaacagactccgggggtatctggggaaatctcttcagcagaaggagcagatgtaagctttgaagctcctgttgaagtgatgacgttctttattaaaatataaaatataaccacaaccaataccacatatcgatagtatgtcagtgtggggccattgctactttagccattcgtgttgctgtaaataatgatggacaacttggctttttgtttgtttgtttgtttccttaacttacttacacagggaaaaggcatacagcactaagaaaaatacacactgagattataaatgtgtcaatgactggatctatgtataactttctatttaatctccagtaactgacatatattcttcatgtagtaaatgcacaaatactgatcacttgtgcaatattttctttcttatttccctactcctttgtgttccttattaccagactgtttctcactgaagtagtaaacaaatctgtaattttgattgttgctcacattagcttttatggttttcattactcatgatctcaaaagtgtgaagcttctacttcaagagctcaaatttctacatgaacatgagaacatgaccatgtaatactggaggctttcacagactacacactgaattttccattttgtgtttgagattttgacaccaaatagatttcacttgcctgtattttgaatgcatttaagtcagattaatttttttctcaatactaataaccaatcatttctactgatgagtggtagttcatgttctaccacgatttgtttaacctgactctctgtagaacacctatgtcatttccaccttggggctgctatgcacaaatctgccttgaatatgattttttaatgttgaacacgatttatctactatttgagaagtgcaagcgtattgatcaggtagataccacccacgacttatctactggcttcttgcacaggatgtacacaaggtcatgttagccaatattcagcatagataggggaggagacagggtggcactctagctggagcactattggcagtgggtgacctctggggaaaggcaagtcagctttcttcgggaatgtggcctctggtaggttcccatgttccagtgaatgtccctatcccatgtacatatggacagctctcactggactcagtggatcataaagaacatgaaatagaagaggatgaatcaggctccattaaagtgactttgcagattggtggtatactactatgtcagggaaagagagcagcatagctttctttaaaccctcttcttttccagtgattggcttccccagacatgatcctgtgtggagggctatgtctatcactaacctctcagaattctcattagcaacttcactgagacctctagccattatggggcatctgtctcctgaaggatgactctgcttccctcgagttcctaaactacaggctagtcagaaagcaaacgagacagtaaactacgctttctcgttccctacatctggcttaagagtccttttccctccatgaggtcttccaatttagttaggccagccaactgacatattgctcattaatcatacatattaactggagtagttaaacgtttgaaattcaacttctcactctgtccacaggaactagatcttgttttctcaatgtgatgacacatgcttcagaccctgctaattaggactttcccttggaaatttatcctgacatgtttcaagaacatccttccctctggagtgcaagttcattaaattattaatatccttgtataagtcttgtaaggttcactaacataataaaactttctctgttttaaaaaccacagctcattgtgaagggagaatttgatcgctcttcctcataccttttctgagtagcaaataatagagatcataattaataacatataatgccgaatgtaaggtaaaattgtcttactataattaagtcctaagcagttacacaaatataaggaggcatcattctaaacattctaatgcagataacctaaaatgagttcaacagaattcctctgttaagttgtgggagtgtagcacgtgtactatgtaagctatcctccacctacacaggcacctatatcttctttgcaatatggccctttaaaggcaaatctctctggctcccaatgacaatcagcaagtgtagctcagcagcctaactaggaacccttgatgtaatttgcaaagcccagcataatccggccactctgccactcactcttcaccagccagctgtttctcactaagcccccactctgcatctctcccctctgctgacggttcatcagaactttatggctcctagccctgctcctttcaaatctgttctgaagctttccagaatactcttaaacagttagccttcctatgtaaatgttgcttccctctcttggtgtattcttctataagttttgtccctatccaatatttctatattaacatttgtttattacatatgcaataaatactgcacatcagtaaatatcagtgatggtccacatgggtagcttggattcaagtcctaaatctgttgctcattagttaacctttaataaactgctctgtcatacactcatctcacttataaaatgggatcctattgaaggaaattattaaatgaatatgtataaattgcttttagtggtggattgcctgtggtaaggtcttgtgttatctcttacctccattgcccacagtggaatataagattcaggattcaaggtatttccaagcttatgtgtttcttggatggtaaataaatgaccagggatatatgagctcaagatgaaaaagatgtctacacaatagtgaaaaggtgacaggtaagcaagggagaggtttacgggacaggacggacattttatgtaactgaggcagtcatttttgttacatttgcttttaggatgtgtacgactacatgtagctttactagatgctaggaacagagacttccctagaggggaacagaacaaaagtcaaccgagaacacaagaggaaacacggaagtagtccaggggatttacagcagcacctgccttactcggaagcctcacttttattgtgcaaactagaactgataagagtgtggaagaggcagattgataaggacagagtctaaattacttttacccacttgcactctcaactgacactctatgttaagtttaagctgtttaagtgaaaaataacactcaaattaaaaaatacatcacagtgtctacacaatggcatgacccacatgtttgaggtttgaataccaccaatatattttccggatatttaatcaattgtgcaagaaaaaaagggggtgggactaagggatacctgcagaacacactagatgcagaacttcatggtaggggacagaaataagaactacaggtggcacgtacagccccggtgtgctggccaaagccactcctgtcccatcttgtcactaagggtatataatcagccatcttgtcactaatggcatataatcagcttaatgccaggcacctctaagctctttgctctttcatgggtcctaagattccaattcctaaggatatttcttctaaagtgtctaactccaaaactctaaaactgtgccctataagtaccctgatagaaatcacaacgtaagaattactagcagtttcttggtgctgatgctggccagtcttttttttttttttttttttttttctttagggctcattcttgttcctctgacttagactctggccttagactttgtgaactttgtgggtaaatgtcaccattttgttttaactttagcagtcttagcaagcaagacactatcagttgcctgtgtcatttatccttcttcctgcagatttaatctgctctaaacctgaagctagacacttaaccctgctaaagagtgaaacataaaaatgcacatcactgaggaattatgaaggggattggttctggagatgaggaaagctggtcatcaccgggaccaagacagaatctgaagagcagaatctcccttccccagtcgggggacattctaaacacgggggacagtcccattttcaccatgtcacacacttgcagtttcctctctcacccctgtgacacaaggatgtcaacagacatcacagcatattcaaaatcacctccagccaccctctactgctgctccccactagggacaaccaggaagatccaagtgctcagcaaagagccagaaagtgggggtgaaagagcagggctttgccaaggtagctggatgtcccaacaaaatggagtggaagtttgggttaacctgcatagtcagtggagggagtgaggtaaagggacaggaaagcaaggaaggaactatggggagagcaagtggtaagtcaatgtgcctggaagacaccacaaggctgcctgttctggaccatttcaggagctgtggtcactggaggactagaaaaggcaggaggagaaccagagaataaaatcaatagtacagcactagacaagagggattcattccaatattccatgctacagaagtagctacagtctacaagctatcttctatttctttcttttttttttaaacgtaaagagaaaaatccagaggttcccaacacatggaagtggcaggtgcttgagaaatagaaacactagtgatgctggttattataaattgtatatatgtatcaaactatcatactgcagcccaccaatatatacaaatattgtatgtcaaataaaaataagtaatgttaaaaaaagatttacagaagcagaatagctgaattgtgaatgattagaatttccccactgagggaacattaatcctattttaatgaagtattattatttattcagatcacagtaatatcctgaataacaggatatcccaggggtggagttaggcaataatgtcaggacaacttgtagtctgctttgaaaagctactattagtttctagtgaagtccatctaacgaaaagaaagggtagccaacaagttgatgcaacaggttaaaagcacttatcaccaggcctgaagatccaagttcaaagcctgggaccaacctaatgggaaaggagtgatgacttctctggaagttgtcctctgatttccatacacacggtccttggcttgtccacacagatatatgcacacacacgcatgcatgcatgtacttgtacacaaacacatacacaaaaggactggttaagagacagagagacagagagagaaggagtaatgtggaagatgtaagaccctgttgcagtgcaggagtatcaactcctcttgccaccattctaaacttaattcagatctcttattcatactaaattacatactctccccagtccttacaagagccacttgactgatccctgaagtaacaagacctctatgcctggtgtcgttgctgtcatagatgtatttttaaatatctcctaagatatgaaatgcacttgggattcttacacattccttacatgaaaattcattcatttctcattttttgcatatatcattgattttgaaacttggtaactctttataactttggtcgtaaatctgatttctgtccacaaaagtaaaaaagaaattcaaacaccccagatagacagtagtgttttcctgtgtaatgaacacctcattcacagttgtgtgtgccagtcaagaccaagactaatcttccttaacatttctctgatacctgctcaggctgagctggggccatggactttgtgaaagccagtcaaaagagcagggagccatcaaaaggagccaccttttcactcggcaatgctgaaacagacacagttggacacatatttcagcttgtgggtctggtgcctctttaccacccttgatttaaatctaattgctgctgtaactccttctttgtcctcataacgcttgccaacaaccaaaaccacctgtcatataaggaccagtagcccattatctgcattcttcccttcttaatgctcatgcagagtgaagtgtttataaagcaagtgtctaatttaagatgcacgtgcgctgttacttcaagtcatcctggaaggatccggttatgttttaccgttgcaagtttgcagacgccgttcatttaaatagccctgcctgcctgcctgcctgcctgcttgctgacagtaataaccctctgccagcctttttacttttatttttatctttttgcaaatactgatggattgacaatatatcctataaataagtttgttacattgtgagaatatcttggtctcatttttaaggtttattaaaatgtacattaagatatgtatcactagtgggtggctttgttaactttttttttcaccaaatgaacacattcacgtaagcagcaccctgttcaagaagtggagcataaggaaattgcctttgtggtttctcccataaatacccgccttcacattgggtcactcattgtaacctctaaccacacacactaagtctctcggcttggtcttccatataaactgatcaattttaagttttacaatttttacatttgttttactttttaactgtgggggcaggcaaggatgaccgacatgtgcacatgagttcaggtgcccatgctgacatgtagggccatcagattccctggtgttacagatggttgtactaaccaatagccatttctccagccccaacattatgcttctaaggaagatgtatattgttctatatagttcaagttcattcacttttaaatgttaaatactactccataacttattttgactcttatgatcatttgactgttaacattagtttttatcggtctatttgcatagctcagagtggcttgtacatttttaagaacatattacttattttttgttgtatgtatgtatgtatgtatgtatgtatgtatgatgcagtgggggttggtgttgctggcatgtacatgctatggcacacaggtgccgatcagaggacaactgtttgaagtccgttcttctcttccacctctctggggattgctatcatcaaactcatgtcgccaggcttgtacaagctccttactcaccaagctgtcctgccagctccgattgtacttttgtaaaggatttctcttgtattctttagaaactttctttgcaacattaccaatactttcatatgacaaactggatatttggatagagtagtagaaagatagaggatgaaaggaattagctttttgttgtcgttgctaccacattctgaagattatagcatatagcataaaatcaaccaccctttccatgtttaagtatatggtatattcacattgttgagaaacagaccaccacttattttcctcctcaaactgaagttcccctttaggaatcccctctcttcttgccctcccatctctgggaagcaccatctgctctctgagaatttgaatatttccttacccatagaaaagaagtcacaaagtttttgccatcattcgactagtttatttctctgagtcatatgatcaagttcctccctggcccatgttgtaccacatgacagtgcccttcctgctagaatgaggaccagcctaccatatgtgtgcatcacaccctgttcagtcatctcgccacagaaggacacctgcagcgcttacatctcatgttgttgagaatactatcccagtgaactttgtgttactagagtcctaggacagaggcctaattgtagggggcccaagagactaaagccagttacccagcaccctgaatttctaatcaaagaaataactggagggtagaaacaggaaaataagttttcattgtagtcacactaggaggatatcaggtgtggtgacttcctcacatcattcatgttactggcaatagaagcaacaaaagctggggaccaggaggcatgcacaattaagcacccttgcacagactgtggtttgactgattgtcatctcaactccggctctgatggatttcctggcacagggagatgactgcctgcctacaaagctcgctgtttatggaactcgagggtaagctggaaaggaggaatagctaaggaaaagtacatgctggagtgagggaagtctgtcgggaccatgactggagacttgggtgctgtctcagtggtctagagtagagttttgttaaatcaggcagtcacgtgccattagtgactgtgatgttcctctaagtcaagaaaatatctgactcttacctagtgtctttagcctcagaatgggagagaattaactagtttaatttggaagccttgtattatgagctgtagacagacctccttaaatgattagcatgttttcatgaatcattgaacaaaaagacaaagaaaggaaacaagagcaaaggagacaggccaagtaaagaggcagagatcccaagcttccccctgctaggagttacctgtgggctcaagtgcagggtcagcatagaagtatgtactggggtgtattcccagagatcccatgccagttctccttttactttactgaggagctccatttacgatggtggcactatttgatgatcctgcaagcagtctattaaggctccttttcccacatccttgtcaacagttgttatttcctgggtttttgtttttatttttattcttgataagtagcctttctactcattgtgcaagttgggaattttataagtaatcacttttgtaatcatcaacaaaccagtgacctttatagcaacaaaacttggatacagacacagacacacacacacacacagacacacatagacacacagacacacacacagacacacacacagacacacacagagacacagacacacacagacacacacacagacacacacacacagacacacacacatacacacacagacagacacacacagacacacacacacagacacacacacagacacacacacacagacacacacagagacacagacacacacacagacacacacacacagacacacacacagacacacacacaggcacacacacacagacacacacaccgtttttctataagaaaagagagagctagcccagcctgcctgcttctgaacttgacaatgattattttcagtttcaaaaaaaatcagtcaactaattgaacatttgggttacatttatgagacgtgtgggctctatagggctttttagggatgctgattcccagttctgagaaccccggctttggaaactctgctatggggcagagaccaggcatggtaactggctttctccgtttgagcatatactggtcttggatcatgaggcagacgtctaaattgtagttcaaaatctttttactgttgccaaacagaaaactctctcaggtttccagggaaaccatttagagtccatctatactattatgctttctaccttggttttcaggactgcattagattagcttgatcataataaggcaggaatggtagatctctctgtgctgggaactttgtgaaatgagatttatcaaagttgctactgaacaaatagccccctgagagcagccaccctacctctggcagccttccctagatggcagtcgtctgagagagctgcaggagatcccttatgaatatccaagctcctgctgtttgccttgctttacagtgggccttgggatgaacagacagaaacaggagttggacatggagggcagacaagtaagaagcattcctccaccaacatcacagccttctccccaacccgagcatctacgtccccacctccaagaccccgtgtccccagccagtgctgcagaacttgatgaacaaaagcacagtttagagatcacactgggctcttgatcatggttctcagccttcctaacgctgcactcctttaatttaatacggttccccttgttgtgctcacccccaagcacgttatttcccttgctactttctaactgcaattttgctactgttatgaattattacgtaaatatctgttttccaatggtcttaggcaacctctgtgacagggctgttctactcccaaaggggtcatgagtgacccacagattacaaacctctaccctagagaaaagagaggtatctgattttagtcttcatacaaaggagagaggcttgtgcccgttgtgttagcaaaattattagcaataaagtactccttgaattttccccccgaacaatataatttacagtacaaaaaacaaaacaaagcaaaaaccaaaaaccaccatttttttccttagctctgaggtagactctagctggtgtgagtgtagccatagccttacagggcagaaataagagagaactcctggggcttctaggaggaagaaagacaataaagacaatgtctagaagtaaatgggaactattaacatccatagaaattatggatccaatctctctctcataagctaaagcttccctcacgattctgtctgccttgtgccagagtgccctctgcaggtcactgtgacctgaaatcccaaggtcttgccagctccctatgctatgcgtactacagctaaagggggggttggggtggggggagtgtttctctgtaaagcacacacttaaaattgttcaaatatgcttctggaagttaccagacactcaggccttaagctgaaaatatgtgttggctgaagttaccctcacaaatatgttccttcacgtttataaccctcgcaaatatcttacttgcttgtccaggcttagaaaggatgtatgagcagttcagccctctctgactctaacggcatgcacagcggggctctgacaaggctaatgtaacagatcatgtaaatcggtggggaaagagggagtctggatgcttgccctccatacagagcatggatgctttttgctccctatcagtgttgttatgacatctgacacttgccttgtcttaacataaactctgtgataaaaattgatcaatagcctgactcccctacttccagcccaaacagatactcatttctcttttgaagaaaggagaatgcaaacaaacctgagcctgtagttttaactcgacctgatgcatgattacagaaggaatgggtcctctgcttaggtgacgcctttggttctatttctaggactcttgtgatttaagaaactacaatgcttctgtttctaagtaaactctttagtcttgcttagtcctcagaagcaacagacttgcatttagtaaaacttaaatatatagactttcagaaaatatatactgcaagactagatgtatgtacgtataatctatattaaatacacagacgataagattatatatatattccaatcttacagttccttaaagaaagctagagtttacagcatttaaataggcagcatatgaaaacatcactaattgtatgatttttgtaatttaatattttttggttgttgtcctgtgaatgtgaatttgggagtatttatgggaagggcaggttttatttattctttggcaatctcatacgtgtctgtaatgtatttttgatcatgtttgctatcattatgttttctccccatctccttcagaactaatctttcccaaccaactcttctcctgctttcatctccaagaaagaaaaagaaagaaagaaagaaagaaagaaagaaagaaagaaagaaagaaagaaagagagagaaagaggggggagagagggagagagaggaagaaagagagaaagagagaaagaaagagagggagagagaggggagggagggagggagggannnnnnnnnnnnnnnnnnnntactaaaagctttgaacttgccctccctggagtgaatgcagcggatggtggcaataatgaagatgtaggaagtgataatggtcagaactgtgacaaagacattcagtgtagcaaaaaatagaatcaatatttcattggtatacgtattagaggatgcaagtttcaagaggggaagatcacggaaggaaggaaggaaggaaggaaggaagaaatataggacctgctgggcttggtgagagttgtataggtatgaggcaagcatgggagtgggaatatggataacttaccaatgaccatatccctgagggaagctgactcgccgggcagccattaagcttctcctttagggctgacctcctgaggtcttcccctattcacaacagaatgttgacagctaaatcgtgtgcaggtctgcgcaaggattcgcagctgcctgagctcatgagtgaaacagctgcttgaaacagaagtccttaagagtttgagctttacttatctcccatagcaatgggcacattttatctcccgaatcacaatgtaatatttgtttgcttacctacagatccacctggcatttaaacttcctacccaatttcaagcctaaataaaattagtgaatgaaatgggtctgtctgtgggtcttagttagggttctattgctgtgaagagacaccgtgaccgaggtaaccattataaaagaaaacatgtatttttggctggctttcagtttcagaggttcagtccattatcagcatggtgggagcagggcagtgtccaggcagacatggtgcttgaagagctgagagttctacatcttctgaaggcaaacaggtgtctctctcctgtactgggtggagcttgagcacaggaggcctcaaagcccacctacctagtgatgcacttcctctgacaaggccacacctactccaacaaggccacacctcctaatagttagtgccacttcctgtaggccaaaccacagtaccctacttacgctcacaactctcacacaaaccaaaagcattgaaaaggaggagctaaagttgtgctgtttaggaaacaagttcagaaacgttcctcattcagagcatataaagcctaagaaaatgcttgcttatcaaataatttaactaggacagggcctggtagcacacatgctttcaatcccagcactggggaggcagaggcagaggcaggtggatctctgtgagtttgaggctagcctggtctacaaagcagagttctaggagagcaaggactgttacacagagaaaccctgtctggaaaaacaaacaaacaaacaaacaaaagaaaaacaaacacaagtaattaggaccagagcgaggacccagtgggtaccccaggaagccatatgttaagctgaaatggcagacctgaatccagaagttatattctgacctctactcagaccccatggcatgcacagatatacaataatagcaaataaaattaaaaataatagcaactaaattcttttatgtaatattagacatatttcttaagcatgtaatattagacatgtttcttagcacaagcctgcatttgtggccacctgtaatccaggtggttataaatttgggagtataaaaaatgagctacaataatgattaatatgtaagaattatacactaagctcacttatctagacagaagaaaagagctaggtcacattctgtaggtagaatatacaaatttgtcacattctgtaggtagaatatacaaatttgtcaatgcaacgcttttcaaattttagtaaatgtaagagatactggaagtaattctgacatacaaaatcatggctctgagcccctgggtttcttaaccagtttcttaactagtcaatccagtcttccagtccttgggtacctcctctaaaattagaattcagacccattttgaaatattttttccttttctatttcctttccttcccttcccttcccttcccttcccttcccttcccttcccttcccttcccttcccttcctttcctttcctttcctttcctttccctttcttcctcccttctttctcttctcttctcttcttttcttttcttttcttttcttttcttttcttttctataatgtatctgagttttgcttacactggtgcctatacaccacgtacctacaatgcccatggagaccagcagagggtgacagagctaccagttttgacagatcatgtgtgtgctggaaattggacgagttttctcaaagagtagccaggacttgtaaccactgagccatctctccaacccctgaaaagcatttattatttcacccaaattgcactttttatttgaacagaaactgcagagtcaccatacaaaatggtggttttaagtcatctttcacatactgtcctgatattgccagagtgtcaagaaagtctgcatggatcaagagcaattagaatctgttcatctcaagaagtgtatttcccaccatggtcgtgtaaaaccgccccacagcttcaggattcattgatgttcaagagtcacgtgcacttggaattgtttctttttatttttttaactgtcttccatattcctactaaatattgttgtgttaaaatgaaattaaatcacaatacttataatctatttttttttttttggtttcaagggaagacgagggaaaacaggacccccaggaaatccaggacctccaggaccacccgtgagtaaataggctgtgctcccgtggcaaaacagaacctgcttctatttccctttatccgtgcaagtgggttaggctgtcagcagtacgttggtgttgactaatatcaattacaaaactaaaacaaacaaacaaacaaacaaggcaagagggcctgaattgaattgggcaggtaccagctttgtagctttttttttccctaaacactttataaaattttcagtaatcattttgtgttttgaagaagaaaagtgagggcacactaacaagcgcactttctgtcatttctaaacacttgacatggcttcaagacaagtgtctctgggaaggaatttaaatggtgaaggcctgtatgtgaagttggccaaatgcctggaacaaatgtgctggactctggagtaattcccaactactgatagatgtcttttctgaagagccaggaagactaagaaataggtgaccacacaataggattcagagttctcagctcacaggtttcagtttgttgctaacctaacgtgtttgggggtggtatgggcataggtaaggattagcgtttacactcagccatggttctgattcagagcactcattaaatcttgtatagggaataaaggtggtttatgaactttttaatataataaaatagccaatttgttagactgagaaaaaaaagtcatgtagactataaaaaagggtttatgcttaggtcagcatttgcctgagaagacatcagggagctgagccactggttggtttctgcttggtaattgtgatttgtgggaactctgactcccctaaatgactaaaatctttcctttcgtataaacatcatccaaagttcccctggggtacagtcagttgtcaacagtttgagaggtttcccatcataggataaattgatggtctgtacctaactcactcactgtctggtcgagaacgacattggaaagaaaagtaagtcctgtaattggctctctgtgcttttccctcagcgaacgctttctttttctacaactcccgaaagagagctgctatttcccaaaggactagaaatgaagagagttattcacagcgaatcatttcaaggtcacaataactaacattttgaacaaatagctcatcaaaaaaaaaaaaaaaatctaattgcacccaattcacactgttcaagggtttcacaaacatctatttgggggtcctactaaatgcttaactgaaaccggacttgaaaaactgaataagaccctgcccttgctttgcttttaggagatttgagttcaggtcagaaaaatgtggggtgcagaagaacattcaatgaagataacacagtttgtttcctggaggaagtcacagagaagaataaaggttgaggctttaaagattgagaaataaaccaaagagagcgggggaaggagcaagctgggtacctcttccctgacaaacatacacctcccccaccccacccatacacacaccacgccacaccacacccctacatacacaccaccacacacacacaccacaccccatctccaccccaccctacaaccctatacccccacactgcccacctcacacacacccacaccctatccccacccctacctacatcacccacaccccacccccatcccacccatatactactccctgccaccacccccccacacacagcatactaccccacaaaccctatatgtcccccacaccacccctccataccacatctccaccccaccccatgccaccccacatgtacacccaccccacccctgtcccccaggaaagaagacagtgtgaacaaacacccggaatgtaaaacctctgatgggtagaggtgggcaccctgccacagacagcccaggcacagccagaggccaaaaggggatgcagtcaaacctttccagggtcctggcaaaccccgtggaaagctatgagagtaaacagagggcctaaaccagagagggcctgggccagatttcactgatggtcactctagcaacatagtggaagcagatggctgacagcaagcaagaccaactctagctatttattgcttctgaagtctctgcagggcatttgtgatagatagctgcttggctgtcctgcagagctatttgtatttgatttccatatagagtgcaaggtagagaggagcagtctagtctatttttaaatttttttttctgtcttttctagcatgaaactgggcttcacatgagccgtactccatgacagggaataaggcggctaagagaacgggtggtcgggcactaaaatcttctggttgaggtttgagatggtgacggtacgcgcatcttcccagtggcttagcttgcgccattcccaaagcaagcatgtgaagggcttatgacaacttcaaaggtagaaaaataaaaataaaaacaaagaagaaataactttacctcttatgaggcagtgactgaacaatatagccctcaagtgaatgaatagctgagacatttgtaacattatatttgtgcagttttgttttttaaatacattagtcaatttgattctcagaaagaacctaggaatggtagtcgtcaggagcgctgggcaagcctttgatggcagagtacttgattcagtgtcctcctgagaccattcttccccttggggatttaggtgctctctcagtcaaaggcagtgtttctctggtggaatgtcaatgcagacaaaaggagtagagactggggtaatgtctttgaggacccaaggcaactcaaaactcaaagtaactgaactgccttagtccgtccttgacctgaggttctttgttccgggaacaaacttattttctcacttccttaagaaatttttatacccaaagacaagtcatttcaaatgaataattttctataactttagagtcagctagtgagatatgtgtttatgtttgtgtgtaggtgggtgtctgcatgtgtacatgcaagagactatctatgtacctggaaaggactatatccaaaaatcataataactaacattttaagaaaattaaatatcctggggcggagaacaaaatcctaggagatattgactacccatatttgcttttctgttactgagataagtcactctgactaaaggcatcttggggagaaaagagtttatttggcttatacatccaggtcacaatcaaagaaaagtcagggtaaaaactcaaacagaaacaatagaggcatgctactcactgactcgagcactggcttgctcagctagctttcttatacagtcaagactcacctgcctagggatggtgccacccacagtgggcttggaccctctcatgtcaatcaccaaccaaaacaatccatcataggcatgagcatggccaatagaagcgaagccattcttcatttaaggttccccattgcctggtgattctaggttgtgtctagttgacaataataactaaccagggtatttactcagtctgttgaagtaatgttactaagttatgagacactgtatcttgaatgtcgtatccattagtacagatcagttcaccacatttcaatttcatcatcagggaaattttatcttttcagggaagacttacttgccgttcatacatgtaatttacagttggttgccttctgttgaacatatattttaaaatgattttgtacactttcctgtcaaacagcagacctatcaatacagaggtaaatacttccaaatttcctaaatgactttgccaacttgtcattttcttttttagattaatatatcattttccctctccttccttcaaacccgcccataggcccctccctgctctctttcaaattccgggcttttctttgttgtggtaattattatttggggggaggggagggaagggaggttgctacacccctttgttgtctctaaatgtctgtagggctgctacccctcttagactgtagagtttgcaaataaaagacacaaaaacctttagataataagccttaaagtgtcagagctgggcagatatcaaccttctatgctattttatctactttcctgtggtgatatcacctgagatatcacttgccatgttctgcctgggccactcccactcccacaggaaagctctcatggccatgagctccaatccacccacctgtcgtcctcctctctccctcatcatggtccctgcctgagaccccaagcctggaaaccttccctctgcccctctcctctgcccagcccaggctgtagacatattttttaaccaatcaggaataacttggggaacaaagtttacacagcacaagctgatatccataagaatctgctcactttggatcaaccaggatcttgaggtatacaatttagcatttgaatacaagtagcaccagaccaatgccctacatttctttccattaatttattgttatatacatatatgcatatgtacatatatatgatatatatgcatatgagtatacatatatagtcctaaatataatctgcttggtctctataatgatacttcctttggtattagatagccaattggtgtgctcttcaccaaagaaggctttttttttttttttttttttggtcggcccttaataatgttctatgatgaggcctacaatctttccctatccaagttgatgtctattgttgctgtttattctagtttacctcgtgcttcagccgttgtgtggtgagactttatgggtgtagcttctgatatttctcaaagaaacagcctaccgacagactgtgttcctctggctcgtgcagtcttgccaacctctttcagccatgatccctgagacttagttatgggagtaacctgtagagtatcaatgggactgggcttcacagctctacgctttgatcagtggtggttttctgtaatggtccccctctgttgcaaagaaaatctccatgctgaggcatatgggctacacttatcagccgagatactggaaaatgatgtgcggcacctagctgggtggagaggatgtaggtaagggtttgggtttttaccatgtcgtggacctagagcctgcaaaatccgagagcacagtccagcactctggcaagagtgttcttgaactgtagcatagtggaggcttctggagtccctcctgcctcttacaacagccactgatcgtctcatgagaacctcacactcatggtcccatctgatagtaattacatcctcaaagtgccacccccatccaaacactgttaaccgtgaatttagcgattacatttccagtgcataaaatttgaagggctcattaaacaatagcagaaggaggccgtaagcagagagatctgaaatgagtaataccttgagatgtgctaagattataatcaagaacagtttctcagagagacaaaataaaagaactctaaactctctcgtcaaagaaataagtccaacagaaaaagtaagaaatgcagtaaaaccagaaagctttattacagcacgagctcggtattagaagccatttccagggtgttatggaatcccagaactacctcaagaagctgaaattaccctccttttgccacggggtaagtggtccttacaaacaccccgcaactttcccggaagaatggaagtatatgatgggaagcccaaattcagactccggatctgagtcccaaactcattgtgcttgaggacttccaggctgtgatctgatacgaaacggccttactttaaagaccacatacaagcatagtttgacttttctatggggatccatggcacccatctcataggaaagcaaagtagcatagggtatgtgggatgccatcttcctgggcagcccttcctggaccgtgcacgtgactctactctctctgtgaatatgaaatcatagcgcttgccccacccacttcccacagtggctaggaggaccagctgccatgtatgtatatacaggaactttctgttgtatttacataactctgttagtattgttgtaaacatccatttgcaatgtaggtagaagagatggccctatactacaatagaatccacgtggtctttctcttctcgagtttcccatttttgtgcagtcaacaaaaatgcaatatctacccttgacttgcttaaatgatcactctgcgtcttgagtacttattctctgtacgtaaattcactcttgaaaagacagaaattatttccaagtcactgctacagccgaaacgagggactcgagggtattttttttctcccctagctttacagtcgcgttctggcttacggagctggtttgcctatgactgagacactgtattttattacttgtgatctcttctgagtctcacccactgctctttagactccaacaaaaacatctttccaaaacagttttctggtgatcttatctgcgtatgcaatggaaaatattgaccttatgttactataatgaaacttgggaagccagaccgctcggaaagccttagtttgtaagaatttgagttcttagtttccttcaaagagattggaaagctgtgaaaataagctggagtaggagggaaagccagagaagttaatgagccattaagggaagcatgtaacagcccacccctgtgacgttagctctgcttctcatttatcatttctgtaaggagcattgattaaaagccgtgttaactctaaaatgtgttatcattctttctattgcaggaatgggtttgagctatctttattttctttctggcattgtttctgtgtaccgtttcattattgtggtgtgagaattcatcagtggcctcaaatatgtcacatttgagtgcagagcaattgagtttgaaaaaaattttttttcttttcgagaaatatgtaacgtgggccagcagcgccctctactgtttccactggaaattttctaggcaaagatgcttctcagagtgcagatatggacattgtttttacacgtttgggttttaattatcagtgaatacagttttcgaatcttattttcatgatttgtggcactctatgcttttcttttactttaaacataagcgccatcctatccacaatagcttttaacatcagcctcttatgttcttaagttgaaaactcagccctagccctggcttctctagatgcccatgtatggtaaaacgatgatgttagctattaacattgtggagctcattacaaaaaaagcctattttccaggtcaataatctgatcttaaatatgtaagtccattttatttatgctttaatttaacatcactgtaagataatttctttcacccttaaagaaagaatcatcctatagtgataaagtctgtgagtgatttaacatcaggtgatgcaattacatgagaaaatttagggtgcaatttttaactcattttcaactgtagtctcttagctgtgacttcattctccgtggtttcggtaaccttccttcaaccatcgcccagaaatgtgaagcaaattccagaaataaaatatttacaagttttcagctatacctccatgtttagtgaaatctcacactgtctcattctgccttcctgggggctgaaaaatcacctccttaccccctggatccagtttccatatagcacctacccaggagtcattgcgttatcagattgaccaccatagtatcacaaagtggtattacaacaacactctctttacttaactacggcctcaatttcaatggtagtgaggctgctgctaaaatgacaaagagaagtggtaaagtgtttcctttaaatgagaaaggtgaaagttgtcaacttaagggaaaattgtatgctgagatttctaggatttacagtaaaaacaaatcttctatttgtgagatcataaaaagaaacaaatactgcttgttccactttgtagttcaaacttccaaaacatgtatacaaggtgaacacttagcttaataggggacatttagttaaacatttagtttaaatggaacaaatgttaaattataatttccctgaccttaatggttgcttagcatgggctacgtttctcgggtttattctctgcaggtaaagagggattagtgctattatcttctaaccactaccttaaacaatgtatatacaatgattcaagaaacaaagtagcaaactgcagaagtctctgtctcagtctttacactctattgtagggaaggaagcatatagcacgagttaataaacattagagacaaaacaatttcagtgtaatgtgaagatctctatgggaatggagtgattaatggaataagaaatctcagaggtgttcttctggtcaaggtagcctgaggaagtatctccctggtcaataacatgatttaagaaggaattagccataggatgtcaatagacaagaacttcccaaccagaaagctggatatgttcaataaatataacagaactgaaaatgtggttttcgaaaaggcttggggtgggagcctttatcacgtaaggccttgtaagagtgagagtcggcaggtgaaaatgagagaacttgggacttgagtggtcactgtttccttctgttaaatctcatgtgtgcgtgtgcgtgtgcgtgtgcatgtgtgtgtgtgtgtgtgtgtgtgtgcgtgtgtgcgtgtgtgtgtctgcagtaattagctttctggttgattttgttggtgctggtgattggttgttttaatgtgatgaaatgattcaaataattattatgaagatgatttctttttagtctatcatttttagtctttaattaggcaagactgtagacttgtttgccaagagggaggggaaaaaaagctttgattgattgttgactgctcaatttcaaccatgctgtgaacacaaagtacatttttttcattgaagatggaaatcctctcacatataattcagtctttttcccctacctccaaccctgatgttttcctgctaataggctacaggttaagtcagatggcagtcataacaggcaaatgaccaccctcaaagcatcacagaaactcagaactactgcatttgacccccctagtctattccagtccttctcttgtatgtctccatctctcgctctgttacaaagagcaaaagtaagatgccactgtatgcaatacaaagcctgactacctctcaaagcaacctgacaccctaaaatacacttgggctgctgaatgaggtaggtgacaagacatttcactgcaacatcattccctattaaaatatcatatgtataactgtgtgcattttgaggctcatgatgtttcaataagaacctgattcacttgcaagccttgaactcatcaatgcccttccaaatgttcatttcatcagtgaccctctgcctctgtaccaactgactagaggccacacactctaatgacaatatcaaaaagaaaataaacctaaccatctatttgagccaatgggatagcagtttcatctctgattgaaaaatatgatgacatccatgaatttaaaaacacattcacatagtatgcaaggggagagagggaggaggagagggaggggggagagagagagagatgatccatgaattatttttactgccacttgtgcattattggggtcatggttccagacaaaacagctgttgtcaacattgctaaaattccagtgtcaccttgaggccacggagtaagcaggcacgcgtgtgaaacagctgggatcagactgagaattcaaacacccacactcggatccgagttcttgcttcctttcctccatatgagcagcagtagtagtgggacgttactaacacttttctcactgctaaaccttttctggttatagccaaataatggtggaaaaggtctcgtcttcatctgctaccgactgcatctccatctcatatcatagtagctctttggactggcctatgttctttctaataacagtgaggcagctttttgaaatccttggttcatttgggactaaacataattagttgggccagtgtgtgaatttatcatgattccatgatgttgggtaaatgttacagtctgaggaagcaaaatccaatcagatttatttgaaccttttatgttcgaaaacgaaactagtttctgaaataattttaaagttcacatttggctcaatagctccaaaagggatgccaaatcaaatggctatttagttttacaggtgtgtgtgtgtacaaatatatatatcagcaagaaaatatgatctcgattttagcaagactctaggaaagactccagcaatcagattcagctctaccctatgacatcagtttttgtctgcatgacaactatggtttcgtttagcagaaagaaagaccaagaggcattttgtgagtgaagatagtagtgtcttgggggcgttgaaattgaagaaaatctatagaaaataagatatgaagcaatttctgatgtgtctactaattttgttaaatgagacaaatatctagcgaatatggtggatggttaatatttgattacaatattatgttgtcgcttcctgagacattttaatatgatgttttattacttcttccagaactcatgcattttgatcatattcaactctgactcctgctcctcactccttcctatccccagccacctcccaaataagtgtttcctgttttaaattatccaagtatactttgtactatccatatgctcaagggtgttggaccatccactggcatatgaacctacaaaaggctacacccctaatttcttcatatccatcaactaagtcagggatgggagcccataaccctccacctccaaattcataaggctttatcattttattttatgtaccatttagaatccttaaagaattttgcaaacaggaaacccactctacagacttgctaaaggtcactgtcactaatcgcgtctttaatcccaaggtcaccagtgttctctcttccagaacccctttgtgcgttggagctaagtaaataagcaaccatcctccggtactgtcccacagaactaccccgagtacacttttatgtcacatcgaggttcagttgtgtcacagttgtcatttgcagactaatcattagaacaatatggaaatgagagaaaacggtatcactcttgagggggaactagagactcgatctccctacatataaaacctgcaggttcccattgtctacagcagtccacaatgtccccagcgattcaaatttagcacatgctggtcgcctctgtattccttggctgtgtaagaactgccagcatcaggccggttatcttgagcctcagtagtgtaccttagaattgcatttctctgcgcaggaagccttgttattttcccaatgttttcaaagggagtgaatgttatcacttaattacagtaaatggtagcacagagggctgataggtagacgctgcctctgagacctctgggagccgactttattccttctttggtggtatatggagaggttttgggggccagacaagatggaggtacagatgttcccacggtgaggcttctgttggtgatcttttgaagacgtcactggacacagatggttatcttcacacacccggaggcttgctggctttcatgtcccctggtttttatcgtcttgcactggatcattgatgttgcttccaggggtggcaaagacttgaaagattcctgctgttccttctatctcagggatctgacaaataatggtttgggtgtttgtttgtttatttgtttgttccctttttttcgggacctactgcagatagatgaggagggaacactttgtggatgggtaagcagaatggcggtattagccgaaggactcattcatccttcctaacgtccatgccgtgggtgtcagtcaacaagtactgctgtatcgataatacaactaggcttagaggaatcagattgatctctggggggaaacgtgcaccttccaaaatgctgctttcttgccttgggctgtaaagggttaaaaatgtttgcaagtcatagcataatttagaaaatctgttttcacgaaatggattaattacacccattgaacgcgttcactgtcacagccccatcctcccactgccgctccaaaacgacaagtgaaaccagggactgggtaattttggaaaacaatcaggtcacatagcgagtagtttgcttattcacacaaccatgaactgcctatgcttgagttccctcaattacacagctcagtattcaggccagaagcagacaagcccagcgcaagcgagcactttcctagaatacacagaggaatgagtttgaaaaatctccaaagtggcagatggggaaaaaattctcattcaagttctagaagctgcttatccagcaatccctcacctgttaaccacacagctttggaatctcagaaccaggggcactggcaatatcccagaccaagacccccaagagctatagacctttacagatatggtgcgggtatatgccaccagcagagacgagagaacatgaggggccacagtactgaacattgttggtcacattgtggacatcatgggtcacagaactgaagatggtgggtcacaatactgaatatcgtgggtcatagtgaagattgtgagttacagtgctgaagatggtgtgtggttccgaattcggcttcttccttcttccgcgtgtgaagaggtaaattctgcgagcttaaacctgtaatttggtgaaaaggctgcatgacattctcaaggaggtcatgcaggccgagagtaggaaaggagcgatccttatttctgccggtctcaagatgagatttttcagggtttggattcttctctacctcactcttcttttaggcccattcccaggtcgcacttgcccttcaatggtgggtcgcagaactgaacatcatgggtcacagtagtgagcacaatgaataacactactagagattgtgagcatcatcgagaacaggactgaaaatggtggctcacagtactgagcatcatgaataacagtactgaatatcatgtgtcacggtacttatcacgaactccagagactgcccctcgaatgagcaccaggatgcgcaaacttcattgaatgttgaaaccagcgttctctggtaacatctctcaaagccttcagtttccctcggtgccgatgcgtaccaatctctcttctaggacagaccataacggctctgctgtggccttattagaaagatatttctttctctctgtgtgacagcttcacaactaatcttctgtgtcttcgtgctcaacggagtttgcgatcatcaaaattctccccaggtgatactgctcatttggttagagtgtctcttctacctcctttgcaaactgttatttctcctcttctctgaccatagcataagcactgggagtttctacccctcactggtattatttagcctcacgaagcctgttagctattgactgaggtcatagtctacatttcctttgcagctgccttttcttagtccccgtgtcttgtctttctattctaagtcctgggtgctctcattgcttctctgctctttctttttcctcacttagtctctgaatctattctgcgattttccctcagtatcttccccatgacatcttttgaaatgctacagcagatttcggagttgcccctatagccaaatagggtcagctcattgatcctataccccaatgagagattctgtcatcttttacaacagaatgaccccacctggatatttttaactggctttaaaagacggttgggttttgggtttttttttttttttctcctctcagtttaagggaaaaagttaaaaaaaaaataaggctgcaggctcaggcagggtctggattgaaacccaagtcttctccctggctacatgtgagtaagttatttaatcctatgctacatataaagaagagtaccattcattgggttattgaaacagttcgtgctatagtaaatacacttatgttgtggttttaatgtagctttttgacagcctacatttccagtgttgaaagtttgtagcttggagagatggttaaaccatagctttgctttcaaattctttgtttaatcaaaatctgttggcctttgaccttattaacagaataaaggcaatttataaatgaagctttcccggcatgtggctagctcgctgtcttggccttctgccgtctcccaggtaaggatacaacaagaagggcctcatcagccagaggaccaaaccttagtgttcagctccccagactcaagaattatggaaaaataaatctactatgtatagattacctggagtgtattagaatggaatgccttttgtactggattctgtcattgtctaattgtgcagtttggaggaaaaaacatacagttgatttttccatctaccaaatggggaacataaaaataccccttcagttcactgagatgtcaatcaggagctcagattaggttactgcctttgcaatcacactaccctgcaaacctaaaacaaaacagaaggtccagagacttgtagaattaccataagttaagaaatatgaatctttagagttgcacaatcataggctagtgaaatggctaagcagtttaggatactagctgctcttctagatgtcctgagttcaattcccagcaaccacatggtagtttatggatataaagggatttaatgccctcttcaggcaaacagagttctcgtacagaagaagaagaagaagaagaagaagaagaagaagaagaagaagaagaagaagaagaagaagaagaagaagaagaagaagaagaaggaggaggaggaggaggaggaggaggaggaggaggaggaaagaaggaagaaggaggaagaaggaaagaaggaggagggggaagagaaggagaagaaggaggaggaggaggagaaggaaggaaggaaggaaggaaggaaggaaggaaggaagaaaggaaagaaagaaagaaagaaagaaagaaagaaagaaagaaagaaagaaagaaagaaagaaagaaagaaagaaagaaagaaagaaagaaagaaaattcatttgaggagatagtaaagcctagtaccaacaaaatagggattctctgtggagctgcagatataatccagagagtaggtacaccatgactacaaaggcactcctctgagcagcctggcttactatgaagtaactggccacattcctagggtgtcacattagaatcccaaacatgaacactcagtgagtggttcctgaaatcctgtcttcatatttgagcttctgggatttatttcttggtgctgttttgctttgtcttgtcacgtaagtatgtgtgcatacacacgagggtgtgtgttgtatgtacatacttgcttgcactcacatgtacacacatgcttgagtgtgggaaagaaagtcattgtcagcatctcctccctcagtataatctgcagcagacatgggctcaataaaaaatgtaacattataagtttacaaccatttaatttacagaattagatctcaggcgctactggaaaatttcattgagagcaaatattaaacaaatgaaaggattggtgtttcattttatattcatttaatgttgtgtatatttgagtgccaacatgtatgtatatgcagcatgtgtatacttggtgcctgcagagggattaccctggaactggagggttgtaaaatccaccatgtcggtgctaagagtcaagcctgggtcctctggaggagcagcaaagactcttaaccactgagccatctctttacccctgaaggatccatgtttcctaaaaatgaaaaataacaaaataacaaaataaaaaaataccaattctttctcaaatcatttctgtccaaagagccttattgatttttcccctcagagttatagtatgatttcatatgttggagttctagtcaactcccacccatgaaatcgttcctacttaaccagggatccctacatcctttcttctaattgacttgccaagttctcggattaatctatatctgcagaacctgtcttctgtaaatccagaagaagtaaactctttgctctttttgtgaccatatataagtgaagccaacatgagcaagcaagataaatatttataaatatccataaatattttctcataatagcagtggtttattaaattcagacagtatctggtattgggggtgagggcatgcacggggaaccttctctataccaaaactggtgttatgatgttgtaaagattgaaattctgtcctcaaagagatttcatcctatccaactcaagatcaatacatgagccactttatttgatgtataaatgtgctgtatgaaatcctgcacgatgcatcctaagtgaacacatatatgagagaaaaaaatccatttaacattagcttttctgatccctgctgtaacacctatgtctgaggtcttagacttcctaatgaaaattttaaatatcatgagaaaaaaaatttctactttacctttcttactagccatgcagatggtggaaaggatcagtggaatatgaacccaaataactgaccaataaaaagcttcctatttgttctcaaagcaaagctaattttactatacttcaaagattagtgcaaaattcttcacagaagttttgatataccaaaggccattactgtagatacctggaaatccccaaggccagagatagccatgtgctactcaaaatgtatatttgtgagtcctaggagaacctccttatactatcagggcattgaagggctatgcttcattgagacaagtggcactgagataggttatagatgctcactcagcgaacttatgagacaggaaagagtgtttttaacataaacaggaatgcttcagaaatgaagaagagtgaatgtgcagaagttgtggaactgctgagatcttgattcagtgtttagaataggctaaatctaaaccaaacactaggacacatgcaaacaaagttcacgacaaaagttttgggtgtggggtgagacacaaaaatatagtcctttgtgctttgcatactaggtgagctggctgaaaagtgagactatagccaagcaactaaaaagtttaaatttaaaagtagattcaccatacctttcaaacaccaagaatgcatagcccagactgaaatctatcaagaggatattaataggcttttttctacttaagtatttaactactaacacagtccttaacttcacactatgcatctgacatgactggtaatatgcattgtgatctttctgcttttcatctccagcaagaatttagccaaagactccttaaaggctactaaaactattgctgagggtttgaagttcccgaattgaagatagcgttaattctcttttatcaagcaggcacggctttgcaacttcagcacctctaagtttatagaccgatcaaatcagtacacatcatttaatcaaaacagttgagttccaagcaggtgtagctccctggagtttattagcagttaaaagctgccatataatcgtgtactactcacattaactctaatgtcttatatcttcaggtgtgatccagtccaacagtctgagtaaagaatcagagctacacacacacacacacacacacacacacacacacacaaagtcatttagagccatgattcaactggagtcatgttgttggtcactgttgtaggcaagatactctaatattctttatatagtagactctattcagtttatctagaactcttacgtagattaaccaatggagacatgctctctctgattattcccccctcatcagagagtgtggcttatctcattgtcttctcagttggttcttaagcacaggtctttaagagaaaaaatgccgtggggctcctgtgctggggagagttgtcttcatatgtttttaacttctccttttttagaatttgcttatgctctttaggacttgggcacttgtgaaacttgaaacaaatgattccttgagtcttctccagctatgtttcaaggcagaaaagaagacagacagagagcacagtccttggtaatgcggctacaggaatgccttccaattctaagacctcagggtcagcattgttttcttaaccatacattgagatgctcttggtacatacatacatggagctcatccattgttagcatcctctgcttcattggaagttggttctttttcatctttgctatttctttttattgtattgtatttatttacatttcaaattttatcccccttcccaatgaaccccctatccccttccccttccttcctgcttctatgagggagttctcccactcaacccccacccccactcccacctcaccaccctagcactcccctatgctgaggcatcatcgagcctccacagaaccaagggccttccctcccattgatgccagataaggtcatcttctgctacatatgcagctggagccatgggtcccaccatatgtactatttgattggtggtttagtctctgggaggttgggggtgtctgattggttgatattgttgttcttaatgtttcaaaataaccaggcaggtcatttctataccaggtgaagtcagcgtccatgtgttcttcccagtctgtgccagtgtttgctttcagacatgggttcttcagctgtctgagagagcttgtgtaaagtattgctgcaccagtagtctgccagctataaatctctattacatcaatccttgaatttatggtacccaaagtactccactgactaagaagttagaaggaaaatgtcaccataaatgcctatcacctgattaaatggtagagcttaacatttcagatcaaacccacttggagcactattttgtagacttgacattttatgacaagaatatgtgaaaatatggaagtcgcttttgtagatgtgttgatctttgggggtagctgaataattgttcgcacttttctatcggcttgtggctcccgacagtgggctgagtactcgctacacttttacagggagcagacacattgagccacctatactttaccactctgcttccaagagtaagttcaatgatctcaggattctggatccagaatgtattctgtgtcttcgaggcctagctgtattgggtgggcagataaccatctacaaagaagcatacccaattctctcctaaactttcatataggcatcctacaacttctgctattcttttggcacaacccagtttcttttaatgtttgtttttcttttccttgccttccagagttgctttaaagaccatcccctcacacatgtacataacttgtattgatcaaccactttttctcccaacatgcattagggtgcatttgcaatacaattgtgttctgtaatgttcatgtgtactctttcataaatgcatgaagacagatgtgagatgcaaaaaaacccagctaattcttaaagatataataataataattactattactattactattattattataaaatgcatattcccctaagtaagcaatagggttatatttaaaagaaaaatacttatgtccctccatcctgccaacacagtactggtttgtgaaaagtgctaactacaagttttgttgtatgtatgtatgttgtatgtatgtaggtatgttgtatgtatgtaggttgtatgtatgtatgttgtatgtatgttgttgtatgtatgtatgttgtatgtatggccatggagattcattatcatcttgtgttctctagggcaacacttaataaaaagttgatgtcagttaatacaagcatgattttaggtagagagctgatctctgtattcgcaaaagatattgacgttttagggcaatgagactagagaaataaaggatatgattaataaaggaagcggtcataaaatcatgtttgcatgtgatgtgatctatgtagcaaaaggcattaaagattttgaaaatctcttggaactgataatcacatttcatcaaagtagcaggatacaaagccaatatacaaaaccagtcacttgtggatattccaagagcaagcatgttgagaaagaaatatcacaatagcatcaaggaaagtaaaatacctaggaataaatttaatcaaggaagtaaatatggctaggcctatcacaccaatatctcagattcctggtagaaatttctgtcctagtttgctttcttcagtccttcccacaactcttccattgggtctctggactcagtctgatggttgtctgtgaatatctgcatctgtattggtcaggtgctagcagagcctctcaaaggatagccataccaggtgcctatctgcaagcaaatcttgccaccaacaatagtgtctaattgctctggctagaactttgagtactatattgaataaatagggagagacgaagcagccttgtcttgtctctgattttcgtgggattgctttaagtttctctccatttaatttgatgttggctgttggtttgttgtatattgattttattatgtttaggtatgtgtcttaaattccttatctttccaagactttcaacatgaaggggtgttgtattttgtcaaaggcttttccaacatctaatgaggtgatcatgtgatttttttttctttgagtttgtttatatagtgaattacattgatagatttccacatattgagccatccctgcatctctgggataaagcctacttgatcatggtgaatgatgattttatgtgttcttggattcagttttcgagaattttattaagtatttttgcatcagtattcataaatgagattagtctgaagtcccttattttatagggtgtttgtgttttaagtatcagtgtaactgtggcttcatggatcaaatacttgacacctagacccatagtgcctcacctgactgttaatgctgctacccatagtgtcaaattcctcctttatttatatatatttccagaaagagcaatgtgtatgggataacttgtctcccaggcttcaagaataagatattaacttacatgtattgactcgaaaatctacggcctccctcatttcaatggctgctttcctcattatttcatctaacagacctagaatattttactcaagactggatgatggaaaaatacataatgtcctgagaattcacttctggcattagttcctttttaaattatttatttcagcaaggtaatagcaccatttgtcagcctgctccattacctgcaggtcccatcattgtctcagaaagcacaccaactttctcccaggcatttgtcaccccatcctcaagtcctttttgtttcttggcgcagtgctaatatgtcatattaaaatcaactccaatcacaagtcatgcctaggaaacacctggtataaatgttaagtatgtcacactcttaagatgttacctgcttcggaatgtagctagaaactgtaccttaaggttttttcttcacttttcaatatttacgttctctctttaaagataatctttgttcaatgaagctctttaatgtgtccagccatatatatatatacatatatattgagagagagaaaggagagaggagagagagagaggagagagagagagaggagagagagaaaggagagagagaggagagagagagagagagagagagagagagagagagagagactgttctcccccccccccagatctcaaggtctagatgatctatatacaatatgtctgggatagatgactctacctcggcttaagctccctcataaaataatgctaaacttggtgtttattatggttttatcccaaaaatgtaacctttgaaaatcccagagaactcttgtcaccatcccctcctggaagatctagagatggacagctacattaattcttatttactacccagaccaagctggacaataaaaacggccagtgttaaaatgttttaacatttggtctgaaaatccacgtgtatgcccattttaaacaacagtcatcagaaaaattatacatctccatattttatgttaacaatgtgtgtggtagcttacatttctacgatacattcattatgatccattctacaaaaaagcacagaaaataaactgaagttacaaagtcctccctggaattgtctcatgggtggaatggaatcccttttcataaagggcttgatgatggctgagcttgcgaatgtttcctgttgccatttgggactgtactttggcttcatgtaaaacataaccagaacaacaaaagctttagggctctgattatatgttgatatccatgaagttatttattcagcagaatatttgacaaaatatactgagtatattatttgtagcacacattgttttgaaaactgtatttggttttgttttctcattcagggacctcctgggttacaaggactacagcagccttttggtggatatttcaataaggtatggctactttatttccacaacttgtgtgcatagagattttatgtcattacagttttaggaagaaagcattattaggtccttacatctcagtccttgagacaggatcacatatgctcaaagcatctttccatactgtacaccatgttttcaaacttacattttaaaagaatcctagacatattataaaataaatgcttatgctatagttttttgtaagtgatagttcaaagtttgatgataaagaagcaaaagaaataatttagtttggcttggtttggtttggttttttgatttgtttgtttggttggttggttggttggttggttggttggttggttggtttttttgagacagggtttactactgtgtggccctggctgtcctggaactcactctgtagaccaggctggtctcaaactcagaaatctcccttcctctgcctcccaagtgctaagattaaaggcatgcaccaccactgcctggcaagaaataatttgttatctgaagctctgagcagcaccccacctgatagattcctgaaaaccagtaaatgttgcagcaaggattcaagcacatgttcatataacacaaatcaagagcaagagtctccccagggacggagaggaggagcttgtaattaccttgttatcttctccatcatagcttgaataaaataataatagtactgccatggaactatcttagcagcaagagtagccttgattatacctacgaatggtgctggtaacgaatggtgctgcacaggactaggatataggggtgaactcattgggggttcattgttcaaaaacaacatgtggggtctgatcacaaagcaaaagccagtaccattttgtccttcattgcccaaaacaacagtaactggagttcttccaataccagccagtttatcattgataacttgtgccaaagaaaaagttagacactgaaggacactgaaaccctataggtggaacaacaatatgaactaaccagcccgcactgtagtacatctgcatacttcattgcccttgacaagtttaaggttatgaccttgttttgaaccttttcatttgtttagatttttaggggagtgctgttagcatggttacaatatgtttgtttcccgattccttatcaaataaatcaattgctactagcttttttaaaaacattataagctggcaagtttttaaaaggtaagtttgaagtgtatgtaaattgaatcagtgtaaggacatttgtaatgacatatactgttataaaataggacttataataaaagcctcaaaataatgagaataacttgaatctgatgtcacaagtcagctagaaatgtttaagtactatactatattactctgaccatcagtccaaaatggaccaagctggtacccagctacttaaatatctgctagcccttgcaaagctcgtaaggcttgtatttttacaggtctcccaacgctacttctagatacactttttcttaccaatgagtcagtttttccttaaatgaaaatatatggaacctttgtattttagactctgaagctgaaagcgttttagactttaaggttatacttgctgtaatgggaactgagctcagtagctgagtagggacttttgtgagttgcatcccagtacctttgacttatctattttttctcctgagaaaaatgccagttactgtcagcgctaccacagagccaagcttcacattcggtcacatgtgctctgaatgtggctttgtagccagaaggtaatagggtaaatggggggggggggggtctacagcttatttctcccctcaataatacaataggaccactttgactcagaagtgtttacctctacagtgactaatggaaggtagtgtacggaatagtttattctgtttcctcacgagactgggcaagcctcctacactgaagtcccatgatctataagaaaacccacaggcaggacccacactgaatgatatttttgcattgtggccctcccttcttcacaaatcaatgggctgaatgtgccctgataagcaagatgcagttttcacttggcgttctccctgccaacctcatctagttttgtatagtaaggttgttgcattttgcagtttgttgcatgcctgatggcccagctataacaaatgagcacagtgggggaggagctgagattaaataatgaaccatgtattgagacacataaagtgacactccaaggttaaaacaatcttcgcttttaaattggcattgatttatgtgatgcctgctccaagccgtggacctcagctcatcctctcgcagcagctccagcacttgcagagctcagattctgctgaggcagctacccatgggagggtgagtagcacgctcctcatacgtgccccctccctgctccaagctaagagcctggatagttcatccctcatcccagcactctgcgcttatattttggtcctcacacagaatggatctattctcctacacatcccctgcaccatcctgaaaagaaacaggggcataagaaagctctcccttcacagcaaaaatcagaaatagaagataaaaaaaaaaaaaaaaaaaaaaaaagcacaagagcgactcactggagagcaccgaagccagaacgatcacgtgtgctctcacatgaccacttgaggctgcaaagatttaaaagggaatatgtttccttctctatcatggaaataattttcaggcagctgctctcatcctgtttggttgtttgcagagtagcgtcaacaatcaacaccgagtacacttctcccctgaaggaaattctgcttcctacccagccaaaccgctctttattgtcttcagctcagggaagtttagttaaaatttaggctccatcaacttttaaagtctcgagctccctacatggatgtagtgttatctatggaaactgagtaccgaggggatatgtttttgaagatctacattgaaaatgcacagttatttcatcttgcacattaggctctgtctcagcttttagacagggatgtgatgcctctcagctactaattccagtgttcccttctccaaacagctgatccaaaacaaaagatagcaaaatgatgcattctccttccatatgtcaaagtatagcttcatgctggacaaactagaaggaacagccaactcttgtccaaaaagagacattcaaggtcttttcaaacacagaattatatccagtgaggatacagaaagcaatgtcaactggaggcaagctagagtcatcagagaggaagaagccttggttgtggaaatgcctctatgagatccaggtgtaagatatttttttcaattactgatcaatggggaaaggcctagcccactgttggtggtgccatccaagaattggtgatcctgagttatttttttttaaagcaggctgagaaagacatggtcatatgaaagtagtgatatcctcatgctgtaactagctatatgtgccaccatgttgtcaaattaagttcacaatctgaaatcttgctaatcatgtgactacatgtgaataagtgaaacaggttcacaattgcagtcctcaatgaataacttcattttccccatgcccaggatattagagcatatttctaaaagcatgaacttgagttggggtgctgactccatgttctagcagggagtttacgcccttggtttctttcgttaatttagccataggaaattgctgctgactgtttactgtttggaagctacaaacaagtggatggatggatagatagatagatagatagatagatagatagatagatagatagatagatgataaaggtacctccactgatttaactcatatatgtctactacagagtgttccaaccaaatatttctcttctaaacaatgagcacagccttgagttctcccactgcctaacaatggttccaaagttctccttggcatttcccatatgagaacaaaaggacactgctcacacccagaattcttcagctgagcaggcaaactcacaagccacagaccatgactgttaacactgtttctcagagacttctaatgagcataaacaaaaattattccactggtaaaattatttggaagacttccaagaacattcataatggcaccaaggacctaagtcccttcccccaatgacagtagtcacatgaagcagaattacatatctagaagccatgagacgtctgtcttgttatcctgtgagcctggctaattgtcttgttgccagtagcttgggtaaagaaggggagagaaccttacgtgtcaatgagtaacgctactgaagttcaggttcaaggcaggtgcattattaacacaagaatggagcactagggactccaaggaccacggactaactggatttcctggcctgactactgagtaaagacaagtatattgccttcctgactaggctgctgccctgagcagaccttgggcggaactcctttacttgtcccacaacactcagaggaagctccactcccaggtactctaacacacccaggtccacaggattccaggattccaggattccaggattccaggatcccaggatcccaggaccccaggtgcttggtcataccaggatctcaaggtctcagaggcaacttgtctcccaggagctctgacacacccaggatctcagaatcacaggatcccagaatcataggatcacagagacagctgaattctgaggagtactgacacaaccaggatcacagggaggacaggctccagttagatatattgaaggcaggtaaccagatggtgggtggcaagcataagaacataagtaacagaaaccaaggttacttggtgtcatcagaacccaattctcccaccatagcaagtcctggataacccaacacaccagaaaagcaagattcagatctaaaatcacttcttatgatggtgatagaggacttttagaagggcataaataactcccttaaagacatacaggagaacacaggtaaacagctagaagcccttaaagaggaaatacaaaaatcccttaaataattacaggaaaacacaatcaaacaggcaaaggaaataaacaaaaccaaccaagatctaaaaatggaaatagaaacaataaagaaatcacaaagggagacaaccctggagttagaaaacctagggaaaaaaatcaggaaccatagatgtgagcatcagcagcagaatacaagagatagaagacagaatctcagaggcagaatataccatagaaaacattgacacaacaatcaaagaaaatgcaaaatgcaaaaagcttctaacccaaaacatccaggaaatccaggacacaatgagaagatcaaacttaaggataataggtatagaggagagcaaagattcccaactcaaagggccagtaaatatcttcaacaaaagtatagaagaaaacttccctaacctaaagaaagagatacccctgaacatgcaagaagcctacagaactccaaatagactggaccagaaaagaaattcctcctgccatatgataatcaaaacaccaaatgcacaaaacaaagaaagaatactaaaggcagtaaggaaaaaaggtcaagaaacatacaaaggcagacctatcagaattataccagacttcttaccagagactataaaaacttgaagatcctgggcagatgttatatagactctaagaacacaaatgccagtttaggctactatacccagcaaaactctcaattaccataggcagagaaaacaagatattccatgacaaaaccaagtgtatacaatatctttccataaatccagccctacaaagaataatagatggaaaataccaacacaaggagggaaactataccctagaataagcaagaaattaatctttcaataaaaccaaaagaagatagccacacaaacataattccacctttaacaacaacaagaaataacaggaagcaacaatcacttttccttaacatctcttaacatcaatggactcaattcccaaaaagacatagactaacagactgaatacataaacaggacccagcattttgctgcatacaggaaatgcacttcagtgacaaagacagacactacctcagagtaaagagctggaaaacaattttccaagcaaatggtctcaagaaacaagctggagtaaccattctaatattgaataaaatcaactctcaaccaaaagttatcaaaaaatgataaggaatgatacttcatattggtcaaaggaaaaatctaggaagatgaattctcaattctgaacatctatgttccaaatgcaaagacacccatattcataaaagaaactttgctaaagttcaaagcatacattgcacctcacacaataatagtgggaaacttcaacaccccactctcagcaatggacagatcatagaaacacaaactaaacaaagacacagtgaaactaacagaagttattaaccaaatggttctaacagatatttatagaacatttcaccctaaagcaaaagaatatatgttcctctcagcacctcacagtaccttctccaaaactgaccatataattggtcacaaaacaggcctcaacaaatacaagaagactgaaataatcccatgcaacctatcagatcaccatggactaaggctggtcttaacaacaaaaacaacagaaagcacacatacactcataagctgaacaacattctacttaataataacttggttaaggaagaaataaagaaagaaattaaaggcttttagagtttaatgaaaaaatgaagacacatcataccaaagtttacgggacacaatgaaagcagtagtaacagaaaaactcatagctctgagtgcctccaaacagaaactagagagagcatacactagcagcttgacagcacacctagaagctctagaacaaaaagaagcaaatatactcaagaagagtagatggcaagaaagaacaaataggaaaacacagaactatacaaagaatcaacaagatagataaatccttagccagactaaccagagggcccagagacagtatacaaattaataaaatcaggtggcgcacgcctttaatcccagcacttgggaggcagaggcaggtggatctctgagttcgaggccagcctggtctacaaagtgagttcaaggacagccagggctatacagagaaaccctgtctcaaaaaaccaaaaccaaaacaaaacaaaaaaaagggagacataacaatgaaatatatcttaaaataactattctatttgttgaatatcaacaggtgaaaatattaaaatcatgttctgcaaacatcatggacattttattgataatctgtctcactgtgcttgaaattagcattttctttttttgtgtgtgtgtgtcaaaattcttttattttttttccaatgctataccaaaagtcccccatacccacccacccccactcccctacccacccactccccctttttggccatggtgttcccctgtactggggcatataaagtttgcgtgtccaatgggcctctctttacagtgatggccgactaggccatcttttgatatatatgcagctagagtcaagagctccggggtactggttagttcataatgttgttccacctatagggttgcagatccctttagctccttgggttctttctctagctcctccattgggagccctgtgatccatccattagctgactgtgatcatccacttctgtgtttgctaggccccggcatagtctcacaagagacagctacatctgggtcctttcgataaaatcttgctagtatatgcaatggtgtcagcgtttggatgctgattatggggtggatccctggatatggcagcctctacatggtccatcctttcatctcagctccaaactttgtctttgtaactccttccatgggtgttttgttcccaattataaggaggggcatagagtccacacttcagtcttcattcttcttgagtttcatgtgtttagcaaattgtatcttatattcttgggtatcctaggtttggggctaatatccacttatcagtgagtacatattgtgtgagttcctttgtgaatgtgttacctcactcagggatgatgccctccaggtccatccatttggctaggaatttcataaattcattctttttaatagctgagtagtactccattgtgtagatgtaccacattttctgtatccattcctctgttgaggggcatctgggttctttccagcttctggctattataaataaggctgctatgaacagagtgtagcatgtgtccttcttaccagttgggccatcttctggatatatgcccaggagaggtattgctggatcctccggtagtactatgtccaattttctgaggaaccgccagacagatttccagagtggttgtacaagcctgcaatcccaccaacaatggaggagtgttcctctttctccacatcctcgccagcatctactgtcacctgaatttttgatcttagccattctgactggtgtgaggtggaatctcagggttgttttgatttgcatttccctgatgattaaggatgttgaacattttttcaggtgcttctctgccattcagcattcctcaggtgagaattctttgttcagttctgagccccattttttaatggggttatttgattttctgaagtccaccttcttgagttctttatatatgttggatattagtcccctatctgatttaggataggtaaagatcctttcccaatctgttggtggtctttttgtcttattgacggtgtcttttgccttacagaaactttggagtttcattaggtcccatttgtcaattctcgatcttacagcacaagccattgctgttctgtccaggaatttttcccctgttcccatatcttcaaggcttttccccactttctcctctataagtttcagtgtctctggttttatgtgaagttccttgatccacttagatttgaccttagtacaaggagataagtatggatcattcgcattcttctacatgataacaaccagttgtgccagcaccaattgttgaaaatgctgtctttcttccactggatggttttagctcccttgtcgaagatcaagtgaccatagttgtgtgggttcatttctaggtcttcaattctattccattggtctacttgtctgtctctataccagtaccatgcagtttttatcacaattgctctgtagtaaagctttaggtcaggcatggtgattccaccagaagttcttttatccttgagaagactttttgctatcctaggtttttttgttattccagatgaattcgcaaattgctccttctaattcgttgaagaattgagttggaattttgatggggattgcattgaatctgtagattgcttttggcaagatagccatttttacaatgttgatcctgccaatgcatgaacatgggagatctttccatcttctgagatcttctttaatttctttcttcagagatttgaagtttttatcatacagatctttcacttccttagttagagtcacgccaagatattttatattatttgtgactattgagaagggtgttgtttccctaatttctttctcagcctgtttattctttgtatagagaaaggccattgacttgtttgagttaattttatatccagctacttcaccgaagctgtttatcaggtttaggagttctctgttggaatttttagggtcacttatatatactatcatatcatctgcaaaaagtgatattttgacttcctcttttccaatttgtatccccttgatctccttttgttgtcgaattgctctggctaatacttcaagtactatgttgaaaaggtagggagaaagtgggcagccttgtctagtccctgattttagtgggattgcttccagcttctctccatttactttgatgttggctactggtttgctgtagattgcttttatcatgtttaggtatgggccttgagttcctgatctttccaaaatttttatcatgaatgggtgttggatcttgtcaaatgctttttctgcatctaacgagatgatcatgtggtttttgtctttgagtttgtttatataatggattacattgatggattttcgtatattaaaccatccctgcatccctggaataaaacctacttggtcaggatggatgattgctttaatgtgttcttggattcggttagcgagaattttattgaggatttctgcatcgatattcataagggaaattggtctgaagttctctatctttgttgggtctttctgtggtttaggtatcagagtaatagtggcttcataaaatgagttgggtagagtactttctacttctattttgtgaaatagtttgtgcagaactggaattagatcttctttgaaggtctgatagaactctgcactaaacccgtctggtcctgggcttttttttggctgggagactattaataactgcttctatttctttaggtgatatgggactgtttagatggtcaacttgatcctgattcaactttggtacctggtatctgtccagaaatgtgtccatttcgtccaggttttccagttttgttgagtatagccttttgtagaaggatctgatggtgttttggatttcttcaggatctattgttatgtctcccttttcatttctgattttgttaattaggattttgtccctgtgccctttagtgagtctagctaagggttaatctatcttgttgattttctcaaagaaccaactccctcgtttggttaattcctttgaatagttcttcttgtttccacttggttgatttcacccctgagtttgattatttcctgccgtctactcctcttgggtgaatttgcttcctttttttctagagcttttagatgtcttgtcaagctgctagtatgtgctctctcccgtttcttcttggaggcactcagagctatgagtttccctcttagaaatgctttcattgtgtcccataggtttgggtactttgtggcttcattttcattaaactctaaaaagtctttaatttctttctttattccttccttgaccaaggtatcattgagaagagtgttattcagtttccacgtgaatgttggctttccattatttatgttgttattgaagatcagtcttagtccatggtggtctgataggatacatgggacaatttcaatatttttgtatctgttgaggcctgttttgtgaccaattatatggtcaattttggagaaggtaccatgaggtgctgagaagaaggtatatccttttgttttaggataaaatgttctgtagatgtctgtcaggtccatttgtttcataacttctgttagtttcactgtgtccctgtttagtttctgtttccatgatctgtccattgatgaaagtggtgtatttaagtctcccactattattgtgtgaggtgcaatgtgtgctttgagctttactaaagtgtctttaatgaatgtggctgcccttgcatttggagcgtagatattcagaattgagagttcctcttggaggattttacctttgacgagtatgaagtgtccctccttgtcttttttgataactttgggttggaagtcgattttatccgatattagaatggctactccagcttgtttcttcagaccatttgcttggaaaattgttttccagcctttcactctgaggtagtgtctgtcttttcccctgagatgggtttcctgtaagcagcagaatgttgggtcctgtttgtgtagccagtctgttagtctatgtctttttattggggaattgagtccattgatattaagatatattaaggaaaagtaattgttgcttccttttatttttgttgttagagttggcattctgttcttgtggctgtcttctttttggtttgttgagtgattactttcttgcttgttctagggcgtgatttctgtccttgtattgcttcttttctgttattatcctttgaagggctggattcctggaaagatattgtgtgaatttggttttgtcgtggaatactttggtttctccatctatggtaattgagagtttggctgagtatagtagcctgggctggcatttgtgttctcttagtgtctgtataacatctgtccaggctcttctggctttcatagtctctggtgaaaagtctggtgtaattctgataggccttcctttatatgttacttgacctttctcccttactgcttttaatattctatctttatttagtgcattgaaattagcattttcttaatgtttaacttcaaagagtttttgctattttgaaagttttaaaatatatttactgataaaataatttctctccaaaaaatacaaaaaacaaaaaacaagtatatcatgttctgacagctgtgttggttttctggactaaagtcatcagaaaaatcaagatttggaaataccattagacttgaagatacagaggaattgctatacccaagctacctcagctatggtgccctggaggtcgctggcatacattagcatataccctcaccagagacatggcatgctcttctgctttatggtccaagcaactggagtttcaaaatataaagattccatataaaaacataatgtcttatataaatgcacattccagcttccctaaaactacccaagaaaggtccagctagggggacatgttgatgttctaaggcacagtgactggcaccacgtcaaaatgacaagtgccatcaggaaacctctgaagtttgtttctgggtattaagaaggctaaactggatggccaactgaatatcaggcattttaaaaaattataaaagcaggaatggtggcctgtgcctgtaatcccagcaatagtgaggttaaaaaccagagaatcggttgcttgaggtcaggcatggctaaataataagtttaataccacgctgtcacaggagacccctgcctcaaaaaataaaaataaaaataaaaataaaggaaaggggaaaataaatgggagaataaaacaattccagatagaaagggaagcctagacaagatagacaagtgggataagtgctgatttcctatcctgacttttttcaattgtaacataaaattattactcacaaaatcctttcagaaatatattgttactcccccatcttttcctctcaattgtatgtgtgtgtgttttcattttatcttttaatttgttgttatgaattgcttctagaattaaatacacaagtctaaatgtgaggtaggaagagacatgacaagcatagaaactcatatttgtttaaacaatgcctagactttggggttagacaagaatacctgggagcgagcactgagtcgcttgaggagaaggcctgaaccaagtcttaagaaagaccaaccttctacagttaaatggggagaggagaaagaagcctgagacagagacagatgcagaaacagacgagtgagcccagcgagaggccagggcaactcaggtgccactcaaaccgcattaaatccaggaccacaggtattcttcaaaacacaagagcttaaatttctgtgccatggaacagaagaaccaccagcagcccacacagtgacacatatacagggactcaactttggagaagtcctggtcccattcagatgacctactatgcatgtagttttccagtacgtgagttcttccacggagatgggggcagttggaactggtcagtgttcacgtcccggaggttagcacgagccacgagcacatgctgttctgaggtgtcaggttgatttcaggttcccagaagcttaggggagtaaggatttattttctggaccaatcttatagaaattccctgatgagaatctgccattctcttcccgtctttaataatggtctctcagcacacagaggattcagcagatgaagtgcttcctagccatttgtatttgctttctccgcgtgaaggcaggcacagtcaccagcccagggtgggcagagtcaaattaaggaaatgaatatttcagagtagaaagaacaggggactcggaatgcgcctgaagctggcagatacgcatatggagaaggaagtcttggagctgtggtgtttctcctggagagatcaccagcagacagacagacagacagacagacagacaggatcttcaacattggagaaatttaacagagttaaatattaattacattaacaggaataaaatgagaaacacaaaaacgtctgccaagtcgccaaatattgttaaagtactaacatttgactagcaatttttcaagacagaacacattaaaaacaattggactttttgttgtcattttttacccagggaactggtgagcacggagctagtggccccaaaggagaaaaggtaatcctgtgttgttgttgttgttgttgttgttgttgatgatgatgatgatgatgatgatgatcaaagggattaagcactttcacctataggggcagcagtcccagtgagcaggaactttacctgcctgctgaccagcagctggatgctgccccttgggggcgctactgagcagaggcgggctacaagagaagggatgtgtcaagagaaacatccttaataatgatccagaaaggagaaagatttatacgatttgaaggaaaaccatagtacaaaggaagggtcaggatcccacaagaaaacccacagaaggaactaacccgggctcataaggactcacagagactgaaccaccaatcagagagcttgcctgggcctgacctaggcctattgcacctacgttacagttgtgtagtgtgggtttcttgtggaactcctaacaatgggagcacaagctgtgtctctgatgcctgcctttgggaccctgtcggcctgctgggttgtcctgtccagctttaaaaggagagcaggtgcctagtcttacttcaatttgatatgctgaggttggttgatatccacaggaggtcacagatactgagggggagtgaatgggagtgggggaacagagaactgcagccaggctgttaaaaatttttaattaggaaggaaggaaggaaggaaggaaggaaggaaggaaggaaggaaggaaggaagtcagaaatccttgcaggtagcaaaaaccataggaagaaagagccaatcggcaaaatgcttgtgggtcaagctcactagttaactgttcttaaagcaaaggaggctgtcgtgggagtacttcgttttgttttggtgaggttttaccatgcacagtagtagtctagccaagcagttatttcaaaacgagttttcaagataaaacaccaatatacttctgttacattttccttgtcctcggttggaagtcctgctttattagctataaaagaatggcaggttaacttctctatagaaaataccactttattctagttggattgtaaaaccgtgatgaccttggactgtgaatgtggcacggtcagaggaaaaatttaaaagtaaagaaaaatgcacattaaatctacagacaaggatatgaaggtctggaaatacttttaaaaggcagatggcctgtgagagctaccttccttctttcacccagtaaaagttctcttgattgagggcatgatacttttcgacacaagtgcaagaaatatgacttctgtgctttataaatcagcacagccaacctattcaaaagattgtgtatctctcaccaggaaaaatcgctaaaagatcatctcagcaggaacagtgagttccttatagactagtcattcaagaagaaaattctctgggatacataaataaaaccccgacattctgaaaaaaaacaatttaaaaatgattctttagcaatccaagtcactcccgggtcttggattttgaacaaagctatttcctctgaagcagcaccttatagaatcatatcccaacctcacaaatggattgcattttaagtatttgctatttgacatatgcagactcgggacgcagggacactaagcttgtcacacaggacagctgagtggagaaggtgggggtgtgatactcttaaagcatttaaatgatgagtcacttcttggaacaaaacagctggcttctgtgttgccctcttcattagcaaacatatgtcatttagaaatgcttaagaccttgctgatgagaaatttgatgctgtaaaacaggtgtatctcaaactccagggaccattcttactgcttggaatctttttaattgcttcagaatgttaagtggagttagaaaaaaaaaaaaaccgagagactatctgttccatcttcctacccacataaatgatttgtctagaagagtctgtagggaacttgatgctgtgagtgctatgtacctatgaaagcatttttacaaattatcattaatgaaggaacagctctgccagtaagccatgtatcgagtcacagaaagcctgagtgtagcaactgcttgaagaaagtccacgcatctacttcctgtctgttctcgatcaatctcctggctttttagacctgtgtctttcacagttggtggatctctgcttatgcttgtgatatgatcaggggttccaaaccctgcctgtacacaaaagcaccaggacagggcactggaaagcctgttcctgagccccatgcgcaggggctccgaggagagggaaaccagtatctgtctcttaaatacatggacatttggttgaggctgggagccactgtgggcttgaatgagcattagctttgggatcacaagctggctatggtataaactgtgccgttaccttggaagccatctccttaccctaagtatcaggttcccaggatgtaaagcagacataatcatctacaggaagaatgatgggaggattaaaggctaacgagatgaattttcctggaagcccaatgctcagtgcaaattagactgtcaataaacactggtttttcttatttgctctccaccttctgctcgggagcgctcatttagctctttccgaatgagccatttccatccttcctgcctagcctggttcttctttgccttcctcccaataattctgaagggaggagactcgagttggaaagtagaaaaaaagatttaactaacaatattctttaaatccttcattttgaatagatgcgtatttataggtaatttctagccccttcacttgctttctgtttctgctatattagatgagtattcttgttagggctattattccttaatgtctgtatagtgggatcatatcacaaacctgacaaatgacatgaaactcactttagagttttacaaaccaactatgcatgggtgcctaaagtggtcactgtcttctctaccttccaacgttttacagaatttactatcttaaaaaaaaaaaaaaaaaaaaaaaaaacaccagcttcaatgtactaaagtacagatagagatatacaaagatgtattttgctcggatcaaaccatatgccagggctctcagaagatggttcagaagctaagagcacttattctccttactaaggatttggggttagtttccagcacccataagaagcagctcataactgcctgtaactctaactccaaagcatatcacatcctcttctggcttttttgggtacctgcacatgtggcactcatacagacaagcaggtgtgcacacacaaagtaaaaaaatatttaaggaaatatagctagcacactttaaatttcatgtccattacctcaaagaacttattagttcttaagcttaaaattcaaagggacccagagaaaaggctaggaattaagaaagatatatacctgtagatacaacagaaagatatatacctgtagatacaacattaagtattgttttacaaaattcacctcgggctggaagaaaaatgttcagaactacctgtggtctagtttaacttaagtctagtttacctgtttaacttaagaatcaagtgactgtcactctggaagtcagtctggaggttcctcagatttggacataatactaccggaagatccagcaatatcactcctgggcatatacccagaagaagttctaactggtaataagaacatatgctccactatgttcatagcagccttatttataatagccagaagctggaaagaacccagatgtccctcaacagaagaatggatacagaaaatgtggtacatttttacacaatggcgtactactcagctattaaaaacaatggatttatgagattcttggacaaatggatgtatctggaggataccatccttagtgaggtaacccaatcacaaaagaagtcattagatatgcactcactgataagtgaatattagcccagagacaaagaacacccaagatacaatttgcaaaacacaagaaaatcaagaagagggaagaccaacgtgtgggtacttcattcctccttagaatagggaacaaaatacccatggaaggggttacagagacaaagtttggaactaagatgaaaggatggactatccagagactaccccacccggggatccatcccataatcagccaccaaacccagacactattgcatatgccaaaaagattttgctgaagggaccctgttatagctgtcacctgtgaggctttgccagtgcctggcaaatacagaagtggatgctcacagtcatctataagatggaacacagggcccccaatggagaagctaaagaaagcacccaaggagctgaagggatctgcaaccctataggtggaacaacaatatgaactacccagtacccccagagcttatatctctagctgcatatgtagcagaaggtggcctagtcagctatcactgggaagagaggccccttggtattgcaaactttatatgccccagcacaggggaacgccagggccaagaagtgggagtgggtgggtaggggagcagggtggaggggaaggtatagggaactttcaggatagcatttgaaatgtatatttaaaaatatctaataagaaagaaagaaagaaagaaagaaagaaagaaagaaagaaagaaagaaagaaagaaagaaagaaagaaagaaagaaagaaagaaagaaagagaaaggaaggaaggaaggaaggaaggaaggaaggaaggaaggaaggaaggaaggaaggaaggaaggaaggaagaaagaatcaagtggttgttgggaatgctgataaatactttaaaaaaataaatccagtgcttcagctctgatgtctggtcacgatgtcactcctgcctacaagaaagccctctccaactgtattttctgaaaatgcctttctatgtcacatacaaatccctcttcaacgttttgaccagcacatcttagacatttccaaactgctgctgtcaccaagtcagcaagaatgtcatctttgtctacagccttcatctacgcctcaagagaaacactgcagacagctggcagattcatttctctctctataatcactgactacacacacacacacacacacacctaaaataagaaagaagtcctcagaagagaacaagagcagactgtcgtgtcatttaaaggcaaaaataaagaaataatgattttgggtccaccagaacaaaactataattcttttctcctctgtgtgtcctgtccttgaaaagtgattaacattgttccacattaattttaaatgtcctaatgaaatgttatgggtttctagaaggcctcaggcatggaggagagcaaagacaccttattaggaagacagcctggctagattcagatcttcacgaggccctgaccccggtgggattctgtaggataagggacatttctctacacttcagcacttctgcttttccttggcagggcgatactgggctgcctggatttccagggtctgttggccctaaaggacacaaaggagaacctgtaagtattttagctttagggaagaggaagaaataaaaaaataaatgaaaaattaaaaatattttcccaaactaaccccaacttcatggtgttttaaatctaaaactgtaaacagcattgaaatggcaagtacacaccatgccaggcaccagaccctctctatcttaattcacttaactcatataaaaagtccccatgaggtggcccattccgtacacaggtttggctggttccagattccgggctctaaaatgattaagttgcctggatatgactaaataccagatctaaaatgaaaaacacaatcaatatatcaagactggtacaaatttatctttaaaattgaaaatgcttcaatctctctctctctctctctctctctctctctctctctctctcctcaaacaactgttctcagtacatctctgaaattattttcctctctgttttctgtgagatcgaagtgagatcacaagctaacttccaatattgctgtggctggtttcttggaaaacttctctttgggaggaaaggaaaaaaaaaagaaaaacaaacaaaaacccttccacatcatttatattcaaatagaactgctgaagagtttgcaaacgtgtggtgtgtgtgtgtgtgtgtgtgtgtgtgtgtgtggtgtgtggtgtgtgtggtgtgtggtgtgtgtggtgtgtgtgtgtgtggtgtgtgtgtgtgtggtgtgtgtgtgtgtggtgtgtggtgtgtgtggtgtgtggtgtgtgtgtggtgtgtgtgtgtgtgtgtgtgtgtgtgtggtgtgtgtgtggtgtgtgtgtgtgtgtgtgtgtgtggtgtgtgtgtgtgtgtggtgtgtggtgtgtgtggtgtgtggtgtgtgtggtgtgtgtgtgtgtgtgtggtgtgtgtgtgtggtgtgtgtgtgnnnnnnnnnnnnnnnnnnnnnnnnnnnnnnnnnnnnnnnnnnnnnnnnnnnnnnnnnnnnnnnnnnnnnnnnnnnnnnnnnnnnnnnnnnnnnnnnnnnnnnnnnnnnnnnnnnnnnnnnnnnnnnnnnnnnnnnnnnnnnnnnnnnnnnnnnnnnnnnnnnnnnnnnnnnnnnnnnnnnnnnnnnnnnnnnnnnnnnnnnnnnnnnnnnnnnnnnnnnnnnnnnnnnnnnnnnnnnnnnnnnnnnnnnnnnnnnnnnnnnnnnnnnnnnnnnnnnnnnnnnnnnnnnnnnnnnnnnnnnnnnnnnnnnnnnnnnnnnnnnnnnnnnnnnnnnnnnnnnnnnnnnnnnnnnnnnnnnnnnnnnnnnnnnnnnnnnnnnnnnnnnnnnnnnnnnnnnnnnnnnnnnnnnnnnnnnnnnnnnnnnnnnnnnnnnnnnnnnnnnnnnnnnnnnnnnnnnnnnnnnnnnnnnnnnnnnnnnnnnnnnnnnnnnnnnnnnnnnnnnnnnnnnnnnnnnnnnnnnnnnnnnnnnnnnnnnnnnnnnnnnnnnnnnnnnnnnnnnnnnnnnnnnnnnnnnnnnnnnnnnnnnnnnnnnnnnnnnnnnnnnnnnnnnnnnnnnnnnnnnnnnnnnnnnnnnnnnnnnnnnnnnnnnnnnnnnnnnnnnnnnnnnnnnnnnnnnnnnnnnnnnnnnnnnnnnnnnnnnnnnnnnnnnnnnnnnnnnnnnnnnnnnnnnnnnnnnnnnnnnnnnnnnnnnnnnnnnnnnnnnnnnnnnnnnnnnnnnnnnnnnnnnnnnnnnnnnnnnnnnnnnnnnnnnnnnnnnnnnnnnnnnnnnnnnnnnnnnnnnnnnnnnnnnnnnnnnnnnnnnnnnnnnnnnnnnnnnnnnnnnnnnnnnnnnnnnnnnnnnnnnnnnnnnnnnnnnnnnnnnnnnnnnnnnnnnnnnnnnnnnnnnnnnnnnnnnnnnnnnnnnnnnnnnnnnnnnnnnnnnnnnnnnnnnnnnnnnnnnnnnnnnnnnnnnnnnnnnnnnnnnnnnnnnnnnnnnnnnnnnnnnnnnnnnnnnnnnnnnnnnnnnnnnnnnnnnnnnnnnnnnnnnnnnnnnnnnnnnnnnnnnnnnnnnnnnnnnnnnnnnnnnnnnnnnnnnnnnnnnnnnnnnnnnnnnnnnnnnnnnnnnnnnnnnnnnnnnnnnnnnnnnnnnnnnnnnnnnnnnnnnnnnnnnnnnnnnnnnnnnnnnnnnnnnnnnnnnnnnnnnnnnnnnnnnnnnnnnnnnnnnnnnnnnnnnnnnnnnnnnnnnnnnnnnnnnnnnnnnnnnnnnnnnnnnnnnnnnnnnnnnnnnnnnnnnnnnnnnnnnnnnnnnnnnnnnnnnnnnnnnnnnnnnnnnnnnnnnnnnnnnnnnnnnnnnnnnnnnnnnnnnnnnnnnnnnnnnnnnnnnnnnnnnnnnnnnnnncttgaacctggagctcaacaattctgcaagcctatctagtcagcaaccaataggaatcctgctgtctctacctccctagccctgggatggcaaacaagcattgccctgccctgctttgacgtaagttctgtgaatgaaactcattcttcatccttaagcaaaaaaacaaaaaaacaaaaaaaccaaccaaccaaccaaccaaccaaaaaaccagaattagcatgtgtctagccatttttatgaaatgcagcacaccttttaaaattgctttcacctgtattccagagtgagttggggatatgggtttactggggatgagggatggagaggtcagtaaaatgctgtagtggcaaacaggaaagcaacaggaaaaacattccgtgctaccaagctgaactccactgctgcttcggcttcacttagaccccttctttgatagtgatcgtctctgtcagctttaaaatctccagcacgcccatggacaccataattgaccgtctggtccctttatcctcagtgtctggtccaggcctaccgaagagcctttactagtgtcgtccagctgaggatttcaaagggtctgggaactattctgggcttcttcctgctgctcacccgctcccatgagccactcacaccatgtcctaacccctcctcggggtctccactctctcctagcccaatgatacccacctcgattttaactttgcaccatgggagatgtgacaagtaggacacagagcagaaaaggactttcttccactcctgctgtactctaaacaagcgtgcagcctcgaagccgagagttctaactcgagttccgggtggcgcctagaagcctgtgtttcccacatgtgacattggtgttgctctagcatcactgcgggttggagtagtacatcctttctaggcacgagagacctttctctctttaacgcattccctctggctttcgttcatgccttcagtgttcgtggggagcctggctacccatttgggccaatctgagccttggcctttttattcagcagaaataacttcttgggctggagggatgggtcagtggttcaaagcactggctgctcttccaaaggacccaggttcaattcccagcacccagacagtggtttaaaaccatctgtaactccagctctaggggatctgatgtcatatcatgatcaccatgggccccacacacacatgtggtgcagacacacatacaggcaaaaaccacaattcccaaaatttaatagataagggaaagtggaactctaaaacctaaaatggctaccccaggtagtcctcaggaaagatgagattaaatagcaagcctgtgcttaaccggcatcctacaactcgacgtaggtttttgaggcagacctgttattccgagctaatctagggatccggctgcaggagcacaagtttgaatagcttcggatacagactgagttcaggtccaaacttggcaacttaattaaatcttatctcaaagctaaaagacaaaatgtgaggcctgacatacagctctatgttaaagcattgccctgtattaattcccaaggagcaggaattgaacgttgatttcgggcacaccgtgactctttcaagaccgctaagacataagagcaagcagaggcagaagcaacgcagcccactgcgagtgcctcaaatcttaacagttagtcatgtgcagaatcctagaacaaaaatctgaaaagataaggccctggtctaacatgtaaaaatacatccataataaaagatgagattctgttaggtagataacagcttgtacactcgcaccgagtaacagatatgtggctgagcccaggtaagttagccctcactcacactataggggaagcgcagttcactaggaagaggtgggtgttcaaatccctacacactcagtcaccaagctgatttggatcacatagctttatccttgggtacacacaacctctgtcaccactgaaaaggaagtgagactgaagaatagtgagggaggcctctcactgtctctcacttgccagcaactcctgtcatctctaattacaggtcactgctagagttaggtactcgatcgagtaaaattacaaaacagctagagaatgtatgagaaggtgaccctacatgcctagcatatagaacatgagaatctcaaagacaggctttcaataaacactccctactcccacccccaaatgaggtatccaagaaaatagcagtcccatgatgattcttacatttctcttgatttccatacatgaaagaactctttaaagtgcatagtttccttcttattggccattcactcaattcaaataataaataaatctgattttaaaatcaaagcaggcagatagaaacaaagaaaaccttaaaatcaggctgcccaagttttatataaaacattctacttttctgtgcctcagtttcctcaaatgtatgtggctatactaagagcaaattcccactgacacctgaggctaactacagtgtgtgtgcctgtctgtgcatgtgtctgtgtgtacatgtttctgtgtggacatgcatgtgcacgtgggtgtgcattgtgcatgtgtgcatttgtgaatgtgtgtgtgtgtgtgtgtgcatgtgtgtgtgtctgtgtgtgcatgtgtgcatgtgtttgtgtaagacgtgaaggttgctaacatagtgactgacatcaaggagagtactggtcagcagagcttatacctcaaatctatctttccagtgaaccccaactccaagagcaaccaacacagttccagtgctgtttatccagtaactaacccctttgtgtcattttgattagtatacaatggacactttaatgagcatccttaaaataatgcttttgtgtgttcaccgaggtgggaaactcgagtgcattcctgccatttgagggctacccccacccatttccctccactttccgatgagtgtatccatcttcatttcacaatcagaagttttagccctgggcagcatttcaatttgactgctgttgggagcctcagcataggtttaaaatgcttagctccatgctcatttgggaccatgaaggaatctgtaaattaattctcacttgcccctgtctgagttgatttctaagtgtttataattgattctgttttctgcccatttttctagggggagcctttaacaaaaggtgaaaagggagatagagtaagtaggtgtttatcactgtcttgggttttctattttattgatttctctctccattttgttgtctggcgcctaatacctttgataaagtaagttttctgaaaattgtactttcttctgttttttttttaactcttatttttaatccttgataagtgctaccatgtgataacatttgaacatctgatttgggttttactggctttcttttgtacttgtatttgcattttacatttgttggggggtagccgtatgtgtatgccacattgagtacttgccttgatatgtctgtgatggtcagaggacaatttgtgggagcctgttctctccttctgccttgtgggccctgaggattcaattcaggtcttcaggatcagcaacaatggcttttactctcttgagtcatcttgccagctctattctggttttctttagcctatgttattcctgagattgcatggggtggggtgaggattccacttttttggtccaaatttgaagcaagcgttattaaatattaaatactaaccaagagatgaactttgatcataatcactccctggaattttgcagctgagtggctcctgggttttcatggacagaactcataggctaccatgccttcccatgaggctttgctattttccaagaattacaactcccagtattctaggaagttacgtggtccttgggcaggtggggcttacaggctaattttgggtactacacctactgctattagtgactagacttcaatgtcataaaagtcatcaagtaagaatatgcaaactaagcactcctttaatcccagcactcaggattaaaggatttctgagttcgaggccaacctggtctacagagtgagttccaggaaagccagggctacacagagtaaccctgtctcaaaaaaccaaaccaaaaaaaaaaaaaaaaaaggaaggaagaagaaagaaagaaaaaaaggaaaggaaaggaaaggaaaggaaaggaaaggaaaggaaaggaaaggaaagaaaagaaaagaaaagaaaagaaaagaaaagaaaagaaaagaaaagaaaagaaaagaaaagaaaagaaaggaaaggaaaggaaaagaagaggaaaggaaaggaaaggaaaggaaaggaaaggaaaggaaaggaaaggaaaggaaaggaaaggaaaggaaaggaaagtctatgcaaactgtaaaacaggcaatgcagactttcagaaaaattgttaaagacacaaattggattttcaagtaagccatggaaaataagaaaatatcttttactaagcacctgggaatagaatcaccagtgcacatctctttattcttctttattctattataatagacatattataatatattgtagaaatatacatgtattatacaatatattttatgtatatgcatatgtgtatatgcatatattatatgcatacatatacatatataaaatgcatattatatatgcatatatgcatatgtatgtgtatattataggtgtgttatataacatatactgcataatgtatatgttataaaagatataatgaatatttatattaagttttatgaaaattatatatatatatcagcctattctatcctgactcatatctgaggttggtgatcagctggtggtgaatgagtcattgctgatgtgtcatgatatcacatgaagaaataaactgaggtgctctgtcacttattagcaataaggattctgaatgttttagggtgagcattgtttgattgcatggtttccataatgtacccctttgttatgtgttaactgatagaaagtcaattaaagtatcaagatgtcccactccatctggactcaggttgaaccatatggtgattgttttatttacagggagaacccggcctattaggaccacagggaataaaggtagtctggcatttttttttctcagtcacagttgctaccttaacgagatggtaaaaataatagtaatatttaactttcctttccactcatgcacttagggggaacctggagatcctggtccccctggtttactaggaagcccagggctaaaggtatgtacttcataaataaatgtgtgtcggaaatcactatttggaaataattcaagaattacagccatcccgcattcaagaaggttttggtgtgccactcattttcatcaagatgatctgggagactttattttgtttccatggtgaccccaccccactggctacaattattacaaacataaacactaggccttttgggatacaatgggatttttaaatcctttttcagagcaaattcacaacagcatccataaaagctttaaaagtacacaatgtcagttaaatctacagccctgtgccacattcctaacaggaagaggatttgagatctatttcctcactgaaattatgcatccctgtgatatctgactttcccaggggaaattctacaggagtgtctcaagataaagcagttaggggactgtgagagagacttgagtggaatgatcccagccagtttaggttaccccatcatcacctgatgctaaaacagacccattaatgaaacatctcagaactatattactaagctttgagcacatgtcagcataatacatagaaagtgagatgctgaaagtctatctctttctaataaaagtcttgttatatctcaccaatattcagatatgatctagttttatgaaaacttaaagtatataccatcttctattttagggtcagcaaggacctgcaggttccatggggcccagaggaccaccaggagatgttgtatgtattgtatcatcactattttgaaataaaattgatgtcagttaatgagctgattatgctacattccccaaaaccataggttaaccccactactcaaattggtcacttctaatgccaggggattaagtggatctgaataaaccaatctttgaaattcaagataactcaattgtcagtagtcaatgctacagcagaatggagaaaaatagaaatatccaaagaaataagagaaaaccaaaagagacagcaagtgtttccaaattacattcatagactcgagttcaaataatcattttcatgctatatgataagctcaatatagcttgctccctctccctctccctctccctctccctctccctctcttcccatatttctacccttgggtaatctcctagtctccccatgggaactgagagctaatcatcaaataatagatcaaaatggagatctggctacaacactcagtgactctgtgcccatgactaggatgctagttggccagacttgagacctggcctcttttcaccatcttgggagtggccctatgacttctttccttgctctcaagcttactgcctgagcctcctggaggcaactggttggccttcatagtgggcttgctaatctgaacatctgatccataagaaatgttatttatccctcctagtcttagctagggttttactgctgtgaacagacaccaagatgacagcataatgcttatattgggacacttcattggggctggcttacagtgtcagaagttcagtccattatcatcacggcaggaagtatggcagcattcaggcagacatggtgctaaagcaggagcagaaagttctgcatcttgatccaactacagacaggaaaggattgtctgtcttctaggcagctaggaggagggtctcaaagcccatgcccaaagtgacacacttcctccaacaaggctccccctcctaatagtaccactccctgggccaagcatattcaaactaccatactcctacaaggcattattgaatcacttcaggaataccttgtggaaagacaccataaaaaaaaatgttaataacacaagaggaaacattaaatactctgcttagacagaactgttggtactgaggaaataaaatgagaattaaaatcaaaaggaaaaaagcccctgtgcaaaagcataataaaaatattttgacatttttagttgggatgtagtgcttgctcccagcccctaccatcccacttccttcttagaaactatataggtgaaacatttcaattactcttttctgtttcccattatggctgttgactgcacagacaggaagccacacatatctccaaatagcgcttcccctaaggctaaacatcaacattaccttgtatatagacgtttaaattcagttctctgacaaagatgcatggctattacactaagagatgttctaactgctagttttctttcttcttgtattttctagggattgccaggagaacatggtattccaggaaaacaaggcgttaagggagaaaaggtagagtttcgattttacatttgtatattatttaagtagatagaaagaaaagatcctaatgccgtggaagaagcacaagatttcaaggcttgagcctcacatcagtacagggacagatgttcatacaaactgtgtccgggtgtccctggtgccatatatcattgccatgatggagcacagaaacttcagatgagaaaatgagccaacctggaagtggagatcttagggctgcggtcaagctgtagaatctcagaagcctcttagtcttttactacctgcttcttgatgtgtcctatgcatattaatactgcattcctctcagggaataataaggtgtttcgatcatctaaaaacgcttcatgaatagacactctctttgttcctgtgtttacacacaagtcggtgttttctagtactgctaaaccttgtgtagcagaactcatgtcagagctcgaatgtgtctaagatggtaagtagagtgcccggactgagctaggcacttggtaaatgcactagaggggctgaatttagaacggaacataggatgaactttgattggctgtgacaacataaagcaatggaaaccactgtctcccaacctcccactatgaacttcagcagaaaaagaaagaatcgtctcttgttttccacagggagatccgggtggaaggctaggccctcctggacttccaggtctgaagggtgatgctgggcctccagggataagcctgccagggaaaccagtaagtactaccctatgactaggggtgtccctgagcgctcattcactgctaattctgagcccccagttttaagacacaagtgtgatttttttttaaagcctaccccaaagaaaatttatcctataccctagcacagaaagataagacattttgaatgtttcgcagatgataagcaagcacacaacactttccatgtcatcggagatgtttgaaaggtgtcaagactttaggtgctgatttctgagtgattgaaagaacaactgctccacaccaccttcccagaggtttaggctacaaccacagaccatcactcatagaaagtgtgtgtgatccacattcttctcaggacactggaaactgtatcacctgaaaacccaaaaggcaatatactcatttgatttgcccattttctcaaccctctttctcctattacatcaacaactaatggtgatcattctgaagattagatatttaatttcatagataaaacctcttatattttaagctaattattcaaaatctataaccttgtaaaatagtccctctgtatttaataagagtcttactcaagaaaaatgaaggctagtgagtaaatcacggttttgaattatgacttctaattttttaattatttagaaaaagaaatgtagtcatcttgctttttttttttttccttttaggggttagatggaaatccaggatcacctggtccacgtgggccaaaggtatacgaatttcatagctaattttagaagaattaatagttaagaaaaacagaactagaaatgtcttgtgcctcaaattaattagagtctttggttttcacagggtgaaagaggtctgcctgggctccacggttcccccggggacacaggcccaccaggtgtaggaatccctggtagaacagtaagtaatattcagatgtttattgaaacccattggttgtgttgttatgtgtctactcttatttagtgcagtcctcaaaatcttacacaaagcagtaagtcgaggaaaagaaatagaagagtttcaaatagaaaaggagggattcaaaccatacctgtttagacacaactcaatctttatgcttaaaagaccctgaaacattgctagaaaaattttagagctgaaaaattttcagtaacaaagcagaacacagaataagcattaaatgtagcagcatctctacatactattaaaaaacttgacaagaaagatcaagaggagagaaccttactcaataagtgctggtgtggggacttcctaaaaataagcctcaatggaaacttgaaggtacaggaggagacactaggggttgggaacatctctgatgctcataaactggcagaattaatgcaatggcaatggcaatattacctaaagccatcccatggattcattgtgatctccaccaaaattctaatgatattctttacagaaccaggaaaagcaatgctaaagtacatatggaaacataaaagaccctggacagcagaagcaatcctgagaagagagagatgttctagaaatatcataatacctgatcttaactcacactacagagccacagtgccaaggcagcatggttctgccacatgagcaggcatgcagatcaagggaatagagcagacgactgaaaaaaaccacactgccacaaacacctaatctggggggaaaaaagaatcaaatatattcattgagctaaaagatagcttcttcaacaaatggccctggggaaaacagatcctatcatatggaagaaataaatacatcccatatcacctaccctgaagaaacatcagtcagaaagaaatgatgcgtttaatataaaatgagagactactaggggatgcattagaagactttttgagatacagggataggcaaaaactttctggaaaggaatacagtagcatataaaatgtttaaaaaattgacaatgggaaaatatgaaacaaggagcttctacacagcaaagaaaacagccaccaggatgtaaagacagcctacagaatgacaaggattgcatccgtgtggaactctattaaaaaaaaaaaaaaaaaaaaacttcaaaagttgaaagcttaaataaataaaattctctaaattgtttaatctataataagctaatgaactaaatagctcttaaaagaagaaacacaataacaaatagataaaatgtttaacatccttatcagccaaggatatacatgttaaagctgctctcaggaggactggagagatgaatcattagttaagagcttatactgtgtgaattaagttctcagcacctacatcaggcaacttataacatcctataactctagctccaggggcatccaacaccaagacccccatagatgtgcacatgtgtcacatgtatatacacagacacacacacacactactataaataaagtaaatggctttttaaaactgctttcagactccatctccccctagtcaaaaaactatcatcatgacaaataacaaaaattgataatgatatgaggaaaatgtaactcttatctacaactggtgtagatacaaactgctacaatgtctatggaaagctgaaaatagaactaccacgttacccagctgtattactcttgagtacatatcaaacgcaatttagctcagcattccacaaagagacttgtacaaccattacttcactattcacaagagctacgaaatggaaccagcctggatgttttatcaatacataaagaaaagatagcatgtacccacaaggaagttttattcattccataaaggaaaatgaaatcatgacattttcaggaaagtgcatttgactagaaatcattctattaatagaatgaaataatccagactcagaaagacaaatagtacatatttttttctccattgggagctctgtgagtgtgtgtgtgtgtgtgtgtgtgtgtgtgtgtgtgtgtgtgatgtaagtagacatgaaaccatggaggggaagaaaagatcataaagaggagagggggaaataaaagagggtaatgaaatgcatctgacaggaagcaggaggggtctcctatggggagaacggaaatcaccaggaagaaaatgggccggaagaaggcaatgggagagggaagcatttgagagcaacatgtctatgaaaatgccttaatggaacccattcctttatctgctgcctttaaaagaggataaaacattgtatcgagaactcattaaagaggtaacatgtttatagagggaaagtatcagttaggaacacaattgaaaggcaaggaaaagcttagataataacagtgcggtgaatatttttaaagaggataagaaatggagcaaatactgatgttaactgcttaaaataaaaaaaaaaaattcaaaaagaaaaataaagttcactgtgtaggcctggctggcctaaaactcactacataaatcaagctgttccagagctctgatccaagctcaaaactaaaggctgtgccatcacaaatatgtttgctagcttgaacctcacttgagttatgtgaaccccagtattcaagaagtagccatcttctccctccaatgaacacgggtgtgggctgtttctaaggagaaaaataagggacacatgggtctcccgcaggtcctctgtgtatgctgtggctgttagcttggtgtttttgtaggactcctaacagtggaagcaggtgtgtcttgactcttttgcctgcccttgggactcttctcctcctattgggttgccttgtcctgccttgacattatatcttgttttgtaatgttgggttgtctcttggaggcttgctctttgctgaagaggaaatggaggaggggtaggtgagggaggggaggtagagggagctgggaggagtgaagggaggggaactgtgatcggaatgtattgtacatgagaagaacctctttccaattaaatatgcaaataaataaatagacaaacaggaaaacgagccaaggaaggaaagaaggaaggaaggaaaggaggcccaagctgccgcagaccctttgggcccctttgtctgcgtggaacaggtctctagtcgcaggtgggcaaagtgttggatgaaatgacagacagatgcacacaggagaggttgtgtagaatctgaatgtaatttgtcaaatcgagcatcaaactttttatacagaagaaaatagggaagttgggtgacacaccagcaaggtacaaagaggttactggattcttacacaaaacaggaatgcaaacatagaaggtctgacaggaaccacctgggatagaattcattgttaacaactgggatcaaaaagagctccacctaaggtccacttaatcttagaagccagggtcaagggcttcgggcccttgccatagttcctattttagtctattgtatagtccaccttccccctagccattgtaaatacatgtgtatgggtgtaactcagctatctatagttctaaatatctactctggttcctccttaggtctcaaacttccttcttcctagatgatggtaaattcctgtgtaaggcagtgacttagcttttattcaaagtgatagtgtaataccagaggcaattctgaatgtcactgaataggcaacatttttactgaattccaagcccatggtcagctcaaggactttctgggatattggagcactggcaaaggcttagctatatcagaattcaatcttaaaaggcacttataataagataatactaaaagagagcacatagatccatacaccagaccaacgcgggaatagggtatgagtatatgggttaatgagaacgccaaaactgcaggaggtgagtttccgtgaaactctctgcttcatgagtggctttaaggcttcaggcctgtcaagctgactcgacctgagtgcgtggcaccaagcctctgagccccttgggcagttggtttctgatctgatagaatttggacacattgcttgcacacttctgtgtgtgcagcagcatcctggagagaaagaaactcccgcatgtgcgagcaaagtctcatacttctagcctcggatagttggtcatttaactactgcttgatgtcatgatgaactttctagaaatggtgtgtaggggttttcggagcttttagattattcaggcgtcaaactctgaggctctgctcataaacagaggggtgtcctggtaggatctggataattctctctcgtttttttttacacagggctcccaaggaccagccggagagccaggtattcaggtacgtgactcattaagtttttcaacaaagcaagtttagtcttcttgatcgctggaaattactagaaacctgttcctaagcaatttttaactttttcccctagggtcctcgaggtctgcctggattgccaggaactccagggatgccagggaatgacgtaaggacattttccccaactcccaccccatgtctgtttgaattttctctaacttgcagaggtttgaataagttgcctctgtttctagggagctccagggaaggatggaaagccaggccttccaggccccccaggtgacccggtatgtagacaggccttgcctgatttatgtatctttaatgtacccagaagccaaacagcctaccaagcaaattctgctgtccaagctaattacaatgctcggtgtctgcttggtgattttgtttatccccattattttgtagaggggaaaaaaattcaagctgggtcagcattattgtgtgtgtgtgtgtgtgtgtgtgtgtgtgtgtgtgtgtgtgtgtgtgagatgcatacttatctcctaagggtataattcagctgtacaattttgccccaggctgagccttagcatttaatgtctttgttccatgggaaatagagataaaatagatagccacaatttctgttcttctcaattctggtgagtaaatgaatttcattttctaaatgaaggttttcaggtacgttacctccagtgtggtgtatctccgttgatggagtgcctctgaacagacgagatgattaaattatgaaaattggattgaaaaaaaatcacagaaaacgcattaagatactaaccatgtgttacatagttttatttcaggttaaaccttcctatgagtgacagtaaatccctttaaacagcctcagccatcgcacttaaattttcatatggcacatggcattgtattaagagtcctgtacaataaaatccaaatctgtcctctctctgggttcacagatccccttagcgcccatattgctcctgcctgcggtagctgcaagcagcagtgttatccagcattcccttagggccatcactgaatcctgagtgcctctccacagatcctgttacagtgcttctctctgaaagggcattttaagacctgtagcacaaacacagcccatgtttcccaggtgtctgtcttgtccctctgaagtctcttctgaacttccttaagagctaactttaagacagactcatgggctggtgagatggctcagcaggtaagagcacctgactgctcttccaaaggtcctgagttcaaatcccagcaaccacatggtggctcacaaccatccataacaagatctgactccctcttctggtgtgtctgaagacagctacagtgtacttatatataatcaataaataaatctttaaaaaaaaaaaaaggacagactcaccctgccattcacatatctctcagtagcctgataatgtacctggtaaaggagtgatttccttttaacaaatgggtttgacttttgcacatcactcgaaaccaacagcatagggaaaacatagaggttaccaggtggtgaagctacacaatacagatgtatgagcaaagcatccatggtgagcatgcatgctcttgatgaaggaacagagtgaattctctaatagcctggctccttcagtgctgggtgatatgtcatgatgcatgaagccaagccagtgagtcccacggcgagacgaaaattccatgtcccaatttcaactagcatgtcactttatgaaaaaaaaaatacaccaactaacctagtcccttggagactcacagagactgaactaccaactaaagaacctgcagaggctggacctaggacccctacacatttgtagcagatgtgcaacttggtcttcatgtgggttgagcggggttgtctctgactgttgcctgccattggatccccttcccctacctggaccacatggttgggcctaagtgagtgagcctagtcctgctggaactagatgccccagggtggggtggtacccaaggggagctttcccttctctgaggagaatgggaggtggtaatgggaggggtgatttgcaagggtagaactgggaagaaaggagaagggaaagaaggctgcaattgtgatgcaatgtgaaaaatatgaaacaaaaagtaaagacataacttctatgttcatactgcattgtgttcatgtatatgcaaatatccatgggtttgggtttttttctctcttcttaactacagatcgcacttcctctcttgggagacattggagccctgctgaaggtattcttttgctataaaagaaattacacatttgtgtgcaggaaaggttaaaagggaactttctaccaaagatagaattaatttctcagtccaaaaagattcaaattcaaatgttagaaatatgtaaggcaggaaagcatcatattctatgataaattctagcacttatgtgaatcttcccactctgaaattcagggtctcacattgtggatatggggatgtgggaaggcagtatttcgatgaaagacagaaaggggtaacatcattgatagatacctttaagtagatcttgcctcctctggtttgtttgtttgtttgttttgtttttgtttttgtttcttttttgtttttcgaggcagggtttctctgtatagccctggctgtcctgaaactcactttgtagaccaggctggcctcgaactcagaaatccacctgtctctgcctcccaagtgctggcattaaaggtgtgagccaccacgcctggcccaagatcttgcctcctctgaaacgatagctttctcttcctagatgttcacccacccttgctgtgtgaattgtatgtgccactctgtcagctctggtcacttgcaagatgaaagtctctgaatttaacatgcagattgaatttttatgtcacagaatttcacagaatgagctataaagccaacaattgccctaacatctgttaccctgtaaaacaaaaattatctctactgattatctattctacaaagtgccttgggctaaacatgggggcacctggtagtgggtaaagctatgtacgtgtcgtctctgtgtaatctagtaagagtaggtgaacccaaatgaaaatgtagctgttggtttcactcttacatttcttgtctatgaatgaacagaaagtaatgtatatgcatttataccacttacacagatatttcacttacacaacttgtgttcattcattaaagatttatctgatgacttatatgtaaacacgaagaaatggttatagcattgaatccaccaaaagacatggtctaggggacatactggttggggaattaaagttttcagaaaagatatataaatgtaaatattaatatatgctgactcaaactctgtgtgttgagtctttaacaaggtggtaactactttatgttttctaagatgacttcaggtagagcgctgagaagaattagcataattctaaaaccaaactctccttccctgatcttctaggttaatcagtgtgcggggttccctttgaattagggtgcacatcagccaatgatgggctcatcttaatcatttctatgaaataatattgcatttttttcaagaacttttattaaaaccaatttcacttggttttttgtttgtttgtttgtttggggtttttttttcgtttttttttttttttttttttttttttttttccgagacagggtttctctgtatagctctgactgtcctggaactcactctgtagaccaggctagcctcaaactcagaaatctgcctgcctctgcctcccgagtgctggcattaaaggcatgcgccaccacgccaggccaatttcccttgttttaacactttgccttatctaaccaaagaaaatgagactaataccaaacgaatctaagaagtttctgttgagttataacaattaccatcttttcaaattctactaaagtcatcagtgcaatcctctatctgaggatgtttctgaaatcagtgtcctaaggctttgctctattttgctcatgtgtgtgtgtgtgtgtatacagtcataattcatcttttttaaacatcttgaaatgtggaaactctcctgattctattgagttccactttccccattgctgcatggtggatctacaactttatgtgtgttttttaattcttctatcaacttgacaatcccatggaatgatacaggtggtaaaattgtttgatcaactatacacttgattctggtatcagtttacatatttgaaccctagagagaattattccagagtggaatctaccatttctgaggccaagatccttcttaatatcacatatatttgtgttccaaggaatatatttctgggaaccagatatttattgggccaaaagtattggtatgaatggctttagtttttcttgccaattttttttatcaatggcaaatctccgcccctttttctgttcaatgattctccccatgaatgaaaatcacgagcatttttttgtcctaccctgacagctgagccctccatcagtggctcctagtcttagccctgatcatatttttatccaccattttgttttaaataagcttctcacagacatttttccctagccacgtgataagactttggtttatttttgaagcaaagacacttagactcagcctctgtagatcacctgagggttgtggtgacgtcagtggaatgctgatttcactacttgggttattagtttgatatgctacttaatcttgctgcttaatccaaactttaatatggcttcccttcctcaacatgctaaaaaaaagttaaaactcgtattgcgttctcaaattacatttcccacccccattatttattgggagttttcctttgaaatggcatcagagatgtatgtgaggtgttttcatttttaagtacgcgttcaccaatattataaaccaagattaatgattagggttgtcagaatttttaaccttacaaaaagtcatcttccgaattggacacacaggtctctgaaagcagaatggcctcacaatcactcattgacaaggttcaaacggatcagacctcggtttcttaaatgggttttaggaacctctcagtatgttgtctttatactcgctagaacttctgtggcaactgtcaagccaatgtccctgggctgaaaagcatcaaaggcgatgacggaagcactggggagcctggaaagtatgatcctgcagccaggaaggtgagcgctttgttgcatgtttgcagcctactgagctcctgaggagtcctacctcagagctctgatacctctctgtctccagggtgatgtagggccacgaggtcctccgggattcccaggcagagaagggccaaaggtaagaaagtcttccgagagatttgtcaaactctctaaaaagtagaacttacattggcaatgttgggcaggctgccattcctttctaccctgatcctatccaaatgacggaccccgggggttctgatgggaggaggggttactttctttcccctattgttccaaaagacactgaaatggtccagtattagctgaagttgctgtctttttagggaagcaaaggagagcggggctaccctggaatacacggggagaaaggcgatgaggtaagcgattctgctgttgcttctctctcctgatcaaacagaggaaagatgttgaggcgattattattctgagggtatgtgccaaccatttgttgccttcaaatatcccaactaaatgccacagagactcttagatttataataagccgtaaagccccacagctgggcagacatcagacctctctgctattttgtttgcttccttgtcaaaaatattacttgtcataaatttcgtttgagcacttcctactccatcatggcgaccctcatggccatgagctcccaaaccacaatgacccacaacaccctatggagacttccttccttctttttctctccctcgtggtccctgcctgagaccccaggcccgggaatgaagctccacctacctctcttccacccagccacaggctgtaggcatccttattaaccaatcaggaatgacttgagggacaaagtttacaaaacaaaagctagaataagtgaagattcactcattgggggtaaccaggtcttgggagccgatttttagcatctggatgcacagcagcaccagactaactctaacaaaaagaaacggggttcgccataatgtatgtttaatcccaaaaccatgagtatgtatttgatttaaaatagcacattttagtaattgtcgatactcatttctctatggtggtacaaatatggagacacagcgtcaaggctaaaaattactatgaaagttatggggtttcaggtctcaggtaattatcccaaccctcgcaggatagaaagaggaagagtgtaatcacagaaagaaagctcagggtagctaagagagggagagagcatatgaacatgtgtaaggatgagggcagcttcagagcccagctaagagctggggacacctctctaccatgattcaactttaacaaccttggtttctctaagtcactgctcagcttccaaatgcctgggagaaataagctaagctaaggatcttgatagaccggtttaggccagccactcacccccagcaccgagcatccaacgcagatgtggttttgagataacggtgtaattttctgacagtaagccacagtgatgctcaggacattattcttgccctgcataactcacattaactcttagaaaaaccaattagaatgatgaattgttgttggtttaaacagttttggtgctaatagttcttaatgaaagtaagaaagccatctggcatatattaaccttgatggtagtatgggaaattatgacactgtaaaatagatctattttcctggttggaactatatttcccattacaagctatcatcatttattattggttttattgatattcattgtgttctggaaacctttaagattggctcgggattgttttccaagttaaaaaaattaaagaatgagaagtacggcatttattttcatttataaataaaacattgaaggcatttgttttgaaaacaagtaagaattaatgagcttttgcttcctcaagttccacagaagatttctgtaaaatataaacacagcaatgggttttaacaggcaggcaggttttaactgcctagattcaagaggtgggcttaagaggcaattgagagggtaataaaaaacaagggaattgagaaataattggaattggagctttttatgagtgactctgttgaattcacgagaagttaatttttattgattctgtgaggtattttgccatcttggtgagctgaacccattgttaatatccctcagtattttagtgtgttctttcttagacacactttgtgcactctttgacatggatcacacgaaattctgcagaggactcactagagtgcaggaggccctcttctcttgtcctctatataccaagcgtaacgtggatgaaccaggcccaatacagcttttgtctctcgcacagatcagtaacagcaagtgattgcatcatctacttccactcaaagaataccatggttacgtacttggctggtttgtctgagtgaataaaatgttagccaacaatatataccttttcaactggccaacagactacattctgataacagacatgcattgtctctaatgttacaaagccacaggtgtctattcttcattgaacgaaaaaggtacagagggaagctcacacctttcggagatctaattttagaaacaacagtttaattcactaagctagaggaatcaggcatttgtcaatgttttgaaaagtgacttactctgggttcttcatgttgctgtataactcaacatcaaattgcaaagtgttagcagagcacagatcctacattttctagccagagaaaaaaatttgactatatgtctttatataatattttatgataataaatgacaaagaaggcatgaaaatgtcgttattcataaagcataacaatgatggctgaatgcctacgcaatagattttaatttgagttttgagtttgatactatgtgctaaacttgtccatcttgctcttgagtgtcatcatccttcaatagccattgggacttacaaaatcttcataccaccccttatgcctctgcggcagctttcactcttgtgacagaatttcgagcacctgagagaaagactgctgagaaagatgggttttacctgtgtagcagggtttattttcaagattaatgctgtcatcagcacttaatgactcccatgtttataaattagacaacctgaaaactcactcaaagttgagacttaaagtagggaagagagaaagatatctacgtaagtatatctgaaacagatatatgtataaaagttatggaaatgtggattttttttaagataagaaaatttctcatacatgtgtataagcttcagtcattaaaaagcaccattcccagtggaaaattgtcctttccatttacaaaattataaatctgtttataaactcgcacaagtgataataaggaaatgaaaagaggtagttcaccaaactgatacatgcacatgtgtacatatgtgcacacagcaagccaaaggggttgatacattcttgaagataaaatgaatatgttcttcaatacaaatatacataagatttttttcctgatacttatttcatgaggcattccagcacattcaaggagatcttttaagtatttcttcatatcatacctgtcttagttacttttcttttgctacaaagagataccatgaccaatgcaatatacatatatatatatatatatgcatatatatgtgtgtgtgtgtatatatgtatatatacatatatgtgtgtgtgtatatatatacatatatgtatatttagatatatagatatatatttgaagacttttatactgtttccaagttcatatgggaagcatagcagcaggcaggtaggcaggcaaggtgctggagaggagctgggatcttacatccatccacaagcatgacacacacacagagtgggggagtctggacctgaaggagtctggcttttgataccacaaagcccaaccccagtgacacacctcctccaacaaggccaaacctcctaatccttccaaaacagttccattacctaccaactaggaatcaagcattcaaatatatgagctgattaaaactattcacattcaaactaccacagtatctcatgaataaacctgaagcaatatgtggtctcaggtgttggataaactgaacttattcttaagcctattggtacaaagaacctcgatccagctcaatcctgttgatacctcgtaaatacagatgcagtcattttaccacagtcactttgcccgacatttataatggacataaaaaaaccatcatttaaggacaatagaaagaggatttctaatatagcaaataatatctgagcagtataaaatattttaatcagtagagaaactgactcttgaaagaatggcaccatccaatccagaacttgggtcttgttttcttcgtatgtttttgcttatttgtttggtcggcatttatactgatggaggttgaagcctaagcttaatgaccattaggcaagtattgtaccactgagctacagccccagcccttccttctagagcttcatgcatttcctatgactctgaagtaacaaacaggtgaataatatttttctctaattaaaatgtgatctaagcctctcatagaaaaagtggtaaaaaacctaaaatttatgtctgtccccacaacacaccaagtaataatgtgtgttgtatatggtgtatggtcatagtggtattatagatggcccacaatccgaacaccagacagcctctgaaagtgctggaaatctcctaacaccaacatgcaacaattccgtttttttcccagggtcttcaaggaatccctggcctctcgggagctcctggcccaactggaccccctgtaagtatttgctaagactgcattcctcataggccatacctataggctgatacatggtacattaatattcctggtgcctttcctgctctgtatctctgtatagcccagccattgccaagtaaagtagccccttacagcactccaactttcaaataagattatttaagcctgctcagtgtcctggagacttctcttcagaatttttgccaagccaaagagctgcttctcgctctgctggaggtagagtcctcaagtacactctctccttggttataaatttttggcactaaccttagaagagatattcagatgccacacaagctgagaattttctaaaggaaaatagcaggccaaagattatcagctttaatttgttgtattcctgtatgtgaatttttttaaattctgttttgccaccccctgaacacagcagtatggcctttgggttatcttgtttttctggaacagaatcttctttcatttccaacctgacaaacccaatctcttatttagagtttaattctaagcaatcccaaggttcagttgccagataaaagatggggcacacaatcacacttgagtttcagaccaacaaataatgtttgtttaagtttgtcccaaataatgcattttcctttagaaaccaactccactaaagtcaatgtctcaacttccctgtctcttctcttaaagtccctatgccagtaaattatttttatctctcaaataagaagtgatcattcgattaatattttgaggcataggtttggtgtaactaaaagtttatcatttatgtttgtatctatatagtaaaacttaaaattatgaaagagaactgtaaaagaaaccacaagaattactattaattctactctcaaaggagaattaagattaacttttgttttcctttctacaatgcagatcacataactcagtatgcacatttttcattctgcccagtattggagtatttaagatgttgatcactaccaaaattatacctcatttagaaagacgtgttatgtaaattggcatttaaacaggaaggctaaattcttaagtgtatcaaaaggtttcaattaaggtcattaaatgtggttagccaaggtgaaaaaaaaaaaaaaaaaacacagagatagaaaatttaaccttctaagggcttatcaggaaaatacaggctgctgtatcagcctgaagaaatataagctggtagaaccaatttaattagggtcaaatgaccttcgaaatgggtaggtttaagcggtcaccttccaccacctattgaccattggcttgttggttccataacaacaagcttttcattttttacagggcttaacaggaagaactggacatcctggtcccactggagcaaaaggtgacaaggtacaaaggaaaatggggcttgggttaggggtaaggtgggaccattgactgtgagctccattcaatcaagggcagcctacaagagcaaatgacgtatgctgggcagaggctactcgtggagtggacttgcaaagatgttggtctaaaagtgggtccaaacacaggtgttcatagatgagaactctgggtttggagatagaaaatccaaacggtttagaagctgagacatccgtttgtgaggaagggtgactggttcaagcctcctaaagaggtaaaggtaagctggattgtaatgtattagagacttccagctatggctgtcttgttctctttggacttttgttatatatatatataaagctagaaaatcccccaccaaagcactggtggttttggtagctggcgggcccattttcttattcacagagggcatgttctaaaggagtctttgtgtggttcaacagtaacgaagctctttcaggcttctttataagggcactgatcccattcatgaaagttccaccccatgacctatctcctaaagggcccatctacttcgtcgtcctatgagtaggattcatgctgtaagtttagaagaggaaagcccaaacattccaagcaagctccctggctccagatgatgtcttgctggctatcaagacaacgatcagtaaccaaggacttgtgagacagtctggtaatgctgtccctaaaagaccttggcaggaaatgactaaagccatgttcccttggaagaagaatgtattagttactatagttgctatgtcaaaatatctgagaaaaccgacaaaggtggggagggtttatttgcacttacagttcaagacctcagttcatcgtggtggggaggtcatggtagaagaaagatcttgaggtcttcagttcacgtctaccgcatcagaaggcaggaagcagagataactagttgaatacaactgttctactcccttattcagttgggcctccagcctgtgtgctaatgatgcccctattcagggtgggtcctcctactaaacttttctggaaacacccacccagaggtgtgttgccatggtgattctaaatctcatccaaccgacagtgaggaccaaccatcacagctcacagctgggtgtgtgtgctgtggctgggagagaaaaccaacagcatgggagcatcaagctgtcatggtgtaagatctcacttccaggcattacagtgaccgtccaggcatagccaccgaatggatgaagtagctacagctattcagattaaggaaataagtgcaaagaactacagaagctgcttaagtgtctcctgcacgcacgcttgccaggatgccacatcctgagcagagggaagcgtgatggaatcaagatccccgaggcactgagaggaagcagtgtgctagagagcctcagcacatttttatcctgttaagatcttaaggatctctctgtcccagcccctttcctctattttctatgaaaattattcagcccttgatttgcctttgaagctaatgggaattccacactgaaatgagcatgagggcacaaatgagaatattccttctgatggtgccagggggtggggaggagtgttctcgacaggcacatattgtttgttgactcatgagaagtgtgatgtaatgctctgaagggcattggcagaggtcaacagaacagggggagtcttagggggacggcaaccatcaaagctgtgtgggaaagatacagcacacttcctcagcgtgcgtgcacgtgctcgggcagtgcatcgcgtgagaaactttactgtttatgtacaatgataaatatatggtttgtgatgtgttcctttgttggtaggaaacagatgagtattgaaataagatcttcagtccagttctgaaagaggactgacatccctcaaaattcctgggcatcatatgctctgtgttgtcaccatccctgatagatgtgacttagaacagttttataatgataccattctaaaagcagtgcgcagttataggaacgactcttaaaaagccaaaagagctgcagcaactgcttcccatgaatggactggtcagtatttctgtgctttgtaaaagtcacttaccaggtttcagttcaaaaaaactcacagaatagttattggcccagtaaacaattattggagtcccacttgcctttagatttatgtctcctacaagctatttacactgtacaaaccatttcccttaaatagtgtcatagcaaaatcatcacttccactcagtcaaacacacctcacctggttcgatatgacactggttgggacttcatacttcagttgcatattccattatgaacttgagggagtgaagatgaagccaaaagtaaagattaatccagagagccacagtctccaagtccacaatttattcacatgaactctaccctatcccccacgctcacataggaggaaaaatcccccacctgtactcaaagcccagggcaggtcacctaactggtctacccccagtgaaactgtcactcctagagttcgcacagcgagaatccaggtggacttgaaaggggttattcactttcctggagtggggaaatgtattttactgggttaagaagcaagctaagcagaataggatcgcaaggctgaagccaaatgacaagccatgatgatttcggaagattgctttctgaacaacctggttcacagacttggagtagaaatggccaaaccattaattcaagcctgtgtctctcttgcagggtagtgagggaccccctgggaaacctggacctcctggaccccctgtgagttgtttgaggttttaattctgtgtacttatgactcatacgtaggttacctagatgcttgcaaaacaaaatattcagttgagtgtgtgcttttgtgactgcttgtgtgtgagcatgtgtgcctgtatacatgcctgtgcgtgtatgtgtgtgtgtgtgtgtgtgtgtatacgtgtgtaaatgacatgcaatgcagcattaggtgggcctaacccgtctctatttcagctcagctgcagtctgcagtgtttagagttgtttgtatagtgtgaacttcttttccatggaatccggacgcctgactctctacttccatcaacggatggagaaacatttgactacacagatgataaagctccacagatattaaaaggcctttaagaagacatctttccaaccacgcaatttgctttttcaaagatgttgtttatgttcaccccataagcagtgtctgagacgggaagacattctacttccagggcacgcagtgagaaaaatgccccagggctctggaggtcttctgccctagtcagccacacagacttccagggaggctgtgcagagcagcgcggcctctctctgtagcaagtctgccctcttgtggagccatgttcgaatagcagcagagctggggctcacacgtgttatttcctgcattacctcgtaggaacttaaaaatccaaacttagcagagaaagggtgaagtctcacagtagctttctgaaaactaaagagtatgttatgagtctgggtatagttgcatgctttacacacaaattaactgcgttggcctccgctttcttaaacacattctgcatcggattcttccttcacatagaagcaagccagacaactcacagagttcagattctaaaaatgtcatctcctcaatgggggtaaaaagcaaaatatatcatgagaccgttaaagaaacctgtgcttttctataaggcttaagaaatctgcctcttgtctctagatttttttttttaagccagattatacatcttctcttggaaaacattcttacatctattcgaggccaagtatactgaaatatagcccatgttcagttattgccaaaagagtgaagaatcaataaaaggataaacagacagagcatcctcttctgtcaccactgatttgaagatgcgtggaaacagtgctcgctgggcacggctacctctactgttatcctcaagcagtaatgaaataaagacttcctcatttttacagctgaggtatagaaaaaataacaaaaaaaaaatgaaaacacacttggattttttttcttagagtctgttatcctttctaggtgtttccaaactgaatgtttcgtgtgcatttttgcaaacatggacgagagttttcaagctacacaatgagtgcagtttcatgctctatatttatgcatcaaagttttagttttgttgttttgtttgtttgtttgtttgttttgagcaagttcttgttccctggttattaaagacatcttggtagaagcatccacacagggtgttatgagtgacgttatcctcccattcaccttaagtttctgtctggcttgaagagactgtgaggaaacgtcactttgcagttggcaagctgttccctagtcacagctacatcagtccgacggcatggctgcctgcaggtcagcaggctgagaacacagtaaattggctattcagacactgaattttaatgagcagatagtattttttcaaccaattgcattagaacctcatgtgccacacctgaacacgactcacactccaaccggaagcatccaagtgttccagacataagtcaggctcctttgtccagttttccccactgttttaaaatattgaaacactgtggtatttggtttatggtattaaattcaccttaaatatagagtagggggaaatttaagtaaaagttaatatagaaagaataccatctgataaaatgaccaaagttccaagtgctaacttctgtgtctcatttttttcctaagggtgtcccgctcaatgagggaaacggcatgagcagtttatataaaatccaggtacctccatgtctaattacctatgatgtatagatctataatctataaattcttctcatctgctttctcttcccttgaagggaggggtgaatgttcccggttacccaggacctccgggccccccagtaagtacagatgttctgtctttaagttgccttagcttgatcacaataatgatgggagatgggtctgccttgagcttgctggaaactggatgtcacaaatatcacccagttttacagaggagtaaagaagtacaactaatttaaataaaagaaacagtgagcaaagccttaattgtggaaaatatttagcatagcattgtctctttccttatagttaatctaagctctagatcaatgtccaaatgtgtccatagaaatagcaccatgttgtttctctaaacttattttattttaatgatataaggtggatgggggctgggggagggggttatatgcatgcaatatgcatgcaattcctgtacgagccagaagagggtgctagatttcctggagctagaattacaggtgtaagccacacatcatgggtgctagaacctgcactcaggtcctctggaagaacattatgtgctcctaactactggaacatcgctagacctcaaattatgtttctaaactttactctaaatctaaccttcagcaaagtcagaatacgtacctttcttatatttgttaacaagaatttgaagaaagtgctccgggttctacaatggtggcttagtcgtaattaaactacctttccacacctttcttccagggtccaaaaggtgatcctggcccagtggtacgtatgttcctacttccgtgaagtctttgttaacactagaaaaggcaccaggcaaagacaggctgtcatcttgggtgtgtatcagtgaaggtgtcagacaagcaagcaaatgaagaaatgtcagcaaaatgtgttctttattttcacgatgctttagtccccattctgtgcctgcccttgaggctctgctgtttcctttagtgggttttaaaaatcgtcctctgatgtaggaagacacatagaatgcccttgataaatagaacactttcctctgaccgccttctttggatgattgatgcaatttaaagtcacttgtggaagagaaacacttaagggagagaaatcccttactatgtctgacatctcaccaaccagaaaaggggagagggttgtttatttactttgcaagtcttgggcaattattctgcagggagcgtagactgtcatagcccttcatattgagtggaagacagcaggaggttaacactcagcaaggaaggagatcatgtcctccagctgccccaaggatgataactgttctcagcatctctctcaacggtggagcatccctgcaaaagctctgccagattcaattagattccctctaaccttctgcacttcttttcctgccatgtcctttccaagcaaatattccatcgttcaggtcctatttatatatccgttcaacctttgagggaagaagtgaaaattaatgtacctagtactgagataaactccccaaccaccttctgatgctatgtgggaaaaaaatgagtcattttactataatggtagaagttggtaaaactgtctgaaagaaaaagcattaaaccagaagagagaaaccatggaaagtgactttttcaaaagagagttatcaaggaagttatcattgttactggtcagtatatattagatgtctatctgatttgctctaaaataagtatttcaagtccttcatactatattctgaatcccaaatgtgttatatggaagttaccatttctttgtttgcaacatttaaaatactattatatatggtcatctagaaatatgttgttcatttttatttctatttctcatcatattgataaaaatctccccctagtcttactgtcctacagacttttaaaataggaccgcctctgagtcacagagagaaatttagacttctcattgacttttctgggatactctttaagttctaatgttaataattggcagattagggtaagaaaaaaattaaatgttatactaaagagtacattataatttattagcactggaaagaagctggccaaaatataaagactgtttgagtaaaatttgaagaaattaggtcccatatttcttagctgtgacagaacaaataataaaaaaaaaaaaaacaactgaagaatagtctctgtttagactgtgagcttgtgtgaatgaaacacaaaaacagagatagaacgctgtggggttgaatattgtgtgaacatccacacttaccatacaaacaaaattccctgaaattactcccctgagtcctatctgcctgtgcacagccacccgccatactcattgtcacacatcatctgctgggtctggagaaaccacactccacggcacaggaataagccaggagtgagagaactactgaccgagtacgcattttaaaagggaacacggatgaggtgggtaggggaatgtcctttctgggtgtccttcaagttccatgacaagctcaagtcagcttcgtgtcactgtgacaaagcacagaaggaggaaacgttgttttgactgacgtttcagaccattgtccgccctgtggtgagtcagaatatgtaccagggaacacttagggaggctgagctgctagtctcacggtgacacaaagcaaaagacctctttcctttataaccaaaccctgtccctacagcccattaagctataagtctataatgggctaattgatatggtcacagccttcatgaccccctcttctgtgtgcagccacattgcagatcagcccttaaattcatgcactttgaggggggtctttaagattcaacacacaacacgtggcaataataatcttctgaataagcctttatagaggaaaaaattaccttaaattgaatctgcgaataactagatggtttcctgatgcaaaccacttttttttctttagctattcaatgtctaaatgatttcaattaatatttaattactatgtacgctcaaacaaatgctgattaattaattgattgcttcttctatcctaaggaaagactgttgagagggtaaacaaagaaacatgatactaggaaatattccatgcatcaataactaggagcccccttcatactgattcacacagaatacaatctgaacacgttttatcatttattcttatgactggcaggttatatatacatatatagtagtgagaattgttttgaattatgaaacataaacataccaagttgtatgcccacttgtttagtagtgtgtagtaggcaataagcaataatgggtgtacagatttagaagtctttcagatgtgtattttctgtacaaaaatacatctacagagaatataatggaaacgcttgctattctgtgttacattgctttttatttgtttgttttgagacaatatctcactgtgaagctctggctggctggctagttggctggggaactccccttatagatcaggctagcctggaactcaccctgatctgagctctacctgccttagcttctgcttcccaggtgctaggattaaaagcctgcaccaccacacccagccagtgttgttaagtttaaaatatccactgtcctaagaaaatgttaacagttaacagtaatttataaggatttatcagataactctcactttacctatttctctatttttctaaagatttttttttgtttttctgtgctttgcttgcatatatagccatgcacaacatgcatgcagtacccacaagaggccagtggagggcattgtatccctgggactggagttacaggtggttgtgagctaccttgtgggtgctgggaactgaaccaaggtcttctgcaagagcaaccaatgctcttaactgctgagcctctctctgaaccaactctacatccttcttgatcacaaggtttatttgttcaaataatcagcatctttcaacatagattttccaaatatcttacttaaagacatatagtttgggacagtgcagtagaatatatataaagggcaaatgtttgttttgtttcatttcagtgctgtgtatcccctcctagcgcccgtcagcttgagcaatgacttagaatggctggaggtgcctctcctgggtgatcttcctaagcatttacagtcgtgttaaggatgctacaagttctgctttgagtgctccagtttcattcgctcataaagagttcaatcttattatatcataagctagtagccccaggtgcctcacaaaatggcaaactttattaaaatctgctcttcattttaactcttgctaaaattggagttattaatatactagagggattcgtcctgattagattcttaatcagaataaaaacaattaatcagaaaatggactcatgcctggagaatagctttaattcccaaactgttttcatatacctaatttgaaaaaaacaggataccgtccacttgccaagtttcaaatcagaattgaggagcataggacataaagacgctgactttaaaccattgcttacaaacctctggtccttattcctctttatagggagagcctggtgcaatgggcttgccaggactagaaggatttcctggtgtaaaggtaagcacagaagttaaaaatgcattcattcatcttcagaaatgtatatgtacctcctatcatgccaataactgtttcatgaaacataaaatgaatgtataaggaaatgaaacaaatgaatcttttatacttataggactcattttctagggcaggatactgggactagttgtatatgcaagatagaaacaatgatatcacaaagaaattaaagtagaatgggccaggtccagagagatggctcagtggttaagagcactgtctacctttcagaagacccaggttcaattcccagcacctatacagcagctcccaactatctgtaattccaggcaattcacaatcctcaccaaaaacatataaaaactgatacacattaaataaatgaattagtcctttttaaaagaggattaaagggctgcatgcatgcttggggtgggagcccccatggttatcatatgatatccgagaaagtaagagctgtccagtggcttaaaggaggtgagttagccacgtggagcagaaacaacagatgttaagatcttgagacaggccacctcctccaggcataataagaaggtgagtgtgtggatgcagaaatcttggctatgaggtccgagaagtcttagaacggtaccctcatcacatggaggagtgctgctcagtgtggccactggaagaactgtgctgtctgtatccttagctacaaggaacacgagagatcgagataagctcccaagttatatagtcttctagtttgctttctgtggctgtgataaaacactctcaccagaagcaaattgggagaacaaaagggcttgtttggcttgtgcttccgtttatcacactccaccatcaagcaaagtcatggcaggagcccaagcaggaacctggaggcagacaccgaagcagccatgaaagagtactggctactgacttgctttccttaactcactcagctgaactcttaagactgcctaggaccacctgtccagtggaggcatcactcacagtgggatgggccctcccacagccatcattaactaagaaaatgcccagcagacatgcctagtgagccattccccagctgggacttcctcttcccgggtgactttagaatgtcttaacttgtcataaactaacgagaacatctagtaattttggtaaaagttgtctcagagatgtgggattggtgcatttatcttggttcatggtatattaaaaaattagtaagctcgtgcttcaaagcaggaacctaaataagcatgaacaaagagggttatctgccagtgtagactttaatctttgaccctaagcaaaacccagagccattgataagaacagcacagccacctgagttggaaggaaacaaagacagctagaaggtggtgtttgtcagctttgtaacaaatgcctataaagagaagactgagccaggtgttgtggcacacacctgtaatcccagcactcgggagacagaggcaggcagaaagcaaagattgagagacaagagagggtggtggtcgcagatcaccccttcaatggcatgactttgtcctgtgaggcttcatagactaaagattacaccatcttccaatggcaccacagactggtgaataagtcttcaacacatgggcctttgaggaactagagcacaggccattccagcatccaggtggaagctgatgttggctggctcagggtagatatggtgggtagaggaagaaatgactagattatagacactgtttgaggaaagaataaacagggttttctgattgattggataaaggtaaggaatagagttgtcaaggaagactctaagttttgtgactaagcaactagcatgatgggtagtcaggaagtgaaagaaggaagtatgaagaagtcacagtcactaagcatagtcagatcagtccccacaattacttacatttctgcagccaagagcggactttcaagtaaagatagagaacagtagatgagtgggtttaaacgatgccctagctttgataagcgagcacttaagcccagatatatgaagagaagattaatggtaacaacagggagatatgaaagcaagtgactgcagaattttaactgggcataaaagaatcagaccatggaagggagtggaggataatgaaaactttgaaccataaatgaatcgagggccttggcatgctggtggccaaaagctgaaatgttcaagaatgagatgctgggagccatgtacacattgactgtactcacacaggaggcaagatgattagggaaacgagatccaagggtgtgaggagtctcaaaagtggaggctttcggaacactagcatttatcatatcaccaatttccactggatgaaacattacagtatagtcacgataaaaacaaatgagaattacacacgtatatccttttcctggatgttttttcctttacattttagttgacccatgaagttcctatatgtgtatatagtagattgcagtcatatcagggctgctgtgatatcaacacttccaacattgggtatttctttgggacaagcataatggaaatccgttcctctaagttctgtgaaataaatggcatgttatcaccatggcaatcctactgtgaaacaacacagtggctcacagccatcagtaatgcgatctaatgtcctcttctggcaggcagatgtacgtgcagatagagtactcatatgttaaataataaataataaataaattcatctttattttttaaatgcctttgtattatcccatgtgtaatcaccagcatacgagacattgtcagctgtacctgaaacatcacactgcctcttgaagagcacccaacacattctgtttctcagagcaattaaaagggttttctatcaggtcagcagaggagagccacagatcttcaatcctcagtctttctcttctaacccttgcatccactggggtgaggttaagaaggggtttctagaaaacattcagtacgattaatctctcaggtcacggtaatgatgttttttatgggtagaattttaagtattaactagctttagctgtaagaatgtatggtttgctcttaaaataagacagaggaacatcatgaatgatgctcttcattggggttatgaatcactttgctatgtagagggagaaaacgcaataggttgacttgtgccttcattgttttctgctctgctggctttctccatacacgctaatatcagtagcacttatcatagccaagcaaagcgttacaaatccaatttctttgaatgatatacctttgtatcatttctaccccttctcctctccctccaactccactaccagccccacaccctctcaaattcacaacatcttcttcactattacacacacataaataaacagcaggtatatgaagacgacctattgaggacatttagttttgtgtgtgtgtgtgtgtgtgtgtgtgtgtgtgtgtgtgtgtgtgtgtgtttaggcctggctgtaactcttgatctaggtaagggtaaggctttgagattttttttcctccatacacaacagatgtcaaattactctttgagcaatgattctaaaagcgaagagtccatagacatcattgtaagtagacatttctatctttatcccaacagggagatcgaggcccagcaggccccccaggcatagccggcatatcggtgagttgggtttatctcatcttagcttcttacacattttctgtgcccatacccagactgtagctactggtcaaggaagcttggagtatactgtgactctgggggcagccactgcccagagcttgtccctctctcgaccctggtgtgtcttttcttaattttgatctttcttctgtttttccttcccaagtttcttagtaaatccatggctgtgtgttagtgtgtgtgcacagctctgaaaactcacttgttgtatctctgtccctgtcatatttcacagttctccatcttccaagggccaagtgcttatcctggggcacacacattaggctccctcctgcacacagctctagtctgcccggtgtttgcctcacccagggttattagcagagctttattgccgctaatgttccctcataaaccaggcctctgtcctctccatcatttttgttgctctctggtgtcaaatgcttttatctcatcaaggtcttcacaaatgaataggaagtgctcccagaaaggttgaagtcatttctatgagcccttgggatacttctgatcttcattcatgataccctcattaaaattttgtggtcacggtttatgaataagaggcccatttatctcttgccaggtgaccctgcggggaaagtccagttatcccattgcaagaaagtcagtggagaccatatgctcgggtagaaagagcattgtgaatacagaaagcaccttagtcttagccccaccccactgcagctacgtgacccccacaccacctcaaaactccggccaccatccctaaagaggctcacactccctccccattactacactgagctagctcaaataaacaataaaatgctgccagtcatgtacatgtcttacagagaatgactttttttattaaatttgtctagactgagaccaggtatgtgtataactgtaaaggaaaaaaaacaaaaaaaaacaaaagataaaagaaaaaaaaaagaaagaaaactaccttctctctcaggcactcttgaatttttgtaaaatgaggatccttcttgaaaacgggcttcacactgaatctcagaccctggacccacccctgccactcttcctcatagtgtggggctctctttctggaactgtactcagaatgccattccaaactgctcacttacactcacaaagaaattcatcttcccactgcattcatctacacaggacttcaagaaacgttccgctatgaccataaattaagtctgtcttcaaagaatgatcactgggtaccagcaaagacatcaagacatgtatagtaatttcaaaagatagttcttttgagcaattccagaagtatttttggaggctgtaagttggctgaaatatcaagacattacatttggatacctaacatctgataaatgtactttaaaataggatttcacaactcccaggagcacttggcaactccagaattaggaaagggtttaaacatggacctagcacacgtgtgcagttgtgtgatttaaagtgtctgttttttacctggtccttggaaaacaaaacagttaagaggccctacaagtagtgataatggctacaaaacagaggacagttaaatttcatcattgatacgtagagatagtgagatatatttcagtactgtctaaatctatcgaaatgataattgtagttgaagcaaagataaaatcagttggacatgtcatgcctactcagtggaggtgcacagaacccactcctgccctttctagaacagtctgcctctttccagtgtagatgaggctacccagggctttccctagaatttctctctttcttccttctctgagggggatagcctcccagaattctaaagcaggttgaagagggggcctagccctttaaagtctctgatactcacccatatacccacactgagtttcccagacatgattaggcctacggagtaggaggctctcttccagcagcaacgctgccagcttcattttccagtctctgctaggccactatgctagctgccttctgtgacaaaatatttgacagaagccacttgagagccatcagacatggcagctgaggtaggccgggcaggggcggaaagagcctacagtgttgcttcttcaaatgttggtagatcaaaccttagagcactcaggcaggacccagaagtagatacaaccttcaggaatgacctctgagaagcctaattgtttctctgctggtaaaaccacagcctgaaggttttcaatctccccaaactccaaactgccaccagctgaagaccatgtgttcaaacacataggcctatgagataaactccatgttcctatctctgctctagtgtctcctgactctcagttctttggacaaggcacactgacaggtttttaaaaaataattattttcctcaaccttttacccaagcacagcttttcaaatagaatgtgcttttcttttcttccgattatcttattaccaacatagaagctctcctgtgaaactccaaacctgatagaatttctctcactctgccttctttgtcctagtttgctctctattgacgtagttaaaaaccattaccaagagcaacttgagaaggaaagagtttgtttgaaaggcttatgtgccctgatcacagtccttccctcaggcaaatcaggccggaaacctggagcagagaacgaggtttgctcaccctgcttttttaaacaacccaggaccaccaggtttacccctaccagtgcccaggggtagcaccacccacagtgggctgggcgcacccatgtcaatcattaattaaggaaaccttccacagacttgccctgggccaatcttacggaggaattgcgaggatcaaggttttttttcttattaaaagactccagttcatgtcaacttgatgaaaactcaccagcacaccccatctccgccccatccccaccccaaaccaccccctagagtaaggaagagctaccaggcaaaaagacatagagatttctaatagtgaggatacattgtcttcctgtgttcgaaagcatccctggctccccctcggcattctcaagtgtgtactttgcagcccctagatcgtgtcctggtccgattactgtatatactagccctataaactccaggaagtgtgtggaatcagtagcgtggttcttaacatttttatttgattttgtcacagggaaaaccaggtgccccaggccctccaggagtaccaggggagcaggtaagctaccttttacaatggataaactgctgtcatacccaggtgctttttaaagacatttttaccaatgtttttccccctttgggacacgtttgtagggtgaaagaggacctattggagatacaggttttcctggaccagagggaccctcggggaagccagtaagtacttgtttaccttctagaaactgctgtctaaaagctgttctaagcgttgctgcaggagccgtggatgtggggaaaagaagggagtgggagagaactctagtcctgccagagttccagtgctctgggcggattccacacggccccgggtgggtgtctggctgttaaagccactgaccccactcagcgggtggtggacaagtggcagccctaggtaccagcttcttagtcttgggcatcccatgctggaaaccgcaaaagagctgagaacagaatggggccctggggcaacactgggcccccagggctgaagggaggagagagttgggggagagggggcactggatggttccaacacgggcaagagtccttggtcaggtctatggctggagcacaggatggccttctggcgggaggttagataaggcttgttaggagaaagcccatcccatcgttcaccacaggccttgatgatcagagacagtctatggttttagagctttattgtagaaaggcagggagaaagagagaagggagaaagagagagagagaccagtcataaccacgtggagagaggggggaagaaagagagggaaggagggctagagatgagagtaagaaaggtgagagcttaaaagagagcaaggaggggccaagcagcccctcttatagtggtctgagctatcttgctgttgccaggtaactgtggggaggagcatacctggctatagtcaggtaactgtggcggtggagaatgccagaagcttgggacattgtgtgactgatagtcacaggattatagacaggcatctgactctgggaatgtggctcgcctttctgtcccttgtagggctctccactgggtcaccagaacaagccccattcaaccaaaataggctgcctatcacagccccacacgctgcctcttcatgttcctccttagaagcttagatttgagccagcggcttcagaaggaaataggaacaggttctaaatattgagttagtggataccgacaggggattccttccagaactttctagaactctacctggtgtctttatatcttaagtaatggtgaggagaagtgaaactttctaagcactggtaaagtagactcattgttagttctagtaacttcagcagagttaaaattaaatggtctatcaggtcttaaaaacatgaagataccaacaactagccaaagtagtgcctgcatgataaactaaagcagaaaaatctcctctcaggctcctccttcatatacaggccttgcccggatactgtcattgctaacactgcaggggtgtgtcatgcccatcccctaaaagagctttgtcacagtcacccccccacctagcatatatatatgtgtgtgtgtgtgtgtgtgtgtgtgtgtgtgtgtgtgtgtgtgtctcctcctatgagctgaggatatgctgggcctggagctagggactcgaagttctggggtgttttgttttgttttaagggttctctctctttctctctctctctctctctctctctctctctctctctctctctctctcaatggttgatcactcatccattgacaactcgcatagtttattcggtgtgtttaagatttattttattttatgtatatgagtgactgcatgtgtatatgtgcacccatatgggtgcctggtgcatgtggaggtcagaagagggccttggatcccctggaactggagttataaaggattgagagccaccaggtaggtggtaagaaccaaaggtggtcctcagagagaacaacacgagatcttaacctctaagccattgttcagcccatcctatttcctttgatagaaggtcttggtcatctgctgtggtgtacataaaagggaaggtctagaagtaagtggcacttaggaattttgttcagtaagtagttctctgacagctcaaagctgatgcatgatctagccatcatctcctcagaaaaggcaacacaagagacaaaaggcatatgcccattagagtcagacattctgggtctgatctattgttgaggccggccagcggctcacatgtctgggttcgagcctggaaggcatcttggaatctggaagaaaagagggagctaggctgcgcgagaaaggatggaaccaagacattagtctgatcaaggttcaattttactgtttggagacactcggttataaagaagaggggaggggcccattcccgccaaatcatcttcggagtctagttgcaggtgaccacgtgaatactccggaacagctaggcggcaggtagtagcagtgggagtggcagactccacccccgatgatttggtgataacagtcaaacctgatcagccagatttcaggctaaggggggggggggaggttacaatctataacactgttttgtgagttagtttggaaaggcctgcaatgctggctataggaagttatgctaagagtacaccataacattccatgattcctgtcacctcctcttaacaaatttctcctatctaccccgtgtgagccatcttgttaaaggcttgggtttccagaatataattcaatacttaactcatttgagcaagtgttccatgctaggcagtggctggtgttgagaaccgctgcagaagggagagccattcacgttggagggcaggttgccaccctaaccctgtgaactgcacttggatttagccagttatccacagaagagacggtaaagtcaggaggaggtcgtgttaagagagattccagagcagctggtgggggcaatggagcatggaaatgatcgtgcatcattaaatacatgtacaaatttaaaaaaaaagaattgtgtacattctaaaggttcaaagcataaattccagttttacatttgatttctcttttattcagctgacatgctgtttctcattctctccttaaatcagtttgatcttcatggctagtgttcttagggctaataaattctttgaactatacacttcaggtaacatattcttagttaaaggactcctgtaatccccagggtacttcagagaagtcccgagcctatggttgggttaccaacggcagcagatgtcagtgtgatttacagcagcaaaacaggtggctgtctgcagctgtgtccttgtggactctgttcccacacaattagtttctcgtggttttaagagagcgtgtccaggcaacgcctgcttgctaggaacccccatccctcaccttgatctctctcttcaaatcacatctcaaagccacatctgcagcagggctctaggtttgacccccacgcccctttcttcctcctgtctctgatgggcaattctgtccattttatgaatctctggcagggctggctttatggccagttccaaaataccttttaaaggtcccagaaattccaattttctaattaaaaaaaaaaaaagtcactgtttagtagtctccaaaaccatgattacagactcccagctctccgtttctagttttttcaaactgaaaaatgatacttccccagctgacaatttatttcatagcaggatcatatcccagccatgttatgcaataccccccagaaacaagtgacaatatttactgagaaggatccccatgctgaaagcttgttagaaggttgttacgttaacactgtccccggaaagacttgaatgagtgtccccacacacaggcagtcaatgacagcgtaaagactatcagcaagagcaacttggtgaattggtaagtttaactgacgttacttacaggagtttaggtgagaggctaccggcaggagcttgtacaaatgaagcccattgccaaatgcccactccagcacagacgatgcccacaaataccggaacaccgaaactcactgtacaacttgcaggcagctcaacaggatggagtgtcatgtctaaaaattctgttgtttctggttctcttccaggcagctcagcttgtctgaggatgtctcttactccaatataagctttgggaaggagaagcatagtgaatacactcagtttcaggaatttcctaaagattttgagttgttcatcctgagttttaacactttccctacaggatggaggctttcaccttcctctcaaacatcctgagttgtaagaaattgctctctgagatggaagtctttatctcagagaagttgctacagaacaaagggatttgttttgtagagtttgaactctatatataccagagtttgaactcagggcacacgactctaccaactgtgtagtctattttgccatgcagattcacaaaggtgtcagaaaaaaacttgtaatgggatttttttgtttgtttaactatgaccatatgcagacatggtatagaaatattctttctgtcattttagggcataaatggaaaagatggattaccaggtgctcaggtatgaaaaaaattttaaatagtataaattcttaaattttctaatttgtaagtgtatctttaatgctctaccatttaggtcagtcagactaatgattttggcaagcagtattttttgtttttgtttttgtttttaccattgatatctgttttccagggcatcatgggtaaacctggcgacagaggccccaaaggagaacgcgtatgtatatcactactatggttgccgttcacatttcactgatacaactgtctgaccatataccaaagcatgtagacaactttgattctccaaacatgccatgattagggtgtatatgaaacactgtctctactgggcatagaatgtgacctgtaaggaggtcataccacaggtgtgcctgttcgttgtacagacctgagtctacacttctatttcagtttggagagtggtttgctaccttccagagacacacttgccagctctaactaccacgcagatcctttttgccatctatgggatttctcacccacagagctactgctacttagagtttcatgcatttgtttactacttcgacgtttggttgtcttgtacattagagaggccttattggcatctacccacttgatacagtagcaccatcatctctccaactgtcattattcaaagcatctttagacatcactaaatgccttctagtgggcaaaactgcccaggctaagaaccactgacccacttactccactgacccccttattccacagacccagttactccactgacccagttactccactgacccccttattccactgacccccttattccactgacccagttactccactgacccccatattccattgactcacttactccattgacccccttattccacagacacagttactccacagacccagttactccactgacccccatattccattgactcacttactccattgacccgagtggtatctgcactttcactacaactctatgtgatgctgttgctgtcactaaaacttactagtattttctgtaatgaatcttatttttctagtaggactcatgttcctgaagccaagactttacttggcataagcctatttagggacattcttatgtaagtggctgcagatgtgtttgtgtactggtgtcttattcattaaggcttctttttattgttacatgagaaattcatgataatcgaatgacttataaaaaaaacaaaatagcacacgtttaagaagaaaaagtcttccaggcatctttacacagggataaatacttgatacttcaggcatatttcactcttccactcttacctacaatcaatatcaaatatatatgattttaaaattagattgacagtgttttgaaaatgtttgttctactggcagtcttcaatggctgttcacatcttcccaagtccctattctctaagcagttattttcctctccagttttttaaaacatcctttttcaggtgtgtgtgtgtgtgtgtgtgtgtgtgtgtgtgtgtgtgtgtgtgtgtgtgtatgcacacacatgggccacagcatgcttgtggaggtcagaggataacctatgtgggtcagttctctccctccaccatgtggcttgtgtggattaaatccaggacatcaactatagtggcaggtgctatgtgcaatttcaggcctgaaaagataataggtgatggataccagctcagctatctcgccaggccatagacacataatgttaaggtttcactatgatcatggaatacagatcatagattcaggtgtactaatatttttaatcttgcatatttttccaagcacgagctgcctgtatatcaataagaccagcattggtattttggccatccattttctttcttcctagcgtctgtgtcaccttctatatcttatgatcacattaatatctatgagtgttcatttattttcactattttgttaaatcaagacaaatacaggcaggcttttcagagaccagtaaggttaagggaatattatgtaaattccagaccccctctaacaccagcccatcacactcagccgagacctcacttcccgagtcatgtgactgaacactgaaaacgtgtgactgaaccacttgctatggtatcacagtggtatatgtttctcttcactggttccatatggaaacccatgtaaactatgactacagaagaaaccccaaaggaccttatgagtgccaagtgaaaatgcaaaaggagagacagccataggattcagaacaggttttgagtttttctaggtgaaaaacttctgttggtcatctccttttacaactacagaagagacccagacctgacatggcagtgggtgcggactttcaaaagtgacatcactctagactgaatgaagacaactgttgtggtcactaggatctatatgctgagtgattccgaggggtcattgtttgaagcattttacttgggtatattaacctctcggcattcccctagctaaaagatattatgaatattaatattcccacatgctaatggtacaagttggggtacagaatggaagtatgtaacccgaggatccacagtaaatggatgccaggatgaatcctagacttttgctcttcaccgcagctgaggcattgctggaagaggtgattccttacttctctccccaaacagggtgatcagggaattccaggagacagaggccctcaaggtgaacgtgggaagccaggtcttacgggcatgaagggggctataggccctgtgggaccagcaggaagcaagggctccactgggccacctggccaccaaggccctccaggcaatcctggcatccctggcactccggtaagtggagcccctggcttatactgaccatgggcgtttttaataatgaaataaattatggccattttgaagtatataaaataagctggtctgcgccattatttgaaagtatatgccaggtcctctgttgacacctccctacgttttagatcttcacagccaacctggaagactagaatccttttccttgtgtgtttataaatgcagaagcgcaatgccttgatcaagatcaaagaattagtaagagagaaaaatccagatctggctgactccaaaatcagtttgtttcggtttgatgcacaggtttgggtttgtttagtgtgactgggggaggggtggtatttgaggtgggatcctctggcctcagcctcccaagtgctggggtgacaggtatgtaccacccacacatgccccaaaccatgctcttacaattctgtctgtagttgctcctcatacaaatataaacttctatttcacactgagactctattcagttggtccctgaacaaatctgccctaaaggaggaattaaagcaaaagtgtgatcagagcagcccttatctcactgatatttcagggagattgatcaatacgaggccattcacctgaggagtatagtttgaaaacctctgtgacaggaacaaaggaggatcctggattaagtaggagaggtaaagaccgtctctctctctctctctctnnnnnnnnnnnnnnnnnnnnnnnnnnnnnnnnnnnnnnnnnnnnnnnnnnnnnnnnnnnnnnnnnnnnnnnnnnnnnnnnnnnnnnnnnnnnnnnnnnnnnnnnnnttacctcattgctaaatggttcctgcagaaaacctgcaaaacttaactatctgtttctaccaaaatcactcaattttctctctctctctctctctctctctctctctctctctctctctctctctcacacacacacacacacacacacacacacacacacacaaagtaaaataaatacaaataagaaacaaaaaaaaaaaaccaagaaacaaaattccacaaaaactaaaatcaaaacagtcaaaaaaaaccaagaagaagacaaaaagatgcccaaacaaaataagaaatccacaaaaataccactgagtttgttttgtactggacaattacatctggacacagggcttgcccttacatgtggttttgttgtgacactctactccgttagagagaatcgattcttccctttgccaacaggcatcaactgcaaatagctagagtcttggttaggggtggggcctgtgtccacttccctcttggtcccttcatcttcatccaagttcattttccccatgcacatctgaaacaacgtaacagctctaagaattcagcaccttatgagcacattgagtgaattgtcttttttcttttttgcatttctaaatgaacggatttttgtgaatggagaagctcaccatatgatcagcccattcacaggcttaacatacaaacatgaggaaggactctgtagatagaaaagatgggaaactcaccaaaacagggacttttaaagattaagcacaactgcctggtttatgggaatgacagggaccatggctgaaagtcacattgcatggagattttccactgatctttccagctcctcatctggtcacatcccactgggctttgttaagagtgtgattggcagtagacatggtctctgcattacaacttctagtgagctccatagtgtcttctctgccatccatggagctgaatacatgaatacaaagaatggtgacaaaatactttgaaatcctggccatcatgagaccattagctcctctttgaaaatatcaattaagcatggctattatgaatgttgggtttttatcaatgggttaaccattcagccactactacttacctacttacagttaccaggtatctcaggcattttctactaaacatggttattatatttatgttactatctaagttatgagacaggcaaacatggggaaaacattttataggataatcctacgatccagcactccatttggggttttcttcctttggagacacatgatgtcacttgctatagtcttcactaggaaccaagagtggatgtttaatggttattgcttggtaacaccgtggcattgcttgtgccttttaactgtatgcaataaagtaacagaaaccattatcttctagttatctatagccacatttctccactcataggagaaatgttagcttcactggttataatcccagcccacagcttgtaaagcaactatgatcttcagcttatcctagcatgtgctctaagaaggtatttactgcccaaaatagcacactgccagaagcatttcacttgacaaacatatatgcacaaaagtatgccaaccccatctctgtgccttatccactgtgcgctgccctgttttaacacacattctttttcttcctgtaggctgatgctgtttcatttgaagaaataaaacactacattaatcaagaagtcctaaggatttttgaaggtcaggtttgctttataatacttctggattttttacttcccatccccctgtggggaatcccttcagtgacattcttgaactgtgacagcaatcttagcagattatccgtttcctggaggggcagctcctgttgacagtacacttaagttaaattttctgtttaaactgtctttccgtgtcgcttgtgaataagacaacacaggtaaagtaccttctgtttatgtaaccacctttcaaatatttcagcacccatcggtctcgatcttaatttccctatagagtaagtacatctagctcccccatccctgacaccctggggagatgctggattgatcaatgagtgttttaactgaggtgggttacagtgtcttttgatctagaccagggtcagcaaacaaaaactaccagccacatctgtctcctaaaggcagacttttatgtgacccacagctgggaatggttctcacatacgtacgttaaagggtttcccacctgaaatccagatctccagtcatgtgttttgggtacagtcatgctcacttcttctcatccttctccacagcaaggcaaaggtgaaaaggtgaatagatgtggcagacttcctgtagctagcaaagaattaagtattcattatctgactcttttcagatagcccagttctgcatgtttaagcccaaaataacactgttttaaaaacaaaacaaaacagcatcttatatccctcactggtcttgaattcttcatgtagcccaaggatggccttgaactcctgatgtttcttcctctaccttgccagtgctgaggctgcaggcatgcaccaccatggctgggtcattaatgtcttgctggggctgaaacctagggctacatgcatgatagcaagcactctgccatctgagccgcatcccagcccatcattgctttttctaagcagttaagtcttgctgataactccttctgagtcatcgtttaacagcattgttcttccctctgaaaagtttgtaaaagtcaagagtttctcattattatctttaaaatcttaaacaggtgaactcatgtttactatggtaaaatctcaagtgacttcggtaatatagcactaaatgcctctagtctaaggtcctagtcttgacttccagcaacaaaaatatatttttaattacattaaattaataaacaaaattcaagtgtttatgttctgacatggtccaacctgaacatagtctctggtgagaagtctggtgtaattctaataggtcagcctttatatgttacttgacctttttcccttaatgcttttaatattctgtctttatttagtgcatttgttgttctgattattatgtgtcgtgaggaatgtcttttctggtccagtttatttggagttctgtaggcttcttgtatgttcatgggcatctctttctttaggttagcaaagttttcttctataattttgttgaagatatttactggctctttaagttgaaaattttccttctcatctactcctattatccttaagtttggtcttctcatcatgtcctggatttcctggatgttttgagttaggacctttttgcattttgcattttctttgactgttgtgtccatgttctctatggaatcttctgcacctgagattctctcttccatctcttgtattctgttgctgatgctcgcatctatggttcctgatttctttcctagggtttctatctccagagttgtctccctttgggttttctttattgtttctacttccatttttttagattttggatgttttttttttcaattccatcacctgtttggttgtgttttcctgtaattctttacgggatttttgtgtttcctctttaaggacttctacctgtttagcagtgttttcctgtaatactttaaggggtttttgtgcttcctctttaaggccttctacctgtttagccatgttctcctgtttttctttaagtgagttattaatgtccttcttaaaatcctctaccaacatcatgagatatgattttaaatctgaatcttgcttttcgggtttgttggggtatccaggactcactgtggagggagtgctgggttctgatgatgctgagtggtcttggtttctattagtaagattgttacgtttgccttttgccacctggtaatctctgtccttagttgttacagctgtctctgggtagagctcgtttctcctgtgattctgttagcctctgtcagcactcctgggactccaactctctcctgagtcccagtggtcagagcactctctgaggacaagtgtgcagaggtctggagctcagctctgcctcctggctgaagatgaaggcctgaatggggaccctgtcccagaagctatgttgcttctgcctcccgcgtgctcttctgcggagactggtgtcccaacatgtgtatctttagttgcctgtaaccacacaaagaaaaacagcaggagatacacattttttttgcattgaaatctaaaaaatcctcatctcacttttaatatttacaggtgctgctgtcaatgataaccctttatctcaggaacgaggttctgaacgcaatttcttaaagatccttgctatcaccctatttaggagttcagaaatagtcaggcagtggtggcacaagcctttactcccagcacttgggaggcagaggcagacagatctctgtgagtttagccaacctggtctacagagagagttccaagacagccaaggccacacagagcaaccctgtctcaagaaaagaaaaatagttcagtagttagaccagcatctggaggctaattggtaatcacagaaaccgggctggagagatgtcccagtggttaagagtatacgtttgatcctcagcctctacatccaagtgctcaaaagcatccttaattccagcctcagagggtcagattctcttttcctgactccaaggacaccagttctcacactctctactggccacgtacacacataatttcaaaatgaggatcattaaaaaaaaaaagtgccagaaactataacctcatgttatcagaaaaagaaaaaaaaaatgacatgttgagacacatctggcaacaattttcaaggttctgttcacactgtaaaggtgtggcccatgacatccttttctgtgcagtcagccaaggaagcgcccagttcttaaccctcgaagaagactccagactgccccagctagccactctgtagctactttcatgaaaggctgtgggtctcctccagagagtcagggaattggttctggcaaattcacctaacttctaagtagctcagcctttaagcctgttgttctttccctttggatttctgctcaaccactgagtcgccccagccaggaagctgacatctatggagtcatccccatgtctcctctggcttcgccgccatctcctgctgcctctcacctagagttctagtgaatggcaagacactctgccctctggagaacttgtctacctcgaaagccacagatagcctagtctcaagatacttttctcaagagacccaatagaaatcactttcactttaaacttttaaactctaattccacgtgtgatgttccctctcctaatggatctcctgacaccagcctggcagatctgtcttcatccccacacaacgtacctgaaacctacagtgtagttatttggcacttaaactaatttgccctcaaatcattttcagtcagtccatttgatttttttttccactcagaaatcacccttgctgtggcttctgaacaccattttccaagaataaaaaagcagtgctccattttcacaaatcatactgttgcaaggtcagtttccttctccataaacggggagattaattgtcacattttaaagcagtttcagcaaaatagcgcagtacagttaagtgctgggtttcagtcacggccgtctacagcgtgttccttagaggtttcactaaagaagctatcagtaagtacccctgctgtctccccacactcttcttcatgttcagaacctcaggaaggtcctccctcatcaacaggcgcccaagcatgtcctcgggagctcccagttggtcactgtcccaggtgttcactcagatggctcctcttgtgaaactctaagccaggattcatgttttcagttctcctccagggattcatcagttctctttgaacttctaaggtgaccctcgcagaactctcaccttgagctatcctccagaccactaccctgtccttcagcaagctaaatgcaccttcccaaacctgacaaatggagggaagcaattctccatgatctcatctgggttccaggtggatcacaatgcacaagcatgcattcctttcactctaaagttagatcaaatccccactttgattggccattatgtcgccctttttgcaagcaaggtagtaacgtagagcagagatgggtgctatccagaagactcagcttagcatcttttgtccttatgagggcatagcagttgacaagaatactatccacataagtcaggagcttaccatatcagagaagtgtaggttttgctgtgacctcaccctacaatacttgagcatttgtatatctatggaataaaagttatgatgtagtatatagaaactatcagcctctttccattctttaaacccccaaagccagacctgcatctgagggaaaagagaaaagttagggttatttttgcttttggatttccagtgttcaggaatcctgtgttttctccatttttacatatatttcatataatgtatatgaatgaacatattatcctattcaatttcaaggtaacgtgtctttcctctctataatagctacaatatttataagtgtgtgtatacttgtgcacatacgtagcaaccagtagatacacatcctgggagatacagttcatgctgtccacagcatagtgtggtttttccatttgctgcttctgtttgtctgagactcacacagaatcggtcacatggcttacaggactccctctatctccaataacctgtggttgtctgctcatacagaaggacaggtgctgaagcctactgaatgtagaacttgccaactgtggttttcccgtagggtagctagctgggcattctaaatgaaaatctttccatttcggtacccttaagtctatcttgtggggatatttatttattaatttatttattatactgttaaagccagaatctcactgaagtctggggctgtcaatgcagagatagtctttctcccctttattcattttacgttttgattaaaatataattatctcactttcccttccccttttcagaaagggaatctttggttgctgggctggctggggaagaccctgactagttgtttaaagaaagacaaacaccccattggctatctgatcctcagcttccaaaatgttgctgctactttctcctttcagggtcctctcattcttgagttttatgactttacatgtttcctggtagtttttcaagtatccacaagagaattaaagcagatgtgtgggttcaaactactatctttacccataacatttcaaaccaacatgcttacaaaggctgtggatggatttagtattatgaactacaaaataaatgagtccataatgttattaaaaattaaaacaaacctggggaataattcagatctcacaaaaacttacggttacattgccccataggagaaaacctacatataaatttagtcatgtgggaaagccatgggaaattatccaaaaaagtgatttccaaaacaggttatttaccctgtgagtgaattttattttcactttaaggctaagagataacaatattattaagtaatgagtacttcacttgagaaatacatcatatagccaacggttccataatggaagatcagaagaaaaggagataatgttttactaagaaagtggacaattaaacatgaatagacattaggagaaaaggttatttttctttaaaaaaaaaaaaaaaaagaagggttatttttctttgaaaaacaaagttacaaatttgatttgtaagacagcaggcaggggagagccaggtgacacctgaatgtctcttacttcttcaatattcatgtcttcattgtcgtgaggtcgttctcccaagaaccaagtcagtctcgcctatcacacagctggctctcattttggcctcttctaacgtctttaatcttctgcttcgttagaaagcagagccaaaaaaactgtttaaatgactgaggggctctgaaaacagagggaaggcgattaagaatacaggccttcagaattcatttagatgctcagaaactattattttcaattatagtgcattagggtaaggctcagaagaggtaattagcttatgctaaatatttgtttcttggtgtagcttaaagccagttcatttacagctagtagtaattctttaaaataattgtattttactaaaattattgtttaacccccccccaaaaaagtacttgtaaattcatttcatagcttaagaggaaaaattagaatggtgactatttctgtttaggcatttaaggtagtaggcgtgtttcaaaccatttatttattggtatgtgttcatgagcacatctacgtgtgttggcacatgtgccatcacatgtgtggaggccggaataaaatttgtaggagtcagttccttcttctaccatgtgtatcacagggattcaactcaagcgctcaggattagcaccaagcatccgagacagctgagccatcgcagctgcaagttagctttccaaattacccttgaactactaagatagtttgtctttggaaaaaattgcgtggtgaagagaaacattagcaactttgtttcttcttttcatagcaagactgtacctattctagtttctctattttaaaatcaatcatccatatatgagacttttacaatgtcaatgtataaaatataaccaaagcaagtttaaggggcccggtggcagattttatttataagtgaattcatgatgttgtcaaaacggattccagattaaaatactaagtattctcttgagatgaaatttaacggagtaatgctctatgtgacattaataaccaacaattcagtgtgacaagaactgtcatgcagcacctgacagatttctagtctttttgtctcagactattccaaaacagctgaaggtgctctgtggatatgcctcataatatatgtgcctataaaaacatgagttcttacttaaatgatgtttaaatattaaattctttgattctggtacaatagttggtgagaaagcccacaatccctaatccaaggtcttgcttcaaagaatgtttagtcaggtatggtagaggcccaactagagggccaggagttcaaggccagcctgaagagaccctgcaagagaccctgattttttttttaagtaattaaaaataaaatcaagcatgttttgttcagttagttagtaatatacccatttcagaagttaattttaaattgaaaattcttattcatggtttcatacttagagtctttgaacttctctgttgtatagttcttttaagtttcattaacacaccaactttctcatgcctttgtttttgtgtgaaggggtgctgtatgcagggtaggggttggttggaatatgtcccatgtggccaagtacatccacagaggctacacaggatgttgaatttcctcctctattatccccaccatcttcccttgtgacatggcctctcttggaacctagattttgctttcctgctaggttgatgatcactaagagtccctgtgatctttctgtctctgatctcctcagcactggggttgcagaggcacacaaaccctcacagcttttacatgagtgctaggaatttgaacttgagtccctatacttggcagcaatcacccttatccactgaataagccccaagatgctaactttcctcattgcaatcttcctctcatctcaatgtatcatgccattaatcactgtctgagacttagtagttgcatcctgctataccaactatacagttgttttcatgagcggatgataaacccctaagagggtctgttcagttaattattctctgtcatctatgggtacttttgccaggatgcctatatacggttttgtgttccaggcagtttgttaaatgcataaacgggaaagcatcctgtgttaggaagtacttaatttataaaggcgtatcactcgatgcttaacaaaaccatggcatatatttatttacctgctcttcctaacaacacagataatgtgttcatttcctgtgatttgtcttctccattccaatgttttcttgggctcacagagacatgcattttatcgtttttactgctgccattacattcaaagggcggtatctcatctgcagcaatgatgcatctcctttccttttaccatagtcattctcctaacgacctgattgaataggggacacaccagctggacatacaaccagaaaatgcataataatgggggaatatagaattcctcctttaaaaagtaaaagtaaaatgacagcttttcagtgactaaatgtctctgtgggaaaggcagtattgtttacatcatctgttgacatgtaagaaaatgcaatccctacacacgttagggagtcggaagggtcaacaacttgaagctttgcttagtcattttcttcagcctctaaatctggggtgaggtcacagaaaggaccccagtcagctgcaaccatttcagtacttgactagggggaaagggtagacatctgtaagctcacaagcatccctgtacagggcagcatgttgaatgtccccactgcatactccttgccaatgggcttcctcgggggttaccagatgggcagcagccagagagctcctttatgaccactgcgacacactgcccattctgctttttctctttcataagaaatataaatctagtcatcactcaaaatacaggggtcgggttctcaccagggaagtgagcattaaagaacctgtgaatatgcttaaaattgctacacatatatggatagaaaataccttgcatttgttcttaaaacaattcttaaatttttctccacgagtcataactgaaagttgattagacacgtgttctgcactgctgggttccaggaccactggtaactcctcgaccctctgaacaacccagatcttctgcttctctttaaacaactccatgcagtttattctatatattttatcaaaaaaaaaaaagaagaagaagaagaagaagaagaagaagacaacaggcagaccagttgatatagaatatgtgcttcagttaaaaattgattttttttcagctttgtgttaaaaggtttggaaatgctttgacataaagactcttccatcacatgatgtattttttttctttcgtaaatgaagagaggatggctgtgtttctatcccagcttaaactgccagcagcaatgttgtctgctcaagctcatggaaggcctggcccaccagggaaggacgggttacctggacccccaggagatccagggccccaaggtaaggctgaaaatgtaatacgtgcttgcatagtcctcaatatttatagctgcaactaaaacatatatatatatatatatatatatatatatatatatatatatatatatggtgtgtataaaatggcttgttgtggactgtcttgttaataatttattttctaatgataaatattaattattactacttcaaatttaaaatggatatacctgctgttctaagttcattttaatgatatccagagtaaccataatactgtctgcttctctgtcattgtcacagaggaatcctagagttgtttctgtggccatcttactgttatgtgagattcctcatctgagagccctaaagaaactggaaaacaatagccttgggagacactgctacaaatagtcattggggctaacacctaattggggaagtttagactgatgctatagtagagttttactgatagtgacttttaaagtataaatgtaatcttttgtttttatttctgagaatttcatacctgtatacagtgcaatattatcatatctgctcacttcccccatttaagtattccatgccccctcaacatgggtcctcccaaatccctctctttaaaaataaaatgaaataagtcactaagtccagtcggtgctgccatacgcacacaggtgtagtgcatccagtggttacactggaacatggaaggcctactaagtagccacttcctccattaagagtaagttctccttccccagcaagataccactgcccctagttcccatataaggtatggggcctgggggcaatctacaccttctttgtcagaatctttggatagcttaatcttggtaaggtcttgggcagataaccacaatgtcctttgaactttaaagggtactttgtgtgacttgtaaagacttcaaatccaaacttatgttggcaaagaaaaaaaattggccacttatgacacctggagaagacaaatgctcttgagttttgcttgattcggttattctgacacagctgttctgtaaaaaaatatggttagccatctgcatactgactagatagacctgtgtttagatgattcatgaattctgacagagaaatgccaaatttagtgaatatgaatcataaaaataaggttagagaagctacagccacaggcacccttgctcccaccaaagttattcctaagcattctgggaagtttaccttgttggagttgaattaaattctactcaagaatccattttaataaccatctgtgcatgggatccacttgaggacagacagtgcatccccattcccacgttcccaattcttataatttctgccagtgtgcaatggttggaattctaagggtttttcagaggatatataaatgctagatcctcaacagagagaactgtttggtgggtgggtgcttttggttgtggtttgttgcagtttgttaggtagtcatgcatgaagagatgagaaaaagaagttagatatccggactgtgatcaaacttgcccccaaggagctcaatgcccctcttcagcaggaaatagcctaacaatattgtcattcccttcaatctgttttttctctcctgcctaacattagggggttgatagggtaggagaagatgggtagagaaggtgtgtgcagaaggtgcgtgtatacacccgtgcagaaggtgtgtgtatacacccgtgcagaaggtgtgtatatacacctgtgcagaaggtgcatgtatacacctgtgcagaaggtgtgtgtatacacctgtgcaggtgtgtgtatacgcccgtgcagaaggtgcgtgtatacacccgtgcagaaggtgcatgtatacacccgttcagaaggtgtgtgtatacacctgtgcaggtgtgtgtatacgcccgtgcagaaggtgcgtgtatacacccgtgcagaaggtgcatgtatacacccgtgcagaaggtgcttattaccttttattcattggatctcctctgaagtcagggggcctgagaactggaaaggcctttaaaagccatctgaagatgtgacgctctaaccacatgaagaataagccctgctgattcaagtaaaaaaacgatggatggatccttcagatctcagtagtccaagagaatacacaaaatgcaaagttgcagtgacgtggtaaaacagagtttagagcagagtcaccttcccacataagcccctagctccaggtatcatcccaagccttggaggtccatcacaaaggttctcagtcagaggcaataccaagtcaacaatattagtgaggtctttgaaaaacaaggtttatatttgctactgagtcaactgatcaaaacatgaccttcccccctttgcaatggatttctgtggggttaacccactgctatgtgtgcaatacagactattgtttataagagagatctgaggtgtgattcttaagtttgaaggaattctccacatggtttccagttttcttaaaacaagttctactaaaatagacaaaatgtcccaccagagtatctgacaacaggcatacttagaagtggctgcctcagcctttagcttcccccatgggacttctaacagtgaatatatcttgactacaagccgttgattgacacttctactccttataatgttaaagttttcagaaacacagcagaaaatcaggtttacaaaaaaaatgagattcatattaaaagaattttgcctatagtcatactgtactggtaaccctaaaaccacaaagaaatctcatgggagaagagaaagaagaagggtgggaggagaagggaaagaaaggagaggagagaagagggagaggaggtaaaggggggaggaggaggaagagagggggaagtaggagcagcaggcgagaaagtggcggctatgttggatttttgctacttttctgggtgggcattcaaaatggaagggttttctctggtaataagtaaatactaagttctcagaggatgaagccatatgtgtgattccgatgctcttctctctcctatttaaaaagaaggaagaaaacatccattcagcctcaagtgcgcttggctggattagccctctttatctggcccacacaattgagtttgacaaaagggtgaaacgcaaaccacagcccagacaggggcaggaaatgtgcctgctgcactgttccagggtacactggccacttggacactgtgtctgctgggagcccatctaaaagatgagtgggtttttaatagtacctgtcaggaaagaaatccattttaatttaaactaagtggcaatttgaaatatgcaccaggaaaggggtctttttatcaccttcattctctttatatgtttaaggaaggattttaaaaaaaatcaccaaccttgtaaagtgtcctgtgtttattctgcaaagcaggacattgtaaagacaagggaggatttgatgtgaggccatcagaaatgtgcccaagggagggctgttctcctacaaagacttactaatgaaaaatggtggatattcttccaataaccccatcttctgaaaggacagtgagtgcttattagggaagattctaaggaggccattttgtttgcatccttccagactcccaagagagtgatgactgatgtcttactaaagtccaaagcatttctatagaacttttatctcagccctcatgctaggctgtgactgtgaacttcccactgtgcagagagaaagcactgcccagtgagcttttgcagaagagtttttataaaatgtagttgatgttttcaaaaaagaattgacggaaatcttgagaaatggatgccacatgtataaaccccggtcatttcagaaaaaacaaaaaaaaacaaacccacaggtagacttaatagatgaaaacaaggaagaggagggaaatggggagagatgaggatgaggaaggagaggaggagggggagggggagactacatacacaccattgattttaatagaacatactgggagtcactgttcttctttttgagtttttaaagttcagatatcatcagcttctaaatccaggaaaactttttttttttttaaatccagtgacccatgggatagttgatagttcttggatagttctgacctgtccaaaagaaaaaagaaaaaaacttagcagttgaccgcccttgaaaatgggacatgattgtaagtcaagatggccaaagggttcagcagccagttagtggagcaagacaagggaagctaaacacactctgtgtgtatgtgtgtgtgtgtgtgtgtgtgtgtgtatgtgcatgtgtgtgtgtatgtgcatgtatgcatgtgtgtgtgtctgtgtgcatgtgtgtatgtgtgcctctgtgtgtgcctgtgtgtgtgtgtgtgtgtgtgtgtgtgtgtgtgtgtgtgtgtgtgtgnnnnnnnnnnnnnnnnnnnnnnnnnnnnnnnnnnntgtgtgtgtgtgtgcgtgtgtgcctgtgcatgtgcgtatagggtatggccatacgaatgcaatgccggcagaagctaaaactgtttctgagttcatgccgataatgctgcttctccactcaccatatattaactatccagttcacatttatcatacattaaacatgaatacgaggttgggcacagtaaagcacagagaatcttacagatacacagtgatagattaaagtcttagcaagccaagctttagtgagatattgccactacacatagtacttaaatgcactattcatatcttcatatcttctcttatatgtttatgatagatgtgtgagccttcttcaacagaaattccgacgggggtctaggtacatgtaatggggaaggcacacacagaaagaattttgttgtgtatgagaacagagagcatatggatacaggctttagtgtaataattaaatgaattaaatagttaataaataactaattaaataaagtaaaggagcaagcaactcataatctcaatatcagcagaacacaaatttgagtcaaatcagtttaagataaaagcaaaaaaggctttcctatgacatttaaatgctaaggaccagacattttagctatgctgtgagagaagagttcgagaaattctcaaggtacttaagatgtatttttttcaagttcgacttttattatttaaaaaaaataaataaatctcactatcaaaatcgcggtttgttttaacataatgcataattgccaggttctccatgttttatcacgctcaagctacatttgtgtttaatgcataaatgtgagataaatcctaattcatgatgagtaaagaaatagcgttaacagcaggactcgggaagcagtcctttcatgcgcatcagtgcggtacacgcctcctttcacgcctccttttctatctgtctctcatccaggctaccgaggacagaagggagaaagaggtgaacctggaattgggctgccggggagtccgggtcttcctggatcttcaggtaatagacttattatctctatgcaaacagttctctcagaatgggccttttctcccctgtggacctcatgtgttcagctgaaggagagagggaggcaggcgggatcgcatgtgacccaatttctcatggtctgttttatttcctcagcagtgggtttgccgggctcaccaggtgccccggggcctcaaggacccccgggacccagtggaagatgtaatccagaagattgcctctatcctgcacctcctccccaccagcaggcaggcgggaagtgaaaaagacggaggaagacatcgcgtctagtgctatctccaggccacttgagccgccactgcaggcttcacaaccacgtgctctcaaggcttatgagtttttggactgctttattttagttttctgatacagaagcagacatccaaagcaaccatctgagtcctattctgacagtaagagcagatccgtattttcagatgtttgccaacttctttccatatgttctgtttcattgtggctctgagttctacggcttcggaagaaaaatgcaagcgagcctgtcatgggctcttcagaaaaaatcacgtgagacgatttggtacacagacgacacagaccttgtgaactcgtcaacgtgactaggttttgattcctgaattttaacttttctaatttatcttgattattttgttcatatttaaatttactatcgttactttagtttttctttctgctcttttgagattgaagtagtacattactgctgttgactgtcttaggactgatttttacaagaagtcctatactgtcctacattcattcgatttatgcagaaaaaaatatgcaataagagattcgcttctaacttattaaaaacaaaactatgtgagactgtttatcaagaagcccccaaactcatcatagccaacatgcttttggctttttttggagcacgcctcactgacacgaacacatgctacatttaaaaaaaaaaaaaaaaaaatgaagaatcaacttgaccctatacccaagtctgtgagtctccgatggtgaactaaaagtggtttgtcttctcgaagccattcttggtggtaaaggcgccatgctgtctttggtacctgacaggttttagcagcctagcaagacctttgtgcttctttatgcattcttttttctgactttatgatccccaggcccgacccgccatcagagaaaagcacaggatttgtaatgacgcagaaaagaggagtcctcgtcttggaaactgagagcggagggtcagcaaaggcatgttgagtgagtgaagccctcgtgctcttaagaagattaatgttttctcagaaaccatcgaaaggtccagctcagcagaggaaagccaagagacttcacccgaaagtcactacgagcttcaaaaccgcgtgctcggggttagggatttgacttcgcagtggagagcttgcctagcaagcagcgtggccttgggttccgtcctcagccccgaaggaaagaaacaaacttgctctgaaaggaagcaaaatcccagtggtcttggctgaatgtctttttactccctacctgttcattgcttggagaaaccttgggtggggaaaactgatttgctagaatactgagcacaaggtacaagggctttgctgatagttagctggtgggtaccactgacgctgagagcatgccaccagagcccttcagtcccatgcctctaagagctcaggattagaggggatgattttggtctgttcattgaaaaaagacaatgggtatagaaaagcaacccactgaaagtgggaaaagctgtgaacagtgttttcctgagaagcatgcctgacataaggcagcgtttgtttaaatgcacccatgatttgaactggttttcattataaacagatgagctgctggcccggtactgtcaacatggctgtgcataaaataaccttttaggtatttcatattgagttttgctgtatatttcaatccaagtttatttattttccaagtctactttatttatttccactgttttgggcttgaaattgcttattcctttgttttcttttgtattcaatacctacaatggtgctctgttttaaacttgcacaattggagtatgcaaatgtttgcttatgtatcttcatagccaactgataatctaccccctaaatgtatataaggtgaaaagttggtgctatgtgtatattttgagcttctaatttgttgaattttctgaaaacatacactttacctgacatattaatttacttgaatttgctgtatagcaaagacttttctatgttttcaaagattatttttcatattaattgacaggttatttatccttttgcattttggattattcaaaaatatttattttgtaattttaatattttcacggacatttggctggtggtgggcgattagtgtatttgggtgtttgggtttttttgtttgtttttttgttttttggttttttttttttttttggttgatcaattgatatgatgcaactcattttcttgttttgcaaattatatttacttcagttccacagaacagaattctttcttacaaattggatggttcttactcctcctttttctaatttttgtgactgtgtgactggcttatccctgtttcaaggatttagatttgtccccatggcttgaggagtctgtcacagtgattcaagctcatttttagagcttgggacatgtgactgaatctgacataaccagagagatgggactgggttatacagctcaaaccatcaatctactgttattaatcttcagattttcttttcttctgccttggctctatttgtaacaaaaggctttaaggagcacttggtcaggctaacacaacaaagaaattggcaggttctcagccccttcgtaaaaacgaacaggataatttggtccccaaagcaggataaggaatatcccactaactaaccatttgttcctggtattgtttatagcaaaggaaaagaattatcgattttctctcattttgtacttcagatatgctttaaatacaaaataattacaggccaaagtggcaatgttaaaactgttttttttttttccataaacaaggatgtctgaattcaagtcctaaattatgccagttcagttagcaatttttggtagaattttcttatgtagagaagatctgtcctccattaagatctgctttgcttttagaatctaaagaaagagaatatatgtgtgcattgttcctcccagctgaaaacatcggctattactcctaaccacagtggaagtcagtcttaagttcttcaacttcttaccttaaccagagctgtgcaatcacttcaaccttgtgtggtcccccccccccacacacacacacacactttggaaaattaaacctttgcctacttatagagattaaggaattattttatgatatactgcctaaattctagtttaatgctcagcttataaagtaatttccatgactatgtcttagacattaattatagtttagctcttctgcagcttctcccacttcagagaagcttatgatatacctcctattgtccacaagatggtgtctgaggcaatttgttcagaactgaacacagattcacagaagcctagaacctggaaaagtctggtgaacaattcagtcacacattggcctttgcactttatttttggaaatattctttgtaaattatatttcattttactaattagtatttttacaaattttcagtatctttgtaaagcaggcacaataacttttggtttgttgatttttttcacttgtatttattgactgtgtgtatacccatacttgtatgaaaatctgctataaggttgtcttatgctactattgtattttagtgactaatgatcacacaccggcacacaactgcattcatcctcccatgcacacaaagcagatactcttttgacaaatgaaaacacttagcttaccacaagaagtagacaatgtatactgcatgatgtctaaactcttaactgcactagataaatttgtacagggtctattttcctagaaacatggcactatttaacaatggttttcagaattccatctttttcttttaatgccatcttttttccagtgttggtaattctatccaagacagaagtaagtccagtgatgctgaggctgtctgaatgacctttgaatgacctttgaatgacctttgcatgacctttggaagagctgagcagagttgacctttgcccttgttctgagttacttttcctacttgttatctgcatctactttgtaaagattcatggtgttttctatcctggctacatagcagggactacactccccaccctggcccttttactcctcttctcccagagattgaccagacctctatgaggagattcctagcagaatttaattattaaccctttaagtcatgtgcatcaatgtcaagtcgatcataggcattcattcgtcagccagtaggtatagtagcatttgttgtgttcaatttgttcaatgaagaggacttacaggaatcaggaaaagaggttatctgtgtttctatttattaatgtagttggagctatcatggtaacatttcactgagcaaaatcatatagaaaatttcatcattttggttgaattgacctcagctccaagaggacacagggaacactagggcagataagtagacccagcaagaaaaaaaattatccaaaagatgatacaaagctaggaacatctacatggaaaaactttcaagattaattccagtagtgctttgtggtagaactcaagaagtgaacttcttgcttcagcaatgtaggcatcactaaactcaggaataacaacttaaaatttaactcaagtctggtgttggcttgaccataataaacttacgagcatcttaaactaaagatgcaattttacaactttttattttgctgtggtacttaaggagttttgggagaataaatactttgggtgaatttaaattccgattgtgttacagaataactacttattttaaaaataatatttggggggtgtatttttatccattttgtttgttcactatcttacctcatcatctacttaaggtttaattttattacacttatgttaagtggagtgctactccgtttattaaaaaccctggtgaatctatgcttgcaggcattgcctcctctagctttattatgtgcagtgaacatgtttcctctctcagcaataaaggagtcgactataaatcagggaactccaaggtgcgattcttagcactgtgtctacactttagcccttctcagcagccgaagcgggagaacaattctattctgctaagtcttagccacactgaagaaacttcataatcagtctcacgccaggagcaaacccacagcatccagggaacctgagactgctctattccaagtactcacagtttgaacttataacctacctccctggcagctcatgaaaagaccagtatattgatttcagatgagaattataaacaacaccaacagccagagggagcccaaaatgatgctctcttctagcagagactaaaatcaatttagactctttgctggagagaactcgaagaaagctaagaagcatcacaagtaattgtccccttttaataagtttgtcagtgtgtcaataagtatttaaatgcacactgtgttttctaacagaaattaattatgataaaataggccagtggctttgtgtgtctctatggattagctaatgacttaaacagttcttgactgttcttaccttcatatttcctcatgataaattaagtaggtgctctctaaggaatattattatcttctcttatgcagctgtggacttggagaacaaataaaaacacatcaaaacagacttaaataagaagacacagatcccaaaaagtttcttagagtcaatttcccccatttgttctctttagaaattaatgtggaatgaaaggcattatacaaaaacatggtgaaaagaaagttagtgttaatcgccatttattaagactacaaatatttatcacacagaatccttccaacaaccaaatctatcaaatatgctacagttcttcagatagcattctaaatacaatttgagtacgtatattgcatatgcggtattacaatcagccaatttatctaatatattctgagccaacatatatcacagttcagcatcacaagtttattttttaaaaaaaaaacttaagtacatacctggaatgtattttactacataaaatggcaatctacaagtcttaagcacaaatattatcttgtagttttaagatggcttaggaccattttcatttgtaccagaataaataaaggcaattcccttgacatttggaattatttgtgtcatgagtgattttcaacctctactggttaattttaaacctgaatttcatacctcagaaacactatgatatctccaaaattaaacagtacgaaagcagggacttatattaagcacactttgggtcagatctaataatgtttaaggattgcaatattggtttaaccagcatgaaatataaagtattctgactgacagacagaagacaatcacccagtcgcatcagtgaatttgtatgctcagactgcaaaatgatttccacattccttaaccaacctgttggctatttggagtgagaattaaatcataccgccttgggagcactgagcagaaataagccagaaatttgctcttgattaatacgttagtgtctaagcaactttaattacctacacattcccctcttggcaagttctcaggtggacactatccaacttttaaaactacataaaagctgtggagatctctgctttgctaggggtgtatatgaggtctgcctgtattcagcagctgtctttcgcagagagggttcactaggcaaaacttgtttgctagtttttcgtcaggaattggtgcatctgtaagttgtttaatttaactgaaatttaccatagattgttcttatcatttggaatgtgcgagtttcgcataagcttctgtaagtggctgttcccaacactacttactgtctctgtggagcttgttatacagcctagatacgcatcaggtttctgtaacaggtgggtgaactgatatttggatttttttaatttcttacaaatatgactttatagaactgaagaacatgtttaattacataatttttctttttctgtatttgattatgtcactgcaattaaaataaaagcactttgatgcaaagatcatttcttttcctgatttggtatgtgtcataactcttttctagaaagtatacaccgttttgacctgatgtgccacaaagagccataacagatgcctccatttctaaactctgtcttccaaacagggaaaaggacatccttttaatctagatacggagcactgatctacatagccaagatgggacctttctctttaagaagcacagagctacatgctaaaaagcaatgtaaagaaatcccatatatatttcatacttgatttaaccaaacaattcctatataaaatattcacatgaaaatcatttgatataagcatatcatttgagcttaactcttctttgatctgagatccataagctaagtgagggcctattggcatctgtgtgggacaagtttggcatgtccactgggaaataagaagtatattaggcctggttgatagttcaagttcatgttgatggcatagcaagccaatctgtttatgcaaacaatgatgagatgctaaagaagtcattgttaagaatatacacctttaatcctagcacttgggaggcagaggcaggcagatttctgagttcaaggccagcctggtctacaaagtgaattctaggacagccagggctatacagggaaaccctgtctcgaaaaaagaaaaagaaaagaagaggaagaagaagaagaagaagaagaagaagaagaagaagaagaagaagaagaagaagaagaagaagaagaagaataggaggaggaggaggaggaggaggaggaggaggaggaggaggaggaggaggaggaggannnnnnnnnnnnnnnnnnnnnnnnnnnnnnnnnnnnnnnnnnnnnnnnnnnnnnnnnnnnnnnagaagaagaagaagaagaagaagaagaaagaagaagaagaagaagaagaagaagaagaagaagaagaagaagaagaagaagaagaagaagaagaagaagaagaatatagctttcttaggactaatgagatggctcagaggttaaaagcattggctgcttgctcttccagcggtcctgagttcagttcccaacaaccacatggtggctcacaaccatctataaagggatctgatgccctcttctggcctatgactatatatgcagcagcactcatacattaaataaataaattatatataatatatacatagatatcatatataaaggttttaaaagagaaagaaaaatatagtcttcttaaaaggaagaggtgggctttagtacaataatattggggtaacctcatttcctcagtggacagatcattcagacagaaagtttgcaaaacaaaactgtctgaactgaatgacattggacccaacagacatttatagaacattcaactgagatgcagaacaaaagatattgctccgttttttaagctggagtgttctcactgtgctttgtgtttggttttacatggacagcctttgtcaggcatacaatgacatatccaccctcattacttcctccctttagtcctctccattctctgcctgcttatatgcttgtatactgtctcactcttgtcttcttgtcatatgtatatacccatatgaatatatttaaattaattcatgtacctatgaagagttctaggacccataagagcgaaaacattgtatttttatttctgcatcttatttacatcagttaataggatgacctcctgttctgtccattttccaggaaatgacatcattgagttctttatagatcaataaaactccattgtgtgtgtgtgtgtgtgtgtgtatgtgtgtgtatctcacattacaccttttctttatttcttcacttgtttgtggacagtcagattccatactttagctgtgaatatagctgcttatcaaacaaggatatgtaggtatctctgtggtacgttgacatagactcctttgggtatgtatccagaagtatgatgctgggtcatatggttgttctatgtttaggttttagagacaccactatactgaattccacagtggataaactaatttatattcgtatcaacagtatataagagttcacccttcccccacatcctggctagaatttgctgctgggttgttgttattgttatttaataacttggaggagatcgaattttcatgtagttaatttgcattttcctgactattaaagttgtttaacattcttcatgtttttttttaattctttgggaattgtgtacaatgtattttcaatatattcacctcccctctcccaagcccaccctactcacccaactttttgtctgctgtttttaaaaacccaacaaacccaatctgtgctacctgtatattgagtttatggccatccactggaacatggtcaacctgccaggaaccactccctcagagaagtctgactctccctctctcatagctcttcagttaggggtaggattctagtgcccacatcccttctccatgttggtttctctaagttgaacttgcccgggccttgtgtatgccaatcgcaacagctgggttcatatgtgtggctgctgttgtgcctagacaaatatttcattctagtcacccactgcttctggcacttagcatatgtctgtcctctcttctgcaatggtcccttgagtgtttatggtcatcttttgagatgagattgctcctgaccacgcaagtgctttaccactgtttacataaacatgttgtctttctattctattcatatctcaaaatatcttttgaaaacagtcgattcatttcatcagtatgttgattgattgattgattgattatcagttagttggttgactgactgggtttttttgatatttagttatttgagttctttatatattctagctattaatcttctgccgattatatagctggcaaagattttgcccctatgctgtaggctatctttttactgtggtgattgttgcctttgctactcaaaagctttcttaatttcatgtaactcaatttgtcaattcttgaccttatttctttacctattgcagttcctattaggtagtcttcctatactcctatctcttgtagtctttttactatactgtatttgagcagttttaaattttcagctctaaacctatttcatgtattctaatttgattttggcacattttcagagagaggaacctcactttatcctccagcacatggctagacattttttccagtactattcactaaaaaggctcacttttgaccagtgggtgctttgatgctttgggcatctttgtcaaagaaagacacaagagtgtctgggttgaattctgtgtcttttgctgtatcccattgacatgtgtgctgttttgtgccagtaccatgccaactatgttatgtccttctctagagtaaggcgaagtcaggcagggactgaggtgcccccagcattactcttcttgcttggaattactttaaatactcatattcctcgtggatgcatgtaaactttaagatttttttcctagtcctaggaaggatgctactggagttttttatgggatcgccctgtatatacgactcagttctggttttgcaaaccttttggaaaggtttcccattttctggtgtaccttcactttttctttagtgtcttggcattttcattgtaaatggctttcacacctttgattaggattaatcctaagtgtttaaaaatattttgaagctat

SEQ ID NO: 74 - DNA, 4205 bp, Mus musculus
gcggtgcggcagccctgtccggactccaccgcgcctcccaggggctctgacaccaacccaagatctgtggccatttgtttccatggttacaaggcacaatgaggcacactggctcttggaaattgtggacctgggtgacaaccttcctgcttcctgcatgtacctgtctgacagtcagggacaagccagaaacaacctgccctacactgagaacagagagatatcaagatgacagaaacaaatctgaattgtcaggctttgatctgggagaaagctttgctctgaggcatgcgttttgcgaaggtgataaaacctgtttcaagttgggaagtgtgcttcttatcagagacactgttaagatatttcccaaaggccttccagaggaatacgctatagctgtcatgtttcgggtacgaagaagcaccaaaaaggaacggtggtttttatggaagattttaaaccagcagaatatggcccagatatctgtagtgattgatggtacgaagaaggtggtagaatttatgttccgaggtgctgagggagatctgttgaactatgtttttaagaatcgagaactccgtccactctttgatcgtcaatggcataaacttggcattggcgtgcaatcccgagtcctttctctctatatggattgcaatttaattgcaagtcgacacacggaagaaaagaattctgtggattttcaaggaaggacaattattgctgcacgagcttcagatggcaaacctgtggatatcgaacttcaccaacttagaatctactgcaatgcaaacttcctagctgaagaatcatgttgcaacttatcacctactaagtgtccagagcaagacgactttggaagtactacttcatcctgggggacctctaacactggtaaaatgtcttcatatctgccaggaaagcaggaacttaaagacacatgccagtgtattccaaacaaggaggaagcaggattaccaggaactctcagatccattggacataagggcgacaaaggagagccgggtgaacatggcttagatggtactccaggattacctggtcaaaagggagaacaaggacttgaaggcatcaagggagaaattggtgaaaagggtgaaccaggagccaaaggagactctggtctggatggcctcaatggacaagatggtttgaaaggtgactcgggtcctcaaggtccacctggcccaaaaggagacaagggtgatatgggacctccagggccaccagccttaactggctccataggaatccaaggtccccagggtccacctggaaaagaaggccaaaggggaagacgagggaaaacaggacccccaggaaatccaggacctccaggaccacccggacctcctgggttacaaggactacagcagccttttggtggatatttcaataagggaactggtgagcacggagctagtggccccaaaggagaaaagggcgatactgggctgcctggatttccagggtctgttggccctaaaggacacaaaggagaacctggggagcctttaacaaaaggtgaaaagggagatagaggagaacccggcctattaggaccacagggaataaagggggaacctggagatcctggtccccctggtttactaggaagcccagggctaaagggtcagcaaggacctgcaggttccatggggcccagaggaccaccaggagatgttggattgccaggagaacatggtattccaggaaaacaaggcgttaagggagaaaagggagatccgggtggaaggctaggccctcctggacttccaggtctgaagggtgatgctgggcctccagggataagcctgccagggaaaccagggttagatggaaatccaggatcacctggtccacgtgggccaaagggtgaaagaggtctgcctgggctccacggttcccccggggacacaggcccaccaggtgtaggaatccctggtagaacaggctcccaaggaccagccggagagccaggtattcagggtcctcgaggtctgcctggattgccaggaactccagggatgccagggaatgacggagctccagggaaggatggaaagccaggccttccaggccccccaggtgacccgatcgcacttcctctcttgggagacattggagccctgctgaagaacttctgtggcaactgtcaagccaatgtccctgggctgaaaagcatcaaaggcgatgacggaagcactggggagcctggaaagtatgatcctgcagccaggaagggtgatgtagggccacgaggtcctccgggattcccaggcagagaagggccaaagggaagcaaaggagagcggggctaccctggaatacacggggagaaaggcgatgagggtcttcaaggaatccctggcctctcgggagctcctggcccaactggaccccctggcttaacaggaagaactggacatcctggtcccactggagcaaaaggtgacaagggtagtgagggaccccctgggaaacctggacctcctggaccccctggtgtcccgctcaatgagggaaacggcatgagcagtttatataaaatccagggaggggtgaatgttcccggttacccaggacctccgggccccccaggtccaaaaggtgatcctggcccagtgggagagcctggtgcaatgggcttgccaggactagaaggatttcctggtgtaaagggagatcgaggcccagcaggccccccaggcatagccggcatatcgggaaaaccaggtgccccaggccctccaggagtaccaggggagcagggtgaaagaggacctattggagatacaggttttcctggaccagagggaccctcggggaagccaggcataaatggaaaagatggattaccaggtgctcagggcatcatgggtaaacctggcgacagaggccccaaaggagaacgcggtgatcagggaattccaggagacagaggccctcaaggtgaacgtgggaagccaggtcttacgggcatgaagggggctataggccctgtgggaccagcaggaagcaagggctccactgggccacctggccaccaaggccctccaggcaatcctggcatccctggcactccggctgatgctgtttcatttgaagaaataaaacactacattaatcaagaagtcctaaggatttttgaagagaggatggctgtgtttctatcccagcttaaactgccagcagcaatgttgtctgctcaagctcatggaaggcctggcccaccagggaaggacgggttacctggacccccaggagatccagggccccaaggctaccgaggacagaagggagaaagaggtgaacctggaattgggctgccggggagtccgggtcttcctggatcttcagcagtgggtttgccgggctcaccaggtgccccggggcctcaaggacccccgggacccagtggaagatgtaatccagaagattgcctctatcctgcacctcctccccaccagcaggcaggcgggaagtgaaaaagacggaggaagacatcgcgtctagtgctatctccaggccacttgagccgccactgcaggcttcacaaccacgtgctctcaaggcttatgagtttttggactgctttattttagttttctgatacagaagcagacatccaaagcaaccatctgagtcctattctgacagtaagagcagatccgtattttcagatgtttgccaacttctttccatatgttctgtttcattgtggctctgagttctacggcttcggaagaaaaatgcaagcgagcctgtcatgggctcttcagaaaaaatcacgtgagacgatttggtacacagacgacacagaccttgtgaactcgtcaacgtgactaggttttgattcctgaattttaacttttctaatttatcttgattattttgttcatatttaaatttactatcgttactttagtttttctttctgctcttttgagattgaagtagtacattactgctgttgactgtcttaggactgatttttacaagaagtcctatactgtcctacattcattcgatttatgcagaaaaaaatatgcaataagagattcgcttctaacttattaaaaacaaaactatgtgagactgtttatcaagaagcccccaaactcatcatagccaacatgcttttggctttttttggagcacgcctcactgacacgaacacatgc

SEQ ID NO: 75 - protein, 1152 aa, Mus musculus
HQPKICGHLFPWLQGTMRHTGSWKLWTWVTTFLLPACTCLTVRDKPETTCPTLRTERYQDDRNKSELSGFDLGESFALRHAFCEGDKTCFKLGSVLLIRDTVKIFPKGLPEEYAIAVMFRVRRSTKKERWFLWKILNQQNMAQISVVIDGTKKVVEFMFRGAEGDLLNYVFKNRELRPLFDRQWHKLGIGVQSRVLSLYMDCNLIASRHTEEKNSVDFQGRTIIAARASDGKPVDIELHQLRIYCNANFLAEESCCNLSPTKCPEQDDFGSTTSSWGTSNTGKMSSYLPGKQELKDTCQCIPNKEEAGLPGTLRSIGHKGDKGEPGEHGLDGTPGLPGQKGEQGLEGIKGEIGEKGEPGAKGDSGLDGLNGQDGLKGDSGPQGPPGPKGDKGDMGPPGPPALTGSIGIQGPQGPPGKEGQRGRRGKTGPPGNPGPPGPPGPPGLQGLQQPFGGYFNKGTGEHGASGPKGEKGDTGLPGFPGSVGPKGHKGEPGEPLTKGEKGDRGEPGLLGPQGIKGEPGDPGPPGLLGSPGLKGQQGPAGSMGPRGPPGDVGLPGEHGIPGKQGVKGEKGDPGGRLGPPGLPGLKGDAGPPGISLPGKPGLDGNPGSPGPRGPKGERGLPGLHGSPGDTGPPGVGIPGRTGSQGPAGEPGIQGPRGLPGLPGTPGMPGNDGAPGKDGKPGLPGPPGDPIALPLLGDIGALLKNFCGNCQANVPGLKSIKGDDGSTGEPGKYDPAARKGDVGPRGPPGFPGREGPKGSKGERGYPGIHGEKGDEGLQGIPGLSGAPGPTGPPGLTGRTGHPGPTGAKGDKGSEGPPGKPGPPGPPGVPLNEGNGMSSLYKIQGGVNVPGYPGPPGPPGPKGDPGPVGEPGAMGLPGLEGFPGVKGDRGPAGPPGIAGISGKPGAPGPPGVPGEQGERGPIGDTGFPGPEGPSGKPGINGKDGLPGAQGIMGKPGDRGPKGERGDQGIPGDRGPQGERGKPGLTGMKGAIGPVGPAGSKGSTGPPGHQGPPGNPGIPGTPADAVSFEEIKHYINQEVLRIFEERMAVFLSQLKLPAAMLSAQAHGRPGPPGKDGLPGPPGDPGPQGYRGQKGERGEPGIGLPGSPGLPGSSAVGLPGSPGAPGPQGPPGPSGRCNPEDCLYPAPPPHQQAGGK

SEQ ID NO: 76 - DNA, 347814 bp, Homo sapiens
  misc_feature (1)...(347814): n = A,T,C or G
aaaaggatgaatttgaaaatacggccatatattatatattaatttgagatgatattggatcattgatatagatatatctgtggaacacaacagagcaagagaattgtaatcagaaaaaaatgtaggtcagttgtgatggttgaaattgagaatggtaccggaaaagttgatggaaacaaatcatagttcagagaagtgagtcggtaaaacagacaagttgatgagaatggagagaataggttaagtgtgctcaaagggaatcccaggtttgagaccctctggaatgtagacactagtttggaagtaacagaagtaataacaaaactgaggaaatgtaatagagttggacatatttcaaagtagtacaaacattaggaactagggagtatgctttctgtggaggcagagagcaacttcaatagtactatttttttgtcccactaagtaactgaaattatgttcactgagctttcttttagtaatttttactctatttctccatcattcttttctttatgcccatcattctacagatgttaagcccatacctgtctatattacttaatggttcccaacctttgatttgtttatttttagtccaagtgtattgccttagactgtatcattctacagattgatcccatgaatacctactaaatgtcaagtttaaagaagacacagataaataaaatacaatctgttttctccaagatgttcaatatagggaagagaaagaatgcaaaggagttatagcagtgcagtataaagtgtgcagaagcataagtgggtattgagctctgttgaatcacaggacagtgagtagtgaactctccctggtatgattctcacagacttcacagaggacatggcatttgagctacacgttgaaggcagactaagtgttttccagatcggagaggattggaaggactttccagtagccaaaaaagcacatgcagaaacctgtgaattgttaataatttgatggcggagagtgtttggaaggaggtagcaggacaggtggttggacagatgagttgaggccccactgtaaaagagccttgagtgcctcactttggagtgggcaatgaagagccaccagaaaactttgagcagggcagttaagtgactaggtctttgttttagaaatagaattcttgagaagtagggaggtggaaataaagggaacaagatggagaaaaggaatccagttaggagtctattgcaattttccagattaggaatggtaaaaacgtgaactaaggcagtttcagcgaggatgagaaagttggtatggattcaaaagacgtttacaaatagatttgatagactttgacagagatttgatatggggtgagggtgaataaattgaagatgattttgaaatttttaacttgagttcctaaattaatgatgatgcctgtaattaaaatgtgtaggtcatgaggtttctgtagaatataatgagggcagaaactttgcctaaattgcaaaagacatctgcaaacttacttcaatttaattactccagccactgataaaactaaggaataatgctagacctagtcgtaaactcttagggatattttgcctgattattggcttgaattttttactctataggcttggctcttcagctggttttctctaatagtttacagactctactatagcttcactaaagacagattctaaagattggtgaaagaacagatgtgtaacacctgttgtttttgcttatttacacaatgtgtcacttcataacagtatgaccagatttgcctggtggagttacgtatgtataggcatactggatggtggtcaagaagttttgatttaaaaatcaacctacacagtcacacattatttccctttataataaatgctctgaaaacatgagttctttgagtcatttaacaaattaaatctacttttttgagagttgagatgccgtgtacattaaatgtaacaacgtatgtaaagcaaataagtgttctctttctatttcctcctctttctctcttttttcatgggtcctttccatattattttctattttggtgttggctttaacactctgaccttttacctaacaccaagtttcaaagatgtacaatgaacactttaaattgttagatggcttaacagtaaaaatgttaatgtttcacaggcagatttgatttggctcactcaaaaactggtgctgagaggctcctgaccatcttatttagcaagtccaccatttttttttttttttttttttttgaaacggagtcttgctctgtcgcccaggctggagtgcagtgctgtgatctttcggctcactgcaacctccgcctcccaggttcaagtgattctcctgcctcagcctcctgagtagctgggactacaggtgcctgtcaccacacctggctaatttttgtatttttggtagagacgggttttcaccatgttggccagacttgtctcgaactcctgacatcaggcaatctgcctgccttggcctcccaaagtgctgggattacaggcgtgagccaccatgcctggctgtacatgttattctttgttttttgtttgtttttttgtttgttttttgtttttcattttaactctttagtgtctctcaaagaaaacatgatgtttgtttacttttgagctctgtgaccagagtggtacaatggactttccctatttggctcactgatttatccccagtgattgttacatagtggaacctcatcctatcaataggtatcaataggctatctagaggccaggtattaataggatatcaatagatatcaatagaatatctattgataggatgaggtttcttaatgcctatgattaatggtaatgagtaatgattaaggtttcttaatgtccctctctattcattttgtgttttctatatacaaataaagattaataagaacttaaaaaaatctatatccttattcaaatatctttggtttcgataggtgccttaatgatttcaagagctagattaagaaagttgaagggacaatggcgttttaaaattcacttacccagctggtacccaaaattattccatatggcaaatgatggtgagaataatggaatggggtaaaggttagggctaggccttcagccacttattatctttttgttgccataagaaatatattacagggacggctgtctgaatgattttaagactttataggctccatcaatgttgtctactcaagactgccagtgctgggcacactcaccattgtgattttggtgctttgtagcactggggaactctggggtctggccagaatcttgatagaaatagctgaaaatttaagagaatgcatgtaggaatgtgatatgtctgtcccacatcctgagagtaaacattatgatatagcagtaaaagcattttagtcaggcagacttggacttgaatcccaggctttgggattattctatgagcgttagtgttttttatgtgtaatatgcggatataatacctgtcttcagtaccaacattaggcctgctctggaccctacattttagaacaccccactatagtcttgctctggatgtgcacccgctctcagagttaggagtttacagagctaaggggacctgcccacctaaaacctgagcttctagaccagtctctgaataatcaagatcctgaaattccctgaaaaaaaaaaacgatccttaatcccccgcagcatctaacagaccctgtcgttgggtccatcttcccagggaaagaccacaggtgtaaacactcctaggcccaaggaatggtcaagagttagctgtttgcaggcattatggacacaactttgacttactggcatatttacatatgcgtgtgtgaggcttttcaagctgcagatggacccaagaaagaaaaaaaatgagggatgaactttggtttaggccagaggccaactcatcccatatcacctgctctgttacattctaacttgacatggactttcaagactttatgaaggtatttgctgaagaaaaatgagaaagcatattattttttatgagtgttattagctttattttaactttcaaatatttaaacatatggtatgcagacctcttgccctgtacccaccctcataataattaacccaatgccttaaagaccccacctcttaatactgtgacattggggattaagtttctaacacaggaaatttgggcaacacattcaaatcatagcaccaatattctccatagccttcttaatatgtactgtgagccatctttggacaagtttgagaaaaaaatttgagggccttaagaaacctcaggatccacatatattagcttgaggttcttcattagccactccattgagaaagcattaaagatctatattatagcttaacttttatctgggaggagcaacacattaaaatctgacaacattggcttggttcatttgtaaatctatcttgataatcacctagctgggacctgtggggacaggaaggaaatgtggcaagttttgatgagcaaggaggttgtggacaaagccaataattgagaaatccagggaaggtaccagagatgtgttcagagcatcaagaagaagcctgagaaccgcaggtgtcagggaatggtgagaggtttctggtcaggaaaaggagaggttcagaaagacacaaggcaaactttgcccttgtcagttttgttgaggtcaacctaccggtgcctccagcaaggtttacaatctgaacaatttgtttttaaaacatatacaaggatttattttgagagcttgatgaaaagtttttcaaatgttcctagctgaatgggctacacttccattttatcaggatctgaataatagaaccctcaaatagcgaacacattttagaaatgtgcagagaggctgggtgtggtggctcacacctgtaatcccagcactttgggaggccaaggcaggcggatcacaaggtcaggagatcgagaccatcctagctaacacggtgaaaccccatctctactaaaaatacaaaaaattagccgggcatggtggtgggtgcctgtagtcccagctacatgggaggctgaggcaggagaatggtgtgaacccaggaggcggagcttgcagtgagccgagatcgcaccactgcactccagcctgggcaacagagcgagactctgtctcaaaaaaaataaaaaaaaaagaagtgtgcaaagagaaataatattcatgataatgacccttgaaagattataagatcttgtaatgccttaagaattatttttaaatattgaattatcactacagattccaaaataagtatatttcactgtatctcaagatttgtaaattggcagtctcttactttttaaaaattcaacaaatatttattgagtctctgattttccaagtactgtgcaaggcacctaggatacagtgatggacaagacagatatagtccctgctctcatggaacttagaattgagtggggagcaataaacatacgtatacagaaaaaataatgtctaagctagagaccaatgtgcttcttggtcaggtaagggcttttgcgcatagtaacatttaaattgaaaactgaaggatgaacacagaatgttccaggatgaggaaataacatacacaaaaaccttgaggttgaaaacagcctggcaatttcatcactggaaagaatggtaccatatgaggctggagatgtggttaggggcctggttatttgggacttctaggctgtagaacagcttttggactacattcaaagtacaatgggaagccattaaaaagcttgaagcaaggaagtgacatgaaccaactctcattttaagaaaagttctctactgctatgtagagaataactgtggtcagaattcagtaatgaatgaattcagtaattaattggaagctgttgaggggtctagaccagggtgatctgaactgggatagtggcagagaaataagagaaataagtggatgtgagatgtgtttggggtaacactgacatgacttgttgatggtttggaagtaggagatggggataaggaagacagaagaatcagtggggtccttgggtttctggtttgatcattttgatgggtagtaattactgagactgggaagagcatgagaagaacaatttgtggttggaaatcaggaatttatctggatgtattaagttatagatatctgtgtgacatctaagagagaattttgaataggcagctggacacacagtctaaagttcagtcaagaggactggatgggagatgtaaattttagattaaccatcttacagataatatttaaagccaagagaatggtgacgtcatctaaggagacattataaagagaggaaaggagggctcacagatcccagtattaagaaatcagatagaagaaaggtctgagaatatttaaaaggaaatctgagagagtgtcagatcagggaggccaataaaagagagtttcaggaaggaaagaattgtcggctattggaggtgccaccaagaattgaagaagggaagagaaacggattcttctttcaagttcctgctgaacttggtgagaggcatttcagtagagtagtagaatggcaattcttcgataactagaacatttagtcaactagccataaatcttattctgcaaatactttgcataaatgagatagaagctaagtggctcaaggaagtaattagcagatgtcaaggtcgaattcatatgcttatagctttgtagccctctggttctttgttgttttaacagggaccaaagcttcggtgaacataaatttctaggctgctttgacacttctccattgtccaaatatcaatatcaacctcaagcttaagagacaggtacaactaaatttttccaattattgtttattaatatgtacagcaaacaattataatatcaggtaccttttgaatattgactaagttaaggccctatataatacacatgcattaaataatttattcctagtattatttccaatttgaagatgaataaattagggcttagagaaggtacatagcttttccacaagtagcagagtccagacatgaagccatgattgtcaccactgtgccaaactactaatttgtcaaccaatagaaatcacttttggttaaaaatataaccatggatttctctaaaaataagatcaatatttatgagttccttcctttgaaataaaattaatttctttaacagttaccaactgacttgaaataatagctaggataattttgcaaagtcatatgaggattaggactatatctagatgagagaattcaaaagaaataaggcttaaaaccagctgtttgatatttagaatgacacatacagttttaatattgcaattgccacttctagctattcacccagaaagatctgaaatcttgaattaattttaaaatgctgatcttagggtatttggcacacacagaataccaaagaagatggtggctttagtttttttccagagtgtctactgatagaatttagacactggtataatgaattcttttatatttgactcttgattaaactttgaatgatggcacccaagtgatatgacatttatttgcatatttagacctcttagaatagctattttaataatactgcaattaccaaatacactgagggagccattatattttcacttgcaatttatttccacattagttgcttcactaaaaaaattaatttaaatgatgtttaagttttccattacaggggtcctatttactaaatcttttatttcagtaccaaaggagtagaagtgtacattcagaaagacaattattggaggtaatacattaatattaaatatgatgtcaatggcaggctcaggtgaggtaggcgttgcacgtattcattttttctttataaacataaggcaagattacttttcacatgtgcagtaatcacttcagtaacagtgattattcaatccaataacaacatagttaagtttatagaaaacatgacatcaattaagccaaaatatgtaaaactaatattcagaaggaaaaacagacttgtgaataatataattatattttaataatatgaatcattgtatattatacaatgcaaaaagcataggcaacttaaacaactggattaaaaaaatgggcaaaggaggctgggcatggtggctcatgcctgtaatcccagcactttgggaggccaaggtgggcagatcacgaggtcaggagttcaagaccatcctggccccatctctactaaaaatacaaaaattagctgggcatagtggcaagtgcctgtaatcccagctactcgagagactgaggcaggagaattgcttgaaccaggacctgggaagtggaggttgcagtgagccgagatcgcgccactgcactctagcctgggctacagagcaaaactctgtctccaaaataaataaataaataaaagggcaaagggcaaaggagttgaatagacatgtctccaaagaagatacacaaatgattggtaagcacctgaaaagatgttcaacatcactaatacttagggagatgcaaatcaaatgcacagtgagataccatctgacacccattaggatagtaattatatatatatatatttatttcttttatttatttatttatttttgagatggagtgttgctctgtcacccaggctggagttcagtggcacaatctcagctcactgcaacctccacctcccaggttcaagtgattctcctgcctcagccttccgagtagctgggactacaggtgcccgccaccgtgcctgactaatttttttatatttttagtagagaaggggtttctccatattggccaggatggtctcaatctctttacctcgtgatcgcccgcctcggccttccaaagtgctgggattacaggcatgagccaccacgctcggcctatatatatattttttaaaagacaaaatagcaagcattatctaggatatggagaaattggagcccttgtgcattgttagtaagaatgaaaatcgtgcagctgttatagaaaacagtagtctggtttctcagaaaattaaaaatagaattattgtattgtattgtattgttagcaattttacttctgattctatatacccaaaagaattgaaagcagggactcaaacagatatttgtatatccatgttcatagtagtagtattcacaatagccaaaagatgggagcaacccaaatgtccattgatggatgaacagacaaaatgtggtatatacatacaatgaaatattattcagctttaaaagaggaggaagttctgaaacaatgtacaaaatgatgaacctttaggacatatgttaagtgaaataaagtcatacagatacaaatactgaatgattccacttatatgaagtacctagattagtcaaaatcatagagaaagaaagtagaatgaaggctgcttggagttgggggagaggaaaatgggaaattattttttaatgagcacagagtttcagttttgcaaaatgaaaaaagttctgcagatggcggggatggttgcacagcaatataaatttatttaattccactgaactttgtatttaaaaatggttatgaacataaattttatattgtgtgtatttgaccacaatgtttaaaaataaaaaagtgtcagtttaagtgtagttgcttaaaaaaatttaaaagcagagaaaatttaactgataagaagctgtatcaacatcaataactaactagaaactaatctgaaaatcttttcagagcccttatcatacagattaaggtatatattgagatacaccattgcatatataatcatatttcctgttatatgatgatatatgatgtaacgttgattggttttgctttggtaacattttctggagatgttgaaaggagctgcatacaataaactttattcaaatttttttttttctgttgcagatccgtggccgttcacatggtttcaaggcacaatgagactcactggcccttggaaactttggctttggatgtcaatatttctgcttcctgcttccacttccgtgaccgttagggacaagacaggtatccaggccaactctttgcctaatcaccaaatgttatttatagcctttaagtcattaaaacaaatcttgttaagattgaaaaggccatagattaatgtactataacagaataaattacaattcattgctttcttccattgatcttcccatgatgcacaataggaattcctaaaattacctcatttttttcatacgcatagtatattagtctatgtttcctttcatcttcaatatttacaagtatacatacatgcatgtgtgcctctgtgtgtatatatgacattatgtatctttccctttcctcttcaataattattcaagttataagtatggaaactcattactaattaggattaacaaggacatatctaatcttaattaggaaaaagtgaaaaatcggataggaggtataaaaggaaatgtagtttaattatatgttcattttgtagtatctcagatgaggcaaacaaaaggttgacagatctttagagcaccttttgaactaaatagacaatatttgcaattattaaatgtatcagtcttttcataaatatttccaaaaggcttaagggcaatttgaaatatttaccttcatctctgcttttttaaattgattatgtggttaatttggaagacttttcttgaacattgagtgtgtataagttacttagctaaatgcaattcatattacaaggttgaattaggcacattggagaagccatttgctagggaaagagaaacttcatctctcctatgcaaacgatcacatataatgtattctgatgataatcacatatgattatgtactctgagactgtattattgtgcctattgttttgaatattttttcaataatttttgctaaacaagtataaacccactctagagagacttttgagtttgaggcacacataaaatataattactcataaagatctaacacatcgtagtctttcagagtgttatgtaagtctttatgattttttattatttggcagaaggtgcatttcctaaaataattcacatgaaagtttgaatattctgttattgtacaaaagacatcctgtggctgtcatacaatttgggggggaaactctttcttcagtgagaaattaatcagctgtgactcatggcaactacaactatgtaaaaaaggaaaagagatgttagagcagcggagtttattctgatacgatttctactcttctgaatttgtcttttttgtaaagaaatatagtaggtaatgtgctttgcaatttaatctgatatgacaggacttttttagttagaaggaagaatgaatctttggttgaatagggacagtttttaggcacatgctagtgggtagtaaatgttcttgatgatagcaaggatttgaaggacctaaataaatggttctccaattttaacatgaaaaagaatcacctgacgtatttgattcctgagacctcctatcgcatattcccattttgcaggtcgtactggggtgggatttggtaatttacatctttaacaagctccacagatgaatctaatgcaggattatctgaggaaaactcttagagaaacacttacctttgggataattaacagacattttggttttcttttttcttttcacctggttaccttgcattttatgcaccattttatgccaaggttacctttttttgttattttattttattgtttgcttttagtaactttttaaaattgtgataagaacacttaacatgaagtctgccctcttaacaaatttttaagtgtataacacagtactgttaattataaacacggtactatacagcagatgtctagaacgtaatcatcttgcataactaacacttccccatcttgggattcccctgaatgtttgcttttgtagctctagtatctcaactctttaatcaggttacatgatgtataggactaccaaaatgcatatattctgatccaatttacttcgctgaattaatcttttgaaagattttcccaacaatgtgaattcaaaattaatctgaaccctaacaagattcacttaacatgaagcattaagggaaattaataaaagaaaaaattacgtttgtttttatcatgctatttggtagagggtgttcgtaaagcaacacgtactgaatgtgtgatggaaattgcttaacttcaagtatcatttgcattaattgaaaatgtcagcacagcactatcaaagggattgttgaagaagatgacaagctgggcatggcctggaaggagacccttcttgtgtcttgtgtatctggttcacagcgcaaggttccctttttagtttcctcatgtgcagacctgcgcgtgtggtcactaaccatttaccggagggaagtgattacatctaaaaataaaatataacaaatctgagagagagtctagggtttcagggctggagtctgtgaagttgtcaacagtttactattaaacctaaatatatgacagatagattggaccttttaattgctgtaccttaactctatggtatgttaaatagttacctggaattgtcacagttgggacagaatttaagagtaatatggagagattcaataataacttgaattttaaaattttgaaggtattaggaattcagtcatttcatattctttcgtcaatttgcctattgagatcatgggataagatatatttgtttattttcccactgcaaatgaacttccatttgaatgtggcagtttcagctcagttacttgtcaaaagaaggtggggaagagaattgtgttaaaatatatacaatgctagaaaatctcaaaacttgctttaattagttgcttaaaactctttcctctaatatagactatgtatcaaataattaaagtttcatctactttctttaatctgttctaaggcaaaagtactatatcatcataaaaagcaataagaaacagaaaaccagagtttaaaaaaacaggctaaataaatagaaatgacagaatgctttttaaataacacattttcctttcattatgataaatcttcagtttaagtgtccagattgacttgattataaatttaaatttaggcctgtaactattcatataagcccttctaaggtagttttctattaattacaaggaattacaaggaaaaaaacctattattccaaaatgtggcttttactagttggcaaacacttcacgcttaaactcagagtaaaatgtatgctgttatatagagaattttattttgtgtttttaagaaattcttgtgttcaacattggtaccatgtaaaaatccttcattgacaaatgtactttgtaactcctaaattttgaaagtggaggaaagcttcacaatgattagataaataatgtagcttctaactaggtattttcctttggaagaattggacatttaagcagaggcatgaaggcagtgtgagggcaaggcacgtgaacacctggaaagcagtcacttggtccccaggctctgaggcggcggcatgcttggcatgtggaagaaatagcaagaaaaactgggggactggagccaagtgaatgagggggaggaggtgtgagggtacatgctcctgagaaatgcatctgtgctttctgtgttgtcaaaatctgatttctaagcctgcaaggtcaaaggctagaccttggacactggtaaattcaccaaagcaataaatcctgtcctatgagacctcttggaagatggtcaacctttgccatgtaggacccttcccggatatcaggtggacaggcaggcttctgaatgtatgcccctcattacctcttggtagccttatgtcacagttaattgaatattgtcatattgtattattcataatacattgttattaaagtacagatgtgtggagatatgtgcattttagcaaagttaaaatataagttataacttgaccagacaaattatgttttctttccctgcaatcagcaaactggtgtataagtaatacaagaaccctcactaaactgcaaagagtataacagaactcgtttacatttattttgcacgatgactgtaactttgattttcccatttgtttttgtattacccaaggaatgacctcatcccctggcttttcctaaggccagaagcctctgtgtccagagagcaactagtccattttcagtctgagtattagcagtatacacagatctttcaggtattaaatcagttgaaaaaacaaaacattaaaataacggattttagctgatctgagcttcttagccattcgagaggagaaaaaaggaattcaacatactttcagggaataataataaaaaaaaagtgtaaaagagggatttcaacatacctatgattaatactgtattaaactgaagatttatatgaatgggtatagaaagtatcagacctggccgggctcggtggctcacacctgtaatcccagcactttgggaggccgaggcaggcggattgcctgaggtcaggagttcaagaccagcctggccagcatggtgaaatcctgtgtctactaaaaatataaaaattagctgtgcgtggtggcaggcacctataatcccagctacttgggaggctgaggcaggagaatcacttgaacccaggaggcagaggttgcagtgagccaagacaagatcacgccattgcactccagcctgggcgacagagcaagactttgtctcaaaaaaaaaaaaaaaagtatcagaccaatgagaggaaaaatgtttaacaaaagatgtgatgttatcttaagattagaatgcctagcaatacaataggaggtcaaaccagtaggataaaacagagattaaggggaaaagtgattttctgtgtgtgtgtgtttaagcacatgtttaaaactgagggtgggagcataatgcacttctactaaagaatgaagataatttcttaggtatgctattattttgtttaaaatatgtatttaagaagcaatgttcaatacagagggggaaaagttggttataggacacttgtgttttctttccactctaccattgagtggctggctttgtgatcttaactcctcttggatgactatgttcttaggttctcaggattctaatttttggaaggagaaggggtaaacatcttttttaaagtatgtattttctttgtaggtaatctagataaaataatgatatacccaaatatgatctagctgccttcctttggctcttttctctttttttttttttccagactgagtctcgctctgttgcccaagctggagtgcagtggcgcgatcttggctcactgcaacctccacctctgcctcccaggttcaagcgattctcctgcctcagcctcccaagtggatgggactataggcatgtgccaccacacctggctaattttttgtattttcagtagagatggggtttcaccatgttggtcaggctggtctcgaactcctgacctcaaatgatccacccaccttggcctcccaaagtgctgggattataggcgtgagccaccgcgctgggcccctttggctcttttcagtaccccccaccacctctgtaagttgcccaggtccttcaagccaaatcaggaggaaagtggggctgatagttattaacatcttagtatgaatttgttaaaaacatttgcctttgcttttgaaaaagatctgttaaggttctctaagcagtgcttcttttaaaaaaattataaatatttaaaaaataaattttattgtgtatatttgaggtctatagcatattatgggatggatataattaaatgactactgtagtgaacagaataacacacctatcacctcacgtagttacttatttttgtaatgagtggctaaatcttatttaatgaaaatctcaaatgcaatacaattttattgtattttgttagtccttatgttgcacattccatctctagatacatttatcctacatatctgctattttgtaccctttgaagtgcatttctccatttcctccctacctcacaccagtgataaatattcttttattctctatctctgtgtatttaagctcttttaaaaaatattccacatgtgagatcacacaatattttttttcctgtgtctggcttattttacttagcatactgtccttaaggtctatctatgctgtggaaaatggaaggattttctttttttaaggctgaataatattccattggataaaatgtctaaatgtaatcacaaaaaccgtaaaactcccagaagcgatcatgggggaatagttccccaacattgaccttggcaatcatttttggatatcacatgaaaaatctcaggctacaaaagtggaagtaaataaatgggactaagtcaaactaaaacacttatacacagtgaaggaagcaatcaacaaaatgaaaagacaacctatgggctgggaaaaaataattgcaaactacttatctcatggttaatatacaaaatttataacgtatttttaaaactcaatatcagtaaaacaaataatctgatttaaaaatggacaaaggatcaaaatgcatatttctacaaaaaagagataaaaatgtccaacaggtatatgaaaaagtgatcaacattactaatcataaaggaaatgcaaattaaaccaccatgagacattaccttgtacctataaggatagctattatcaaaagacaagagataacacaaacgtggcaaggatatggagaaaagagaactctagcacactgttggtgggaatgtggattggtatagccattatggaaaacagtatggcggttctgaagaaattaaaaatagaaccaccatatgatccagcaacccctcttttgggtctacatccaaaaaagatgaaatccctaccttgtgaagatatatctgcacccccatattcattgcaacgttattcacaatagctaagacatggaaacaacctaaatgctcatggatggatgaatggaaaaagcagtgcgttttttttttgtgtgtggtgaaattttagtcattacttttgctatagtccagagagcctttgaaatgacacggtgctttgcctctgtctacttgacataatatttggatatttgagtcttttctgtagttcttcaaaatacatgcacatttactcaaaagtgctctttactttatattaaagtatgtattttaatacttaaagaaatgaacatatccaccttgtgatagctatttccactgccttgccatttttgtgtaatgaatccataatattcatgtattcagattattgtgccttaaatcttacacctaaataattaacatttagttttattttttttcagcttttcaccacaaagcacgtatgctaaagatatgaaatggcatttgatttttataaaggcttttagtgtagaaagactttcataaatgttgctagaaatgttgaattccattcatttcaaatgataggtttattactttgaaatcatcatatatttgctaagtcctcagaagaatttaaataagatatatactgtttccaacttggcaataagccaaccaaagtgtcataatggaaagcccctttctactatcttgagacttgttttgctaatcacctactggggcttccctacatacattgtgagtaatttaatcttatttattatggttacatagtcactcgtagtcattataaaaatataataagaatggagtttttttgagtttttcaagagtcatttttagcttaaattattttctcacagagatgctattttcctccttttgttgagatattacacacaccaaagttgacaaatcttagtgcacagtgcagtgaatttctatggatatatttatacccctgtgtaactactactcagacctaaatacacattctcaaaacccagaagccttctgtgtacctgctcctagttaacatttcaccaaggtagccactacactgacacagattagttgtataatctctagaatttcgtataaatggaattacacagtatgtattaatgttgcaggacttttccttagttcagctaaagatgagttccttgtcccatggccatgaaaattcaggctcacagacaacttgaatagtgagtaagacagggttttattgggtgaaaaggaaggaaagggggaaacaggaactctcactaggccagagtccctgctagagcacttcccaccaggctgattgaatcccaggttccacacaggaaagaggatgggccaggctcctcccgctaaaaagggtgtgaagttcccaaggctccatctcagtgggcagcctggttggaatttctccaaggaccccctctcacctggctgtctcattcctccctctaaagaagtacatctaattgctcttagattaaggataaggatgaagaccaatcttaacttcttcctgctgacagggtgtgctgttttggggaaatggcaggtggagctccctcagaggcctatctaaggtttcccagcagaaagggccattgtcagaggttccagttgcattaccgtttagagtttgatggcctgaaggcaagaacagacaaagccggttattagaaaacacgtatcaaaatgaaacaaggggagggataaggcagctcaaaaattccaaggccttttaccagtttgcacagggagacggaggccaaacacccaactagcaaaaaaaaactttactcttttgccagcatgttgggcttctgggtttccttccccagagtccaatcctaagccaactagtttaaggtttgggaaattaactctttctagtttgaaggatgcatttaaggggactgtcctctagtacaaagacacaattacctatcagtgaagagaggacagaggagaagaaaggaaaaaaaaaaagagagagcacctgtaatcccatcactttgggaggctgagatgggcagattgcctgagggtcaggagttggagaccagtctggccaacatggtgaaacccatgtatactaaaattacaaaaaaattagccgggcgtggtggcttgtgcctgtaatcccagctactcaggaggctgagtcaggggaattgcttgagttgcagtaagctgagatagcgccactgcactccatcctggtcgacagagtgagactctagctcaaaaaaaaaaaaaaaaaagcagtgttcccattttttcttgtttattcacacttctgtattatttttgttttattcttgtccagtgttactttacctttttttgttaactggtgttctttttcccaacctgatatacttgatattcctttgtcagatgtattggcaaagtaggatgtgtacaggggggctgaggggaactagtaacaaggaaacaaagagcctttatttttttaagaagccttttttaaaaaatgcaaaatgcctaaaggctcttgttttgattcgtttatgaaaggaaaacaaaccagttctgtatctatggtatattgttgctctttatcttccccaactctaaccttgaggaaagaactgccatgagctttgtcactatttgtaaagaaaattatttttcttaacgtatgttggagaagactgctaaatagaacttgtatcagactagacagattttaatcgtgactttacatgcaataatgataataatttcatgtatgataattctgaagatatgaagaaataggaaaaccaaagcaggaaaaatggacaagtgatatgttacaatttctcaggagacaccacttgctcccgttctctttttatctcactcactatgtgatctcatctctcctgtggttttgagaggtgaagccaactggacttcctgggtcaagtggggacttggagaacttttctgtctagctaaaggatgataaatgcaccaatcagcactctgtaaaaatgcactaatctgcgctctatgtctagctaaaggattgtaaacgcaccaatcagcactctgtaaaaatgtaccaatcagcgctgtgtctagctaaaggactgtaaatgcaccaatcagcgctctgtgtctagctaaaggattgtaaatacaccaatcagctatctgtaaaaacgcaccaatcagcgctctgtgtctaaaggattgtaaacacaccaatcagcactctgtaaaatggaccaatcagcactctgtaaaatggaccaatcagcaggatgtgggtggggaaaaataagggaataaaagctggccaccccagccagcagtggcaacctggtggggtccccttccacactgtggaagctttgttcttttactcttcacagtaaatctcgctgctgctcactctttgggtccacaccacctttaagagctgtaacacttgccgcgaaggtccacggcttcattcttgaagtcaacgagaccacaaacccaccagaaggaagaaaccctggacacatcggaaggaacaaactccagacacaccatctttaagagctgtaacactcactgtgaaggtctgcagcttcattcttgaagtcagcgagaccaagaacccactggaaggaaccaactccggacacagttttacataggatttatatgtcagtcactcccaaatgtacttcacagccctcacctctcttttgaattccattcctaactgtctatttgataactccattgtttcaatttcttaatggcatgtcagatttaacacttctaatttctcctctttcccactacagattaacttacgccttgccaagttttcttttatttttctagtgggatttatttcagtcaactaatctccctcctccctacattcaatcccttatcatctcctgttggttcttgtatctctcaattccttcccatgaaattgaagatgttttccattttcagtgtcatctctagtccaagctaccatcatatctggcatcacagagtatggcagtatgactaagtttaccaggtaaaatacagatgcccagttaaatttgaagtttaaacaataaataattttttagtataagtatgttccaaatattgcgtgggacatacttgtactaaaaatatttttatttatctgacattcacatttaactgggaatcctgtattttattagctatgtttggtaattttatatatgtgagggagaagaggttatttattacacagagtggtcagggaaggctgccctccaacctcactgggcaggctggttggagtttctccaaggaccccctcccacctggctgactcattcctccctctaaaaaagtacatctaattgccattacattaaggataaggatgaagactgatctcaacttcttcctgctgacaggggttgctgttttggggaaacggaagtcggagctccttcagaggcctatctaagggttcctagcagaaggggccattgtcagaggctccagttgcatgaccatttggagtttgatggcctgaaggcaagaacagacaaacccatttgttagaaaacacatatcaacatgaaacaaggggagggataaggacagctcaaaaattccaaggccttttaccagtttgcacagggagagggaggccaaacacccagctagcaaaaaaaaaaaaaaaaactttacccttttgctagtatgttgggcttctgggttccttttccctgagcccaatcctaaaccaactagttttaaggtttgggaaattaactctttctagtttgaaggatgcatctgaggggaccttcccatagtacagagacacaattacctatcagtgaagagaggacagatgagaagaaaggaaaataagagggcaccttttaaaggagtcccagggattcaggatgcatttgaaaggggtacagactaaagatgaatggctacccatctagaatgaggggagcaggcatgcctggttttcttctcttcctagcagatacgtggggtacatgagggagagagggaagaatgtcctctttccctcttccatccttgcatccccaagtcacagcgaccttggcagctgccgccatgagtgccaaagtgactttcacccataaaacaggaaggacctagagaataggaattatccactctcacctatgcctctatcctccaaactgtcagtagctttggagttccctacacctcatttatgccatggatattaatgtggccttcatccatgaaacaggaagctaggggttggcttaatcagcaggaatcagccacacatgctcacctgcactgtaccttttaacttccattattgtctgcctctggatccctaagatccatttttctatcctagggctttgaccagaagcttagaattgagtctgggatgaaaatttgtcttgagggagttgcatggactccttatcataagctgaatgctaagttaaaactgtggaactgagtcctcctccaacaagggaggggaaaggatgtcttgtgagacacccagataactggtagctatagttatgcttgctaagatttgggtgcatggtacttggctttggttagctttcttggtcttactttcccaaaaaggaaacctccgagtggtgggtatcctatttatcccaactgcctggcaggatttgcaggataattgctcagaactagaatattgatccagatttctacattacccatcccttttgttctttctgagctgcagctggagactgctggttggttcacaggaacaagcagggttagcctaaaatgtaagcgaaaacttaaaaacaactagtgagtttagaatttaatgacaaatatatgatacgttttgaaacatgatttctctctctccagtcctcatttttattaaaaaacaaatcatcataggactgagtggtttgcaaaatagactttacttttatacttggcctgattatttgcaaaaatacagcaagtataattatttttacataggttttttggattggctttgatggaactctgttccccaaggaatctcagataagatcttttaaagctgagcccagccatgggtttatcctcaaatacctgtaagttgagtgatcctctcctcttaaggtcccataataaacttggagctcctagatctgttagaaagtgacattctttactgaccacaggtcaggaaccctgtacaggaactgtgtagacaagggtatgaggcaactgggcttctatcatccctgcaagttgagattgactccttaaagggaagcatacccttccagtctaagccttggtaaaacaaccactttctccaattgtgtcctgccacaaaagaaaaatggattcttattccactgatgcaaacggctatattaccataagttgaggatactcactgagagtttccaaattctataggaaccaggaagagagaaacaaacgtgctacaaattttgttcataggagtataccttactcaattattaaaggccgtaaaaggttcaaaataaatttcttcgactatgaaaacccaaacaaggatcagcaatattccaaccaaaagtcaaataagttgcttcagctttctgagttcagtccatttagttaactcttgttttgcttgatattcgtgaatgtttcagcttttcatgagtcctgtactattttcctttattccaaaggttacaatttctaaagctatcataaacctatatttcagagcacctgttacagttctatagcttattagaaaccatcttttgaaaaggattaaaataggacaacaattgtctgtgaatagcaaaatgtccagggtaattacagttagaaacacaattgacaaaaaagtttggttatctccctaatggtttacagtaacttaaaatagcaactaaggactaagctctgatttttatcttgcccagattcctttctaaggagtctggggagtcatgccctacaaaccataaattctcatcagatgggttttatttaaccctgtatattgtgacttactttccaatctgactgtggcataacaaggaagaaaattacaatgttttaccccaaagtatatttccttgccataccttgaaattgccctgcaaaatctcttgtgggaaaagtccacattctatagaaaattctttctcctttgttttctttcctttgtttccagatccaagagataatcaactaacagccaggtacccttttaggtctgataaacattttacaactctgcaatctgagagattcctctgcacaataaaacttggtctccacaatcctttatcttagcctgaacattcttttccattgatcccaggtcttcagataaactcaaccaattgtcaaccagaaaatgtttaaatttacctatagtctggaagcaccacccccgccccccactttaagttgtcccacctttctgaaccaaaccaatgtatttcttaaatgtatttgattgatgtctcatgcctctctaaaaatatataaaaccaagctgtacccctaccaccttgggcacatgttctcaagacctcctgagggctgtgtcacaggccacggtcactcatatttggctgagaataaatctctgaaaatattttatggaatttgactcttttcatcgacagtagtttcaattatgtgttataatagtaattcctagcatctttaactttaagataaaacttggtaagttgctttgtgtgctaactgcagccaaggtttgctttcttcattaagggcctggttattccatatgtccccaggccttaatagttgtgaagccagcaagtcaaatagttctcaaaacccaaaaagcagtttgtaaccttaaaacacttagcaaaccttgcatctgatctgcagtttaccaataatctctaaggcttttttaatttctcaaagattaaagtcatgtgaactaaaaggtactacagattttatattccctttaaaaaatatttgatctaagcacttgtctttctttaggccaaattaattagagctcttttgacaggcattaaacacagtacatagacatgcagaagaaaacccagtcgctgggtggggccctttaaaggacaggcctgggaaaacatgcagatatcaaaccagaaagaaacttattccctaaggcaggattgctaaacaaagccttgccaagcagttacaggccatgcccccaggatgtaaaacaagatgaggcttgcagcacaaaccacacagacatgcaaagcacaccagattggccacagcccaagactagccccacaaatcctgtttcacaattaagctttacagaaaaaataaacagtgatggttgggggatctggcctagcaaagggggaaaatatctttaaggcttaactgctgatggagtggagaggaggaaagaaaaaacattttttaatgcttgaggaagaacctcttattcttatacaactgattcctccaccagggagaaaagattaagcttaattactgtccaaaagagttaaacccgttagccagggaagaggaaggctgtggcagcagtctgtggctgggaaccagtcagctggctgtgggggacttttgagccatgcgtcctagcactgcgtagggtgtggggatcggcatggagctgctgctcaccagtctgtcctgaaaaaggaaaaaaaaggccatgaaaagtctcccgaccccaaggagcgacagagggtggtggggtggtttcccataagctcagaagtccaaggacgaaaaggcttagaaagccacagtgagaggttttgtgttctcatttcactcaccacttcttgagctcccacattgaacaccaaaaatgtcgcaggacttttccttagtgcagctaaagatggtgttctttgtcccatggccatgaaaattcaggcttgcagacaatttgaatggtgagtaagacagggttttattgggtgaaaaggaaggaaaggcagaaacagggactctgtctaggccagagtccctgctagagcacttcccgccagactgttcaaatctcatgttccacacaggaagaggaagggccagggtcctccccactgcaaagagtgtgagcttcccaaggctccacctcagtgggcgggctggttggagtttctccagggaccccctcccacttggctgtctcgttaatattttttgggtgaatgacatttttctatttaatattatatctgtgagatttatctagttgttgcatgtatcaatagttcattcttttttatggctatacagtttttcattgtatatgccacaatttaattatcttgctccttcttgttgataaacattttggttgtttctggttttagactattatgtgtaacgctgccattaatattcttgtctaaaagggccatctacacttattttttggtactcctttctcctggttcattgaattttcaagtcatacagttcatatatatttagctttagtaaatactgccaaacagttttctaaagtgtactaatttccattctcataagcaatgtagaagaggttttgttgctccacatcctcatcaacgcttgactgccatgaatattcttgcctaaaagggccattacacccattttggggcactcctttctcttgcttcattgaattttcaagtcatacagttcatatatatttagctttagtaaatactgccaaacaggccgggcgcggtggctcacgcctgtaatcccagcactttgggaggccgaggcgggtggatcatgaggtcaggagatcgagaccatcctggctaacaaggtgaaaccccgtctctactaaaaatacaaaaaattagccgggcgcggtggcgggtgcctgtagtcccagctactctggaggctgaggcaggagaatggcgtgaacccgggaggcggagcttgcagtgagccgagattgcgccactgcagtccgcagtccggcctgggcgacagagcgagactccgtctcaaaaaaaaaaaaaaaaaaaaaaaaaaatactgccaaacagttttctgaagtgtactaatttccactcctacaagcaatgtagaatagtttttgttgctccatatcctcatcaacacttggcatcttcagtgctttaattttagccatttagtgatatctcactgtggtttcactttgcatttccttgataactaatgatgttgagcaccttctcatatgtgggttgaacatttggatattctcttttttgaagtgtttaaatctttttgcacatttttagaataagattttcaagctttttttgttattgatttctgagagttcattgtatattctagaaatgatactttattgcatatttggactggaggtaacttctcctaatttatggcttgactttttactcttttagtgttgccttttgagtaaagatgttaattttaatgaagttcaacttagcaatctcttcttttgtgattaatggtttctgtgttcttttcaagacatctttgctatcccaagttcatgaagactttgttgtcttgtggatgctttactgttttacctttcatatttatttctatgattatctttagttagtttttgtgcatggtgtgaaataaggttcaacattcagtgtttttctgtatggatattctgttgacccagcaccgtttagtaaaatgaccatccatttcccactgaatcaagtggcctttctgtggtaaataaggagaccatacgttttgggttatgtttgtgtttttccatatgtgtaccaaccccacagtataaaaaaatttatatctgatagtttaaagttctctagcttattcttctttaattttgccttttactattttagcttgttttctgtagtttcatgtaaatttgagaatcagcttgtcagttttacacacacacacacacacacacacacacaccccatactgttgggattttaattggcattgctctgaatctagagataaaaccaagaactaacatcttaacaattttaagtcttgcattctaagcattttgtttatcccttcagttatttaggtctttaatttctctcaggcatgttttatagattttagtgttcagatcttgaatgaggtgcttgggttttataaaagtgactattaatccgaatcattaattggtaatgtttacaaaatctctaataattttactattatttagagcctgcaattgtattaagagttctgagatagcaattttccatattagctaagtaatatctaaaagtactcagtgctataatttcacttactttacaaattgtgttcaaaatgttttttgcagtatatttgcttcttatttttaaatttgattaagtggtagcattatttagaatctgatttattttctggttaaatatattaagatgataccctctcaccatgcctgaggtctgtgatatatttgttaaatgaagggggaactggtgaatcggcaatttcaatttggttttaagtagtttatctcctctctatattaaaaacttcttagttattaaacccaaacatcaattttagacatagagaattaaagttgtgattgcatgatgccaaaatatttaatcaatttagtttaaaatgttaaactaatggtcttaactgtccagttgtacagttatcttggcacaattcaaaaattggctgtaattttgtctgaattaactgaattagcctgattcaatttaaacatgtcctaagacgttgaaaaattggtgtgtgcatatccattactgtattagtgtgtagtggtagtattaaacatgtacattcactgagttgagactatcttttatttctttgaatatcactaagtgctgtagcacataagtacactttctcaatgattttatttctttttttaaaattataggccacttttgtatggtagagatctttgctttttaaattttattttagtaacttccatatatgttgcctttagtttttaaagtttcatatcagccaacaccaaaacttgaattaaagttgtgataaaatatagtagtagttcacttgttttactattgtactttgaatacgaaagtttaacgatgttaaaactagcttatttccaaatgtcaaggatacataaagtgttcaaataatagttataataataatggctaacactaacaagtattcactgtgaaccaagcagtgttcttagcactctacataagtaaccacatgtaaccctcacaaaaacactgaggtggttaatgttcttatcctcattttacagaaatttaataaatggtttaatttatttccattttatcttaagtttctgattgtactgtgtaattaaaattcatacataatgcaaatcctctatgctttttttctttttaaatagaagagtcatgccctatcctgagaatagagggacatcagctgacatatgacaacataaacaaacttgaagtttcaggtaggcaatataatcctttgcaaagtaatattttatgtaaaattatcaccaaatgctagatatggaatacattataggtgaatctttgatactgcaatttaagatcatagcattaacgtgaaaattttaagaattctttttaatttttttttttttttttgagacagggtctcactctgtcactcaggctggagtgcagtggtgtgatctcagcttgctgcaacctccacctcctgggtacgagcaattctcctgcctcagcctcccaagtagctgggactacaggcacatggctattttttgtatttttggtagagatggggttttaccatgttagccaggctggtctcgagctcctggcctcaagtgatccatctgccttggcctcccacagtgctgggattgcaggcgtgagccaccatgcccgacccataaaaatttaaggtagatgatgtagaaaaaattccgaaagcagggttctatatgtttaatctgtgatcaacaatacctcaacctcttggagaaaaaaaaacttatttaaaattataaaagtgtccattgtagaaattttggaagaagaaaaaaaaatttgtgagaaggaagatgtcaccacccagataaagacaagattaccattttggtaatccttgttatctttccttttggtaatctttcttatctttctttctccttcttttcctcctccttctcttctctctctcccacataaatgctaatgagtgtgtgacacacacacagttataattcttatattacatttcatgtgtatgcatttcctgtcatcaatacacatttctttaaagcataattttgtaaaaggctgcttagatttaaactgaatggctgtactatttttaatctaattttctaactttagacatgagagctgctgcaatgagttactctaatttttacttaagataattcctaggtcaaaggaaattaaaattgagtttttttgaaatatattcatgatttttttctagaaaaatggctacacgttctatatgcaaagtgaatttcattctcttttaccctaaaaggagaaaaataaaatcaagaaattttgctgatcccaagcagcaagatttcgtttgaagtgaatcaattaatagataagggcaacacaaaattctgtttagaaattaacatttctattagtttattaaattgaatcatctgttacattttacaggttttgatctaggagacagcttttctctaagacgtgcattttgtgaaagtgataaaacctgtttcaaattgggaagtgcacttcttattagagacactatgtaagtaaaaaattattttctttatgtttaataatacttcataaattattttctaaagagatttcaaataatttgttttaaaaataaagtttctcaatagcatcatcctcactggaatgcagtggtaaacgtgttgttaatgtatttgttgtttataaaaatcattgcaatctaatcttggctctacagtgtaaatatcatttatatgtacagaaaaaggcacgatcattagagaacagtaattaaatccatttctgaagaaatattgtttatgtttaaagtagacataaccaatattaggtttttcaaggtaaacattaaaacataaggcactatatagattcagagccaaaagactgatatttattgtataaatttttagattttctatgcttcttaagttaaaataaaagaatttagctcttaggtgttcatcttatctattgtatagagtacatagtaaataaaaagctgttttgtgcttttatttttggtcttgatactcatttaattttaaaatagatttaccaaagttttcccttactttttctttcttttttctacagatacacttagagttacaaaaaaaaaatcactttccattcaaatagtgacaattggtcagcaaccatacagggcaacaatgatttaccatatagttggcaataattaaaggatgacttcatagtaattcagaaagctgagttatcaggcaggcaggtagcacatatggtcaggataattattcctggagtccaagatgaatattcgcatgtatgaatataccgcaataaaaaccctcaaaattctacttagcttcatatgcaacacaaatgtttttgtgtgaaaatatgtatgtatgttttcccttcctgggcagtagcctaatatttaagacagacaagattgtggagaatctcaaaatttgaattcttaaagggaaatagcattaatcatctcattgcccttgctcagacgttctgtgtaaatgaggttcataacctacactttttccctgagaaaagtttcttttaaacctattttgtgatacttttggtaattttcatttaatgactgaaatggctccttaaaagtaaactgctcaatacttggtaagaaacaagaatattaaggaaggaatttcaaatcaggggatataatgggtggttgttaggtgggacacttcagcagatgtaactgtatggacccacgctacagctgccgctgtttgggtggtctcataagtaggcattaaattctcagggtacagcagttccatgcttaggtatgcataagccataaagaaaagatgagaggcgcaatatttctcacatgtatatatttagatgtttcttaactaggagtagataactttaattaataaatttaagaaaggcaatacattctgtttaaaaattaagatgcattttctctccccatcttctttcggatttaaacccctgtaatgctggccagatggcaaaaggattttggcaaaaggagtgaaaccttttaaaattcattggattacatgtgagaagacttagctaattttacgtagctacactggaaaacttgctgcgacatttagacaatgctatttctttttaaatttatgtgattataaatattaggcaagacttggaatttgttttctgaattttgggttctaaatcactgcccaatccatgggtaatcaatgtaagtgaattctctggttctgtggagcagaacctggtacctccactataggaaaccgggggtatctggttgagctgcccagtgagtatcaagtagcttggctcatttccacttacatttcacttgttgagccaagtatgctaggatgcttctcttgcatgatgccattttgatttttcaatgagactggagtaaagttgtagctatttatatatttgtaaataagctgctttgcagagtcagcatgggaaaaggcagattctattttatatggaaaatggggatgctttctgtgcctgagcttccttttattgttctggcatatcccaggtgaggttcgtgagaggagagacctaatgagtatgttggtctgatacctgttaggcatattcaatgccttgagccttgcttaatgtaaaactcccaaagaccgcttttgcaggggccttccagatagacatctgtcaggtccacaacccaggtactaacaagggtaaatcgtgagtctcaggcaaaatacaagtcaccttttatctctggataacaacgcagtaaccaagagcttctgccctgggcaatagtatcacaccttatcagttgcccatggttcttttgggtcctgtacctgtgctaaagttatagggaagcttatgagaggccacacagacagcatatatgttccctggaggagggtcccttccctggccattcccctaccaacggttaattgtggaggccacactttaaatttccaaggagtaacttggaaattatactgcactctcacgccagggggccacaatagccaaccatctacggtgaggggcttggagggtccatggccaacaccaggtttttttgttattgttcccctacttttaggggtgttggggcaggcaataacagattactgttcatccccgtacctggctggagaaggtcatccttcctgtcatagatctggccacatggcctggccctacatgggtcagtgactaactagctaattctataactttcaggtaatgaaccacaaggtttagccttgataaactgcccagcatcggttcagattaccacaggtgtcacctctttggtgatcactatctacactgccttgagttcaacttattaactactttatctacacctggttttaaaccatatgttgtcagtgttaggctggactgcggcagcaatcaaggcagcagcagtcctctggctagacctatctgtataccatgccccatcaggagtggtgggggtgcctcaggctccatggccttatcttgcattaggcctataggcttcaagacctcttgtaaatctgtgctaagggacttgtactcagcatacttcactgctgcaagtaggggccccacttcgctaaagtggatgtctgcaccttccctatccagggggttgttacccatgaatgtacctaccacactgttgggtacactctgcatgatgactatatcccaatctgccatgcttttatgagcctgaagggcagcatacgcacttactaactgcttcccagtccggggggttgttatccataaatgcacccatcctgctattactaactgcttttctatcaaggaataccagagctcagctcccttccatagctgggaccaaaagcctactgatattctcaggtgctccgtgcactgccataggccctaactgaaactatctgtggtcacatgcacatctagcttaaatgggcacctcttgtcaactacctgtagggcttatgcctgctaattagcctgcttggctaccaggaagactgtctcagcagcatcataccaatcctaggcaaggggagcattgccgcttctaaatctgcaagagaatcagaggttaacataacatcattaataagatcatgacacatggtggggctatgtatatagccccgcagcaacactgtgaaagtccattgtcaacctcccatcaaggcaaactgatggccttctgcctccttgagggctgccatagcagtagtcacttcatgtaggcagtgccccacatatggggtgagaacagcagctagagagccaaaatcactcgggggcactgagcccagcacaagatccctcatgtgggagggaaagcgttcatcatctggcccccaggtattcagatcaaatggtctgctctatacccatcttccagagtatttgcacaaaatgagtatatgatcgccatttactcacagtttctagtatctctccagcatcattccaaacagtccatattgctgccattagccactcgattaatgtgtgttcaccatgcccttgtgccaaccatcggcacagatacagccactgacgaagggaggggtgagttgtgataaaagccagcttttccatctcagaggtggagcaagaaatgctgccagcctccttgtcccaaagacagagtggccaggcagggaggggcactgggtgctgctgacactgttacctaactctcacaactcagtgggtgtataagcactataagaggtgtgttccactactgtggggggttccagggctctccactgggttcccatcagatggtcatgttgtaccttttgacagatcatagggtgagcctgcagtggtggagccccctcctcctcaggatcagaccaaatgggactgtccagcctggaggacaggctcaaggtcacacttacagctgttgctaactcttgttccaggctgtttatctgggcctccaagtgccctgcttgcacctgaaggtccctcacccccggttctgctacaagctgtgcacttgggtccctaggcacacggcttgtgctgggatgtcccttacctgtggcactgagcatgtatttcacacagtgcagtcagaaatgcccatccaactctgctggtggaggtgcgttccttctcggtgctgcgtgcttccagctgcctcggtgctttctccacactcacaggagacctatccactgcctcccacatttccattggggcccatccaagcagcaccactgacaccaggtaccacagcccatgctgcagccacagagccaacccgggagccttcaggggccaaagacccactcaccttatcctgccaactatgccaattgtcaggtccatgactacgccagatgttatgctggggtcaggttccagctcatgctgagatctgaagggagtgggtgggtgagcagagagctaaaagaacacttggagggctgtaggcaggtgaaaggtagttttattcagcagctctctcaacagcagcttacacacactaggtctctcaaactgttcgctctgtcttggctgcttcatccggtggctcccacacacagctacatggacagctctcccttcagggtcagcagcttaactgtttctctctctgggcatgagtgagctgagccgtgtcctggctccccgctgttcatctgcaaagatggacagctttgactctctgtttctctgggcgcaagtgcacttgtacagtgtcagcagggcaattatacctttcacagacaatagtggcgtagggccaagggatggccttcccatgttatggctacatggttttgataacaagaggagttatacgcctgtgctctaaactcactgagtcactctggatgtttacctcggcctatccttgaccaaagcacagccgtgttccttacaacatcattgtacacttagaggtggcacaggctcaggggatatttgaggggctttatgtgttttgttggctttaaattcatgtccattcttcagtatttatgggatagcaaatggtaagtatttgggggctttagaagattctgggtggcatgctacctagttctctagaattatttgtttagaggaaattttcttggcttcttatatctccaagtatccctagttatttaaaagagataattcattatttgtatacatattgagagctatagcaaagaagattatattttgattattttaaaattgtgttttggcagttatcaggggaaattggtaaaatactgagtaaaaacagataaaaacacacacaaacacacatactatagagtaccttattttcttggcataatgtagtctctatctagcttccattagttgcttcaatagaaaattcaaataaaatgtcttagtattgaatattttagatgaatgttgaatttctacatgctgttggttctgaaggagcaacacactcagcttgactggccgatgaagaaattgatttcaaatgtaccaaggaagtgagttttctgattcattgtttaattcaagtatggtaaagagccttatcccttaggctcttgatagctactggctgtctggaatgctatgttgagaaggattctggagccatagtgggtttaaagtgctgtgacccattaaaaaaaagagggagggaggagtgagcatatgtgttccatatctatagcctctctgaattaggatgatttctgtaagctggtggcttttgcaattgaagcagtgtctaagaatgaggggaaatgaggctacgtgtgaaaaaataacacagattaaatttaatacgatttatgagcttgaataatatagctagacacagtgacataaatgacatatatgatccccttagtatttgttacaaataaataaatctctagtgaaagggagtcttctttatctgtgtctctgtatctctctcattcaattggtgtctactttatgaaagtaaagataatttagtttcatagctttatgtgaaaataagaggtagctggtaggagctattctaaattatgtttatggatttacaaacataataatctttagcaagtaggaaacccaaactacaaatttggaagatgtgtaatgtttttcagaaatatttgaactctggactttaacagttcccttgaaaataatccaaaatatggacaaaactgtcatatgtgttgtaacatgatgtttaccttgtcttttctattgttgaatgatttatcccatgggactaccttttctacacggacctttacactatcttcagattattattattattatttttttttttttttttttttgagacggagtctccaaaaaaacagagtctccagctctgttgcccaggctggagtgcagtggcaccatctcggctcactgcaacctccacctcccggtttcaaacgattctcctgcctcagcctcctgagtagctgggattacaggtgcgtgccaccactcctggctaatttttgtatttttagtagagacagggtttcaccatgtcagccaggctggtctcaaactcctgacctcaggtgatccacccgcctcggccccccaaagtgctgggattacaggcatgagccactgcgcccggctgatttttatcattataaataacactacaacatacaagaaagttgtttttttctgtatttaggattattttcatacaattgacttttagaaataaaattacttgttcatatttagggatcttgatatatactactaattatgttcaatcattgttttctccatgtattctgcatattttccaatatcttctgtagcactaggaattatcatgttaagattttgtgttttatttaacttaaaacttgtgcagttacaaatagaagctgtagtttactgtataattttcacagaagttcctaaaatgtttctgttttgctaaagggtgaataagaggtagcattcggtaagtcactgaaatgaatgcagtctagtctagagcttatccttttactcagcaagcatttgttgagtgtcaccatgggccaggcactttgctaggttctgagcttacattgataaaagaatgtggatctagtctttccttcctggaacctgctagaaagatacacagtgcaaggaaaagctacacttcccccttgctttgccttcatagaaggcaactgagatgtattgccttctattgttcaagcttagactgcatgactcaaatttcaccccttataaaggctaaacttccttaagcatcatgcacaaggctaattttcaatgttttcattccttgcctcttaagggactattttgagggactattttgtaatgcatagttctcctttgagtcctctccaagttctcaaaacaaattcagaggctgaaaacttgttcagaactctgatatcgaagtgtctccttgctgagtgttttagaaggattactttacaattccattaagctctagagaatgcctatttatgcatcccttgggttttcatttggggcattccttcattgtgtagataggaattttcctatataaggataggtgacttagttacaaagttgtccagctgtttttatgagattgtatgactgttatacatgattatgtcatcactgtatttccttcattgcagtttggcataccaagaatctgaggttagtcattaagtcatactttttttaaatggaaagaacatatacaaatatttactactcaatagtcaaaagcacctattttattttttctagaaaattcagaattgttaataggcagcaataaatttcttagtatagaaatagctattaagatgtaatgtaatatgaaatattattagttcagtattgttatttactgattttggaaacatttgatgttatcattatcaaatttaagtaagttgtgattttgctctttcagatttcatataactcagtattgggaaaagtagaacatatcagtaattaatcatatgtgtataaattctacaacattcatatgacttaaagttttttcttggacttgaccattcatttattagccagagagaaataagtttgtttaaaaggtacagaaatgttttaagtttaatgtctatttgtggacattagtagataaaatcttataaaattaaaatatttttgtgtttcacatgagttaaaatggaaaaaccataaatctatttatacatttaagaaactaaagttcctatagtaagaaacaataatgtcactattattgccttcaaagaatgtattcttaacaattaaattacccaaaaaagcctcacataaaatggaatgaaagtgagaagctgcaattcatttacaaacttatccattttctagcctcaaatgtacataaactttctaaggaaaagagggtaggttctcatttctgaggaaaaaaggagtagtttttcacttgtcttgttgaaacacaggacagaacattagtaaagagtttgcagaaagaggtataagatacggttcttgcctctagggagtgtgtgatatctctcctcttaggggcaagaaatgaagacagacttaattataattataattataagcatacagttaatgctttaaatgttcaacggaacaaatataaagacaaaatctcttatatttgggatgataaaaaaatatcttgaagactatgggatttaaactaggctttgaaaactgaagagactactgagagtcagagatgaatcaagttctggggagaagaaagacatctaaggtgagggaaggccctaggaggttaagacatggaaaaatacaataaatataattacatgagataatttctatatgagtaaaacattgacaacccaatttatccatatccaaggtggcaggcagtttgattttctctgatgctcacaaacattacataagcccctggcaaaaattttgaagaactgatatacgattttccccaccacatccagatggcttaagttctaatgaaagtctacggtcattcaaaataggtaataggcctctcatatggtatcatataatcggaaaggtattatttttctttagactccattgctcacatcagaactcccattctttggccaggcaggaaattgttcagatatataagccttacagggtagagattacatccaactgattcatgtttgtgtccctcgtggtacctgacacacagtggtgtttagtgctagttgaattggtatgatcttaagtttaaattgaagggatatttgaaatttattggtacagctacttgcatattttaggcaaccaataatttcttttcaccagcacctcaaaaaataaggcaccttacttctaattcttgtactagatcttttcaccaaagaagacttaagaacaaggcacatgtgactacccagtttccaacaatgataatgattcttataataccaccttacatttatgaatgttatatgatttacaaagtaattttgccttcttgtatcaatggtaccacaatgacttctgtgatgtagtactttatcaccattttatagatgaaaaatgaggttgaatgacattaaggaattcacctaaaatttcaaaaataataaacagttgtgtctagaactcagttcttctgtctccaaatccagaattaatttctactttattatgactaattacatgtaaattatcttgttatgtctatatgccatttactttgatagtagtgaggtactagctaaatgtactacttaggagtcataataaagcaaatgttctcataaagtaatgaaactaaagtgttctattttgataattacttgggccagtctaataggcattgattaatctacctctattgttggattatatattagatttttttctttttccagtcattcttttatcctatgaatcaatcttgtaagggacagcagagcttttcgcctggtagggttgtgtgaatgtatctgtgcagtgtacactgcagattttcagagtgtacaaaagaaaggcatgtaagcatgtacttcagtcttatctttaatcttaatttggctcataaaaatgctatttgaggactaattagttattatccttaggtggttgcaaatgcgttgatttataatggttgtaaacctacaaataagcatggtcttaaatttatgaattagagaattgacctttaatagtgcttgatgctttgttatactagtgcttcagcatagctttataacaactctaaagatttttctgtaggctgattggactctgtgtatcacaaaatagcatcaaatagtctaatcctccttctcagacacagtcagactgtaggatataattataatttcaataataaactttgaaatctatgtcaaccaaggaagaataattgtgccaactgataaatcattactttattgtcatttcaattctttcaacttagccacaaatgctaattagaaaataaacatggtagcagaaaaactatgcttatgttattttatgtgattcctgtaagtttcctacatcttgttcattatctcatttaggtcagcacttatgtttcctaagacacttttttttcccccaaattaggtgacattttaataattttagactaaagtaataaaatattcaaataattgacttgattaattcctttcaccctggctatatctaagtaatttggaaacatcataagttcagtgaaaatgttaatatgaacacatgtggtgatgccatgcagaattaacatctggctggttgaatttgagactgagttgaccagatgttttgtgttcaagttatttttcttatttgaacaatctcaacttcttctctctacttcataatttcttaatttcagctgttctccctggaggcaaccccccttctttcaaaggttaaccccttcacttgtgctcttaatcctctcctagccagcctcctctaagaccttgatccacccatgatccccctgctcttgggtcttcagtgctcctctccacagtatcctggcctcttactctacaaatatatacttaatccttccctattacagaaacattttccctgggcagtcccctttactcacagacttcttaaaggaacaatgttactgtccacttttacttcttcacacatcccttagcccattaaaatctgactaggacttcttgaacactatggaaatttctgcctcatagttgccggtgacagctgtcctaattccaatgccagcgttgacctaggtgttgcactaaacttcctttgttaacccatttctgtctctctctgtcataccatgcccaccttttctgcccattggaatcctacatatcctagaaagcttagtacacatgctacattctacactaagccctcactaatgtccttcaagtttccttctttttttggtggtccaataccactttttccataattcttacataattctgatctcattctgacttgtgtaatctaaatgttctcaggcctcgttaatatgtggatttaaatgatattatattaacatcaatgcgtaaattgatattacttctactttctacatacatcactgcttaaaacctactgttgttatttctgggagcccgaaaagtgatgcacatgtgttcatgttcaaaagcagatatgcttttcttcttgttttctaattttcttatcaatgcgtgttgctattgccattgctgggagctctctccatgcaaatgctactctgtgagacccaaccaacctctgctcatggctgctcattcttggcccacaggtgccagaattaccctgtggcttatgactgtgtgaggtgtgcatgtgtgctttggaaggtggtggcagagatctaaagaccccttctctaactgtcccctgggccctgaggcagtgtatcttgggcacagagcctcacagagtgtttaataaatatagtcctatcaactcctggctcaccatcatttgtgagtctcaaaagccagtagaggccaggcacggtggctcacaccagtaatcctagcactttgggaggccaaggcaggcagatcgcttgagcccaggagttcgagatcagcttgagtaacatagcaaaaccctgtctctacaaaatacaaaaaagttagccaggtatggtggtgtatgcctgtagtcatagctactcaggagcctcaggtgggaggattgcttgagcccagggaggttgaggctgcagtgagccctgatcatgccactacactccagcctgagtgacagagtgagaccctgtctcaaaaaattaaaaaataaaaagtatgaatacgaggcaattctctctgttatcctcaagtttgcctctctcttctgatttacccacaataagaatgtaaagtttcttttggttaagagggctatattgagaaaaaatattttatgttatattgtcattattatttctaccttcagctttgatgccagtgaaagaataaatactaacaaagtatttcattcaattcccaaatgatagtaaatattatatgctaaaccctgagaatttaagggtgaatagaaacagtcccctccattgaattatttctgtttggaaggacaggccaaaaataagctgttatggcatataatagcaatttttagatatatgtatgataaactctgagagaacagatgaagccaggaaaagcttcatagaggaagtgaaaagttgagccttgaagtgtgaatttaccaggtgagccaaggggtcaatgtatgttgtggtagttagagggagcatcatggtagttttaaaggtcaaagcaatttgaggaatagtgagaaatcccatgtggttaatgaacacaggtgagaagaatgtctggaggtagagaagacttgaaagtgtgggctgttctgaaaggtcttacttgctggcatgaggggtttgaactttattcatattttaaaaaaaagtggaggtgtagtagcaatagcactacatgctagaaaaaaacagctgagcgcatatgccattgggaaaatctcagctttcaattaggtctaggacctcccaggctgatcctaaagcaacagttgagctctcggacccaaggatacttcagaatttagaggaccttttgcgggcagggttgggtttaatccagggttaaaaaaaaaaaaaccctttcctggctgagggacaccagaaaaaactaaccttcaatgtatcctcatttctaaagagcagactgtctaatttatccttggtttttgttatctggatggcatccagtagggggacttgttttcaatgggaagtcgtttacaatgccacattgaactagtgctaatcagatcaggcgtgagattgttagagggtcatccaagctttgttttcccattaacaacctatctgcctgaatcccctcagcaaacacaaaagggctaagatttcagagtctctgtggctgtggaactccaacatcatcaaccagcctgggaggaaggcatttcagacaaaccctctaggccctgctagccaaattgcttgtaactgacaggtgatggtgggtgtcagctgggaaagaaatgacttactataaactccaagcatctctcacttcactctcaggaaatgtaacttgtatcatatttctcttcctggaagatattcagcaagtcagaggcctcactgatacttgtaaatacggaagttcttcctaaaccctgcctcacacttactcggaatggcagaattaatttggaagccagttcttgatatttaaaaatcgatttttttccatttagccatttaattttataagcaaaattaaataaataaagcttggtcttgttaaacaaataaataaagcttagtcttttaaatatgatctggaaaattcactctagctctatcaaaatagcactttgctttcaaggcttatgctttgagctggttgaagaattacctccggaaccactgtaatcagtaattaaactttttaaacactttgctatgtgaatgtatctcacactcaatttttagaacatcatttatgaaatgaaatttctctagaataacaatgtcatcttgcttttcagttcatgagcactgaaattataaaagtttcttcatcttttttttatattttagttcttgtctcacattccttattatttatttaagcaaaagatcaaacaggaaactggtaatcatgaattttcttcctaatcctttcttgttctgtagcttggtttatcctttcctttttgtatatttgaaaccgaactgttactacacagagacgtaaccatattacaaactgtggttcttttaggaacactgaacaaaaacatcaaatttggacttgctatacaatgaaattgctaattacttaatatactaataagtaaacaaatttatgagcttcattattgtctttaagtttcttgacaacaacccaccagggcctagtcatggagaacaaatgcaacctactgtctgcttctatctccccataaaacaactgtcaataaatatgagcatgtactttaaaatagtgaattaattttaaaattttctgcttttccccaactttgtcatacttacaatgctaaccattggaagggagtctgaaaagcaaagtttatcctcttaaggcagtttttattggcttctcattaattggacagccgggaatgctcattatttgttcagttgataccctctgttgctgggagaccagatacttcaccttcattaagttaactttgtagataacaatggcaggccctgatttcacaattcagggaatgaatagaatgaaagtttactgtgtgccaggaaaaccataatgtaggattggtgcaaaagtttctctttctttccatcatcatttgagatagtcacatgatcattattttcacgtttgaataaattacttatcttttagttacgttaccattctactgttgttcttcccaaagtatgaaaatcccaatgtattacttttcattaggaaaataaatacagaggtactatttatcagaacacgttttacctttcttcacattacctagttactagtatacatactgttctcatgattttcactactacttcctgaaaattacactcatctcatctttttttttttttttttttttttagacagagtcttgctgtcgcccaggctggagtgcagtggcgcgatctcagctcactgcaagctctgcctcccaggttcacgccattctcctgcctcagcctcccaagtagctgggactacaggcatctgccaccatgcctggctaattttttgtattattagtagagatggggtttcaccgtgttagccaggatggtcttgatctcctgaccttgtgatctgcccgcctcggcctcccaaagtgcagggattacaggcgggagccaccgcgcccagctttaaattacactcatctttaaggaaatgcttggtgaaccatggcacatgtttacctatgtaacaaaactgtgcatgctgcacatgtaccccaggacttaaaataaaaatgaaaattaaaaagaaaagaaatgtttggtgaaaacttctaagttttctagaaaatgatctaaggaattagagagaaaatattcctgattttttttcatcttgtttagcatggctatcttttccaaaatccaataggcagtaatttctattttgaagtcataactgtgtgttttgtgatacttcctgatctatgctcaaaatatcattagaggaaggaactataataatttacctttcagggctactagccacgtaggatgtgcaaatgtcagaataaatactttgcttggagcccaaaatatgattcattgttgttgttaatattatagtgtgattgtaaacattttatttattcatttcttgaaattaatatatttacttatatccctccttaatacttatgaaaatagagacatttttcccctcatagtgccaaaatattacttttaagtcaggttggtaatgatgaggggaattttattcttaaccaaaaaagaaagctcaaaaagatacaagcaacttgatacattggaagaaactaaccttggaattaaaagtcataagttcaagttccaacctgacctctggcagagtaaaggtgaggtagttatttaacgtctgcagctttaatttctcatttatgaagtgagatgattgatctaaattactatcaaagtccctttcagctttaggagtatagaactacaggaaactatgatgtgtggtttcttatgaccaacacatttccaaggacttgaagacttctatgaagacacttttggtgaaatattggagcagctattatattttgcttcagcctgtagagattttaaacttctttttgaaattaagaaactgatgtgtttgttaaggacttctttttctatcaaagtttttgattaacctgctttagaatcacataggatttgacttttccatctgttgttttcctgatgaatgtgatatagcacagtctcataaggcctccacgttaaggccttatgcaagataacatagattttatgctgagcaacgtaagtgttaagcacttactaggactggttataggcatcattgtggattttcatgaatggaacaaatctttatggatgcttcctatatgcaaggtactagtctagatgcttgatttacagccacaagtcttacaggaccctgtttttgtggaaatcacattccacaaaacgggcaataaatatgtaaaccaataattcttaaaaagtcaggtaggcacaaacctatgaagaaaacagaacaaggtaatgtgttagatggtgactagggtgaggacaatcttagaccgttcaagggaagtgatatttgagctgagacctgaacagtaaggaaaagccatctaaatcaagggtgtcgaatcttttggcttccctgagccactttggaagaagaagaattgtcttggaccacacatgaaatatactaacagtaatgatagctgatgagctaaaaaaaaatcacaaaaaaatctcataatgttttaagaaagtttacaactttgtgtttgggctgcttcaaagccatcctgagctgcatgtggccagtgggcggtgagttgagtaatcttgatgtaaatgaagacctctgggaaagactgtcccaggagaggaaacaggaagtacaaaggcccaaggtctcaatgagcctagtgtgttcaaggaacaaaactcaagtcattgtgcctggagcctgggtgccacacagagactggaataggagatgatgtgtcagaggaaggcaggagtcagatcacatcataccttatgagtcatggtcagagaaatgcatcttattctaggaaccatgcaacacttttagaaggttataagtaagggagggacctggtctgattttaaaagctcattctagctgctatgtgcaggccagactgtaaggaaaggcaaagaaggaggacaatcaggacactataacaggagtcctggggagagatggtggccgcttgggatagcatggtgatagtggagatggagagaagtagccagagtcaagatctgttttggtgataaaaacagtaagggcttggggtggtggctcatgcctgtaatcccagaacttggggaggccaatgcagatgtatcgcttgaggccaggagtttgagacccgcctaggaaacatggcgaaattccatctctacaaaaaaataaaaaatacaaaaaattagccaggtatggctgcacgtgcctatggtcccagctacataggaggctgaagtgggaggatcacttgagcctgggaggttgaggctgcaatgaaccatgaccacacctctgcactcctgcctgggtgacagagtgagaccctgccgcaaaaaaataaacccataaaataaaacacaaaaaccagtaagacttgctgatgggttagataggatgggggataataaaggaaaggcaggaaaaaataataacttgcagggatttgggtggggcacctgagtgaatagccatgtcttttattgagatgtggaatccttgtggagggatgttctgacgcagcaatataaaacgttcaatttcagttatttaattacaatgcctttcccctccacgtggagatgcctactaaggacttaggtatgtaagtccagagcacaggagagagaaatagacaaggtttatcttggttgcatctcacatcccctcctttttggaactttcctcccaaactcccactgccttaaggtgacacatttgctgcccaagactcagcatctcatctctgtctgtctaactcaggagagcttccttctctggatttgttctctctctgtgtcttccctcttagaactttgcttcatagcagtccccacagatctctgctctgtgctttccaaggtgagaattaattattacatagtttgttagtaatgtgtgaccgactttttgggactatcttaatattaacagagcttgtgttttataaacacgaggattttccagacaggaagaaagctctaaaagtagataattaggtgttttggcttgttaatgaaagcacttcatagttaggaagaatgttgaatgtacaatctatttaataacaattatacaaatatagagtgatcaaatgcttcctctatctcatgccaagatcttttctgtaatacagaaaacttttaggttttattctgtttgtatttcctaatggttttaagtaaattttgaccagaaaaaaaattttcattaatcagataggaaaaaatctagagaatgaagttaatatggaatttggacaaatataattcattcttaaagtcctatacagtggaattgcttcagagttaataaaatgttattttttatccaactccatgtatattactactagtaactttgtaattagatattccattttaagtaaatgggtgaaatattgtcataggtatgtttttatttgaaagttttttgttttgctttttctcctaatgcttcagtgatttacttattataaaggctataggttgggagttctagacttttgcaacttaatttttacctaccaaaatagaaaaaataatatttgttagtgcccttttaggtgtgtgagggggtgcagtatgtgccaattctccctcatctctgtccttgaagaatatagggataatttataggtcacatcagaggttagggttatttttcccaagatgggaatagttgtaatttttaaaaacctgatcatcagcacaattcatgccccttgcaaaaactgagaaagtagagaaaatataaagaaaaaaataaaaatctttcttaatcttaacaccaagaaagaaacattttaatgttaagatttttatgaaataaatgttttattagggtcaaagcctcactggcagtggttctgacacctggacactgcttgtactatagttagtcatttttaaggagcgctatttctgatcccctggtcacttccccgaagtttcatatggttttcttccattttatgattaaacagggggctgctgtacatagagaatgtcagagagcagatgcaagctacattttatatttctgcaacattgaagtgaattacaagtttaaaggaatccaagatatatgaattacaaggcttcagagatactccagattacatctagagctggctccctccctcagaggccagtgtgaagtggactcccaggcagcaattttcccttgacatgcctggagcacttcgaccaactttagtttgactgtatgatgtttagttagccatattttgaaaatattgattttatattgaacattttgttaatctgatatacttgtgccctcataggcccatgaatatctagatgaccttaattaatgtgtagaaaagtagacaatttaaaaaaaggataaattacacttaaatttcactgagtctaggctcttcaaatgtaggttagtattaatttatgtggataaaatttttatttatgacattgaactacatacaacatgtataaaatggagggaaggcaggaaacatcccattgagaatttctagtcatatatatatattcatctatatattcatatgtatattcatatgtatattcatatatatattcatatgtatattcatatgtatattcatatatatattcatatgtatattcatatatatgatatatatcatatatacatatgatatatacatgatatatatgatatatatgatatattcatgatatatcatatattcatatatatcatatatactcatatatatcatatattcatatatatcatatatattcggatatatatcatatatattcatatatatatcatatatattcatatnnnnnnnnnnnnnnnnnnnnnnnnnnnnnnnnnnnnnnnnnnnnnnnnnnnnnnnnnnnnnnnnnnnnnnnnnnnnnnnnnnnnnnnnnnnnnnnnnnnnnnnnnnnnnnnnnnnnnnnnnnnnnnnnnnnnnnnnnnnnnnnnnnnnnnnnnnnnnnnnnnnnnnnnnnnntcatatattcatcatacatatatatcacatatgtatcacatatatatcacatatgtatcacgtatatattcatatacgtatcacatatattcatatatatatcacatatattcatatataatatatccatatgtattatatatccatatatgtcatatatcatatcatatatcatatatatcatatatcatatatcatatatatcatatatcatatatcatataatcatatatcatatatctatatatatcatatatcataatcatatatatcatatatatcatatatatcatatatatcatatatcatatatatcatatatcatatatatcatatatatcatatatatcatatatcatatatatcatatatattcatatattcatatatattcatatatattcatatattcatatatattcatatatattcatatgtatattcatatatattcatgtatattcatatatattcatatatatattcgtatatattcatatatattcgcacatagattcgtatatgtatatagattcgtatacgtatatagattcgtatatattcgtatatagattcgtatatattcgtatgtagattcgtatatattcgtatgtagattcgtatatattcgtatgtagattcgtatatattcgtatgtagattcgtatatgtatattcgtatgtagattcgtatatgtatattcgtatgtagattcgtatatgtatattcgtatgtagattcgtatatatattcgtatgtagattcgtatatatatttatatgaatgaacttagcaagtaaggatcagcgatatttttcttactgggagtatcactgaataagcaatggataggatttcttataggaaattacactccattcaaaatattcaagcatggatatcttagacatagcaagctgtcattatatctctctggtaacccaatatggcctcttttataacagaaattttggcaagacccagagaaactattctgtgtcacgttaagtgtttgtgcttgtgtggtataaacaacaagcatagtttgtaagagtagatttttttttaatattttatttttaaaatgcagaagtttttcttcaaatagcataatcttggcaagcaaaatcatatttggtcttgaaagcacaatataaatttctgaaagggaaatatagtaattataaagattttcattcattataaacttagattaaaatcaattattccttaaatatagctaaatttatttcaatgtatattttaaaatataattgttatatataaatattgataatactcttatttttttgtcacagcagaaactactcatgagatgcaaaaatattttcagcttttgaactagattataaattatcgaaaaataattctatttaggttttttttttttttttttttgatatggagtcttactctgtcacccaggctggaatgcagtggtgcaatctcggctcactgcaaccttcacctcctgggttcaaacaattctcctgcctcagccaactgagtagctgggattacaggcgcgtgccaccatgcctgactaatttttgtatttttagtagaaatggggtttcactatgttggccaggcaggtctcaaactcctgacctcaagtgatctgcccgcctcggcctcccaaagtgctggaattactggtgtgagccaccacacccgacctctatttagtttttgtttattaaacatcaaagtatcatatcaaaattcagtacatctctgtctttcatttgctggatcactcactcattcaacagataaagtgccctgttgggactgcacttaggctttgtgagtgatacaaagtatgttaaatgctgtgcttgctttcaaagagctttcagtcttaacaacagatggactggtgactgcatgactatcatcctaagtagaaaatgaagagaaaaaatgtttttattatcttttgctttgtaagaaaccactacaaaacttagtggctaaaaataacaatttgttatttctgaaggatttcagaaaacctactcctcaaaaaaagcaataagaacacaggcaaaatttgtcaaaatcaatatattcagaactttttaaggggctttcacaatctaatgagtgattattcaagaaaaactttgaatctcagtaagactagcaggctttatggcattttaacttgtcctattcatatccctctctctccaacacatggtaggcttgaaaaccagtagcttcagaatcacagtgaaaactagctgcctagcagctgctggaaagggaagaaagagtgtgaagttcattaaaagctccattttcagggaattgccattatttttcctgcctggtagttccctaaaaaccccaattcttagttggtctttatttgacctgatcagagcttgtaagaatagccctttcctgtggacattaattgaaaataatcagtggcaattgtttaatattgcagctgcctgaggcaggagttataactggaataaacaagaagctgatcaaaaaaatttttaaagaaaaaactggggaagaagacatccatagagggcactagaaagctccaacatatttgtaggactccagacacatatttctatgttacagggctgtgtgaaaactccggaaaggcctgaaaaggccttaaaatctttggcaaaactccaagctctgaacaagcagaacatgaaggctaaggtgatttataaactaccagcctgaacatttaaggtattttctgtcacacacataggccttcagcaaaggctgggatgcttttgggtaagggtgtttaactattcaatcattagttgactactaagctaaatgagcagaaacttcaggagtcaaacactttacagaatttgtccagaaaagtgactaagcaaataaaaagcagcaacaataaagacaacagacagcaccaacggcaaaccattgacaggtagagtctaatttccaatgttaccatattatattattttaaatgtcttcttttctttcttcttttaaattatactttaagttctagggtacatgtgcacaatgtgcaggtttgttacatatgtatacatgtgccatgttggtgagctgcacccattaactcgtcatttacattaggtacatctcctaatgctatccctcccccttccccccaccccatgacaggccccggtgtgtgatgttctccttcctgtgtccaagtgttctcattgttcaattcccgcctatgagtgagaatatgcagtgtttttgttttttgttcttgtgatagttgggctgggaatggtggtttccagcttcatccatgtccctacaaaggacatgaactcgtcattttttatggctgcatagtattccatggtgtatatgtgccacattttcttaatccagtctatcattgatggacacgtgggttggttccaagtctttgctattgtgaatagtgccgcaataaacatatgtgtgcatgtgactttatagcagaatgatttataatcctttgggtatatctgggtcaaatggtatttctagttctagatccctgaggaatcgccacactctcttccacaatggttgaactagttcacagtcccaccaacagtgtaaaagtgttcctatttctccacatcctctccagcacctgttgtttcctgactttttaatgattgccattctaactggtgtgagatggtatctcattgtggttttgatttgcatttctctgatggccagtgatgatgagcattttttcatgtgtctgttggccgcataaatgtcttcttttgagaagtgtctgttcacatcctttgcccactttttgatggggttgtttgctttttcttgtaaatttgtttgagttctttgtagattctggatattagccctttgttagatgagtagattgcaaaaattttctctgattctgtaggttgcctgttcactctgatggtagtttcttttgctgtgcagaagttctttagtttaattagatcccatttgtcaattttggcttttgttgccattgcttttggtgttttagacatgaagtctttgcccaagcctatgtcctgaatggtattgcctaggtttttttctagggtttttatggtttgaggtctaacatttaagtctttaatccatcttgaattaatttttgtataaggtgtaaggaagggatccagtttcagctttctacatatggcaagccagtattcccagcaccatttgttaaatagggtatcctttccccattgcttgtttttgtcaggtttctcaaagatcagatgtttgtagatgtgtggtattatttctgagggctctgttctgttccattggtctatatctctgttttgataccagtaccatgctgttttggttactgtagccttgtagtatagtttgaagtcaggtagtgtgatgcctccagcttttttcttttggcttaggattgacttggcaatgcgggctcttttttggttccatatgaactttaaagtagttttttccaattctgtgaagaaagtcattggtagcttgataaggatggcattgaatctataaattatcttgggcagtatggccattttcatgatattggttcttcctatccatgggcatggaatgttcttccatttgtttgtatcctcttttatttcattgagcagtggtttgtagttctccttgaagaggtccttcacatcccttgtaagttggatttctaggtattttattctctttgaagtaattgcaaatgggagttcactcatgatttggctctctgtttgtttgttattggtgtataagaatgcttgtgatttttgcacattgattttgtatcctgagactttgctgaagttgcttatcagctgaaggagattttgggctgagacgatggggttttctaaatatacaatcatgtcatctgcaaacagggacaatttgacttcctcttttcctaattgaataccctttatttctttctcctgcatgattgccctggccagaacttccaacactatgttgaataggagtggtgagagagggcatccctgtcttgtgccagttttcaaagggaatgcctccagtttttgccccttcagtattttattggctgtggtcttttcaattaacaattagaagatatgcaaaaagaaggtatgcaaaactatgtacagataaaagagtggccaatagaaactgtttctgaggaaacctagacattaaacttacttaacaataactttgtctgctattttaaatatacttaagtaactaaaggaaactgtaatgaactaaagaaaagtatgagaatgatgtcttaccaaatagagaatatcaataagtagaaattattaagaagcagcaaatcaaatttttgaatagaaaagtataaaacagaaatgaaaaatttacaggaggggttcaagaactgatctgaggtaggagaagaaagaatccaggaacttgaagatagttcaattagtctgcagatcgggggaaaaagaatgaagaaaaatgaacagttccaagactgtgtgataccagcaagcatgcataataggaattctaggagtggagagagagtaaagaaagactatttgaagaaataagcaatgcaaattcctcaaatttggtaaaaggtattaacttatacattcaggaagctcaacagactctaagaaggacaaactgaaagagatccacacttagtcacatgataaccaaactgccaaaagtcaaagagagaatttttacagcagcaagagagaagtagttaaccaaaacagaaaacaagaagttctcaatatgagtaagctgacttctcatcagaaaccatggagaccagaaggcagtgggatgacatagtcaacgttttgaaggaaaaagactgtaaatcaagaattctatatccagcaaaactatccttcaaaactgaaggtgaaattaaggattaaaaaaacccagaatttgagactagcacatctgccctataagaaataggaaggaaattcctttaggctgaatgaaaggaaactagacagtaactcaaatccaaacaatgacataaaaagcactggaatagttaattacatagataaatataaaagccagaataaatgtacttagtttgtgtttcttttattttcttatcagatttaaaatacagttgtataaatacatacatacataaagcaatattagaaatcttcattgatgggaatataaaatataaagatgtgatttatttgtatgacaatagcacaaagcaagaaaaagctaacaggtatatagaagcaaagtgaaaaataaagctaaaatatccatgttatatttagcatggtcttcagttgggactaagaaatcagtattaggaactcatttgcaagaatttaatatgaaaaagtttctttggaaaatatttgtttacttattactggtgttctttaaaattctctgtacctctctctactaacaaaatcaagtcataccattttatttccttgataaatctctactgtttgtcagactgcagtgaattctgagattttcttctgttcaatatcttgttgaataaggaaatgtcacaatttaatactgtaatctcttcactcatttttatacactccaaactttaacaacactgtaccagaagattttttaaaaggaaagagaaaagtgcataagttacacatttactgagaaaaatatgactgagatattgtgttacacagaactttatacctagattttattttcttgcaatctccagtttccccacaaaagttctttgttttcctcccacagtaagatatttcccaaaggccttcctgaggagtactcagtagctgccatgtttcgagtacgaagaaacgccaaaaaggaacggtggtttctgtggcaggttttaaaccagcagaatattccacaggtaaagtaccattagagttgtgctcattagttttccttgtgtaattaagccaggtgaattatttgaactggtgcacaaatttgcgagtagatctagtatccaaatgttctatcctttagagggatcatcaacaagaaaatgcaagtattctcgtagttaggatggccttgctgagatccataatatgagagtatagtggtaaacatagtgttagtttttgtttttattttacttctaggtccatattttgtttaaagatgtaaaactgccttctctttacaactgcttcattaactaattctttctaagtaacacattcttcatcttccttctgtcgtctctaatgttatatattatttttaaagcagtttatcatttcattggacaactcttggtgaataaagagttgagacttaaatatttatcccatcaataaaaatttatggaacacatactatatactaggtagtgacaagaaaagagatctgaaaaacagaatttgtattatcagggagcataaggcgtaaggagatgacatctaggagaacaacataatatagcataattatgttgaacaagtgcagtggtagagttaagcttagtgttgggtgtggacaatgggagcaccgaaagggcagctcatcggaattgggggatggagagagcaggaatctaggagagcatatagaagagatggcgtttgggctgcaaagaaggaatgctggcactccagcgaggggagaggaacctcaaaattacttgttggcaccatacattagtttttacttgtgtacatatccgttgaaatgttttaaatcatcactgatcttttaatctgttaatacagctacaattttatgatgagtagatcaaccaagagtatgtcctctataaaatgtgttttctctgtaccttgcaaagtatcaatggtgaaagaattgatcttagcttccctacttagggaaatgatcacattcttagtcttcttaaattggtaaccttaaattcctgtgttactaatacagagcaataatttatatatcttataaaattttatctatagtgtatataaattatgtatatataaacttataaatggtttatataaacatttaaaataactacacacacacacacacacacacacactcttagatgttctcttaggaaggagcatattacattcaccagaatgccccatttctaaaccatttttgtagtggtgtttgctgttcttttattttaacaaacctggtggacacaagtgtcatctaaaatattttactaagtgcctcagttatactaatatgcatcttgagcttttctttgtgtgctttaataattttgaacattgatttttaaaacatttaaagatactttacatttttgcagatttctatagtagttgatggtggaaagaaggtggtggaatttatgtttcaagccacagagggagatgtgttgaactacatttttagaaatcgagaactccgtcctttgtttgatcgtcagtggcacaaacttggcattagtatacaatcccaggtcatttcactttatatggattgtaatttaattgcgaggaggcagactgatgaaaaggacactgtggatttccatggacggacagttattgctacgcgagcttcagatggcaagcctgtggatgtaagttgtgatgttagttgtgaaagagaactaaaatttctaagtaaaaaaaaaatcttattaaaaacattcttcttttattactgtgtaatagattcccttctcatcaattttattaatttaattaatttgccgtcagatgtgtgaagaacagctatgttatttccaattgtattttcacatgtattattttcactccattttatacccattttctccagcctgggaatttaaaataattaggtcatgccttaaaaaattagattattaaaagtaaaaattgaaaatatgatacaaaatataaacttggtctaagttcatatgttttaaatagaaagggctggaaaaagctgaagttcaaattaaatggttccaggttatctgctattttcattcaagaacaatagactattcatccttacaatagcaattactttgtattgcagactattttttataagcgtataatggtttttcagggttctattgtacagaaaaattcactaaatgtattagtaggtcatttgaaagagaaaaattgcctagtaaaacccttttggataaaaagttactttaaatattacatttgaagctaacatgatatagatttattattgatttccctagagaacaaggtctgtaatcttaaaaaagttagatatatctaaatttgatggctgcacgttttcttagtttattatgtataaacagtttatagtttatttcttagagtttttgcaagaatgagatccagtcttggacctcaatctaagaagattgagtgttctatgtcctgtgtctcattaacttctcacccaaggatagaattgatcccgggctaggcgcagtggctcatgcctgtaatcccagcactttgggaggccgaggtgggcagatgacgaggtcaggagatcgagaccatcctggctaacatggtgaaaccctgtctctactaaaaatacaaaaaattagccagatgtggtggcacacgcctgtaatcccagctactcgggaggctgaggcaggagggggaggttacaatgagccaagatcatgccactgcactccagcttgagcgacagagcaagactttgtctcaaaaaacaaaaaacaaacaaacaaacaaaagaattgatcccacaatttgaggctaaagaatatcacgtgaatccttataaaaaggatataggtaaaaaccgtggtattacagtggtttcataatttcatgtggattcttggttcatttgaggataaacttgaaggcatgtcacaatgatgcaatatttttggagatagtcactgtttgagttaaacaaacaaaatacatatttttataaaagattcttggttctactgaaactttgaatggattaatttttcatcatctctgtacaagctctgtgattcataagatctgttatggtgtgaaaatgtgtttatttgggctgtgtgttattgaaaaaaattatcatgatttagttttatttcacctatcccacctgtgtatttttgtgagaaagtgacaaaactgatatgaagatttttttttaaatcaactcagcattttgacaagcatcagtacagatttagccttaagcattctccttctaaagcactatatcagtgaagcattctaaagtaatgaatgaataaacaaagcataaactattctgactgtcatttcaatgtcatggaactcaatcaggttgtaatcctttgaaaattgatcatctatctttagttaagtaaaacaattcataagcaggacctggtacaatggatggtacataataggatttcaatatttattgactattttgataacagtgataataaaaaagtttagttaagaacaatattaattaactagagttctcattcttcattctaaataattcatatgttactgctggtatttcattatactatgtaagacggtgtatttaaattttataaataaaaattaaccttaataaccttgcaaaaagttacagaacataaatcattacatttcatttagtctcatgattttgcattttctgcaaatcttaggctgctcatgaatctgtaagatgtctggagttgttaacgcattctatgaactgcattgattttgttcatctgaggcgaaaagtaaaagttatagatttttcccccctttttgcttttaaagttggagtagagattcacctctaatcacaaatgcctgctttctattattataagattaattattataagattagagttgggtctttctgtataaagtacttattgacctcaaaataatgcattatttaatacatttcagtgcttaaagaattcaaacagcctatttaagaatttattatattgctattttatcaataatcagtactatttactttttcttaggtgttgatttcatcttgcatttaaaggcatgattttactttccttgaactacagttaatttcatgtccaaatgccaaaaaaagagaaatctgctaagcaaatagaaggaatcaattatttttgtaaaaaggttgttagccctgcttagattataccaatataatataaaatcaataggttttaggcagaattcgtgaaatatagataaaaaattttttttccttgttggtaagtgaacacctatttcagtgcctcaaataggagtctggaagtacaaataaagcctttctcatcatgtgctcatatctttgattttaccttttctccaattttttttttattttgaaatggcctcattttgtgggcattctttactgtagtgtaaaacaatagcttttttaaaattaagtacttctattttattgtttgaaacagctagccaaggtttgcaattgctttcattacctgatttcctttatctatagatccatctctatatccaactctatgtctctcaagtagtccacaaaacaatgaatcctacatttaataaaaacattaaaatatccaccagtaatttatttatattagcttcctttttctttctgattaaattactgtagttcttaactgcctgaatgtgattccaaaaaactaaagatgtttcttattactaattttttcatagattgaacttcaccaacttaaaatctactgcagtgcaaacctcatagctcaagaaacatgttgtgaaatatcagatactaaggtaagttaattttctttgcatatgaagaatgaagaacgccaattatcttttagtggcatagtttgtagagtccaaatgtagggtagcactgagtgtgttctgttgaagccaggtgggtaatttattcctagtaaggaagcattcatagtgctttctcatggttactttcaacagttttaatcccagcatttcacccttaattttgagggtaatatatactcactttgaactcagtataacttaaagttatgcctttcttcctaaactatgttctgacagcagcatcatttccagttacagaagttttaaatctgtgatcatactttattctcactcattttccttttctaccctgtcacccatcctggctagctttcctttgacatagacttttcatccttatcttccattttcctgttactgccaaagtgtacatttacctcgtgtctgggatatcaatcattattggatcaactgccttccctatgtcctgcccctttgctttgcagcataaccagaataagtctgagtcactgctttgtatattcattcactctcttccagcaaacactttattcagaaacactgaccttctaaacactgtgctaaggaacagggctaacaaacatgattaaggcacattccctgccctctcttcatgtctttctcttaagtgactcctgttggaagtgaaatataaatgcagtttctcagcctctcattctaaatattcccaacctaaccatacaactgttacttacttataccaatctttcattacaagaaaaatactaaattcaatactttctgtatctctcagtgtaatggccgtgtgtgctatcttatattactaggtgtaactatatttgtttttaaattgatttaagtacaattcagactcagtaagggaagttttaccttgataaacttttttattcctaatgcttcatttggaaaaagtagacaatcattgtttgatttattgacttaccaattactaaaaaagataaatgggacagaaagatattcaaaggggactggttctaaaaaaaagtacagaaagagcatatgaaaagtgcaagtaaaaggtgaaaatgtcttttctttggatcttagatttcataaatgttctatacttgccatagaaaattatatgaaaattttatcaacaatttatgattcaaaaatatttttgacttttgtagctcactttgggtagtgaaataagaatgtgaccaaagcatagcttaaagcatagctttagtgacttaaagcatagctaagtctttcaagtattatatgttttgcttttgtaacttggctttataaagcatatctccaatccacttcatgtatctcattccaagtaaaatgccagccagccaaatatctttctataaatatctgaaaagataatttagaatgccaatctacagacttgaaatacctagacttcctggagctacacatttaaatcttaaagatgttaattcccccaaaattttgtttttaattatgcttttttgatgtcagagtttttaaagtaataactttctctggttgtaaagtaatataatgatattttgatatatctgaatattatataattagccagtaatcactgccctttatcattatattaatgtaatagaaactttccacctgatttatgaggaaattgtttaagaagtataggtgatgaattgggtggaatggttggtaattcaaagcagtgacatgatctcacacattatgaacaaaagatttttaaatcatattttgaaaagattatttgggagttagttttaaagaatagaacacaaggtaggaatttatctctgactatggaaaaaataaggaaagactgtatttttgctgacaattatttggaggggatatcaccattcatttaatgactaacaaaaaatagaaacatactacattttatgaataggaatgtacagttggaaggataaataattatataaaagccatttaaatgcatctgctctacttccaatacgaattgtatttattttcttttttgttgcaaaatgttttgaactcagaaatttttaatgtagttgcttaaatatctaattttgtcctggaatttcaaatcacacatgttttctggttgtcaatattttataaagcatttcaaaggcaacattttttaaagatcacctataaagatgcttctttgtttctattggattttcagtttctaaagtagttaagtttcatgactctagatataaaaagaatgaagaacaaatattaagagaaggatgaaatcagtaacatttgttgaaaataaatgagaaatgtggttaaatttttaagggctaatactgaatatgtgtcaaatcaaaaccagaggttttacgaggagaagagtccttacttgtatgtttggtgttgcctctaggcactttttgtggagtgtggacaggtttatggtgaagcctgagacatacttttaaagttatttaaatcctcaatttaatatagtgactcagttatccagagcagaattgtgaattctaagtgggtcttggttatctgactggaaagccatgaggtaagaactggctgaaacatcatatcaaatcaaatgagatgaatgaactgttttggtaataaccttgttccattcaaatatacaatagtttttagactttcaaatttgggaacttgttaggataaataatcctgaaatctggagagagtagatttgaaagaactagtggtggatacagtaaactagttgctgtatttctgggtgttggttttgttacagtttttattgtaattatcaaagaattcaactactaccaagtttttttttttatttcttatttccaacttttattttaagttcaggggtacatttgcaggatgtgcaggtttgttacataggtaaacgtgtgccatgatggtttcctgcacagatcatcaaaatgaatttttgttacaaaacttatctatgtttactggaaaatatagccaaatccataaaagaaaataaatatcaatcatgatttcaaccacagtagaaaaccacagataatattttagttttgtatcctgaaaatactttaccatgcatttataatttgtggtatacaaagtaatgtattaactctctcctagtgctttctcttcgtgaaattgcaaattcagagtggaaaactatggtgagaagtctggtacatgatgttgagaaaaaacaatgtgtttatcctcctcagattctccatttgggttaattttttaaaaaatgttcgttgctttgtaaccaaattgcacttcactttgtccagcatgctctgaacccactggataagtataaaatgcactacttgtctgttgtagtggagacctttttaatatctttaaggaacagtagactagaacaaagtatactttgatttaataaatgttgtctaagagtgtaaaaagaatttattttctactttatatgctttaataatcatcttgttgaaggaaaccatattttataggttcaaattacatgtttcaactttaatttttgttcccaaaagatgtattcacatgttgtttgtacaaattattttattgcaacaatacaattattataaatgtatgaaatttctgtacttatcaaaaagttacctaatgtaactttgtaattccttaccaagaccattattttaaatatttttcttgcatgttgtcagtataagaaaacccatgggctcaggcggaaagtgcaaaagtgtgataaacattctcacactggtgttaacttttggttagtaagaagcagttcttgcaggcaacctcagcaatccctagtttagtgggagccagtgtttggaacatgagaatgtttggaattgaccccatttcctaaagcctctttttggattttagtgcccagagcaggatggctttggaaatattgcatcatcatgggtaactgctcatgccagtaaaatgtcttcatatctgccagcaaagcaggaacttaaagaccagtgccagtgcattccaaacaaggtatgctagttttaattggtgcacactgaaagccactccagactatgagcccagctccttgaatgtggcctctgttcacagaatgtgtcttgccattcagtgtttgttgaagtaaatacctcagttactggggtgggttaagaaaaaggcattgaagataggacttcctggattcttacctggatagtttcaagcccatctgaacttccttccagggtgtgaactagaatgaatagaaaagtgaagggaggaactacctgtacaacaggcaagtactgagtacttagcatgtgccaggaataggctgaagttctgggaattcacagttgaagaaaacacagtgcctgctcttcaaaaacatacacaaaaatactctacattgtatttctttttctgtatagactgtgtttttccagcatccctaaattttcaactggctgtctccatccaccataagttattaggggaatatacagaggggctctgttgttactcaaataatttgtttcatctgcaccaatatgatcccctggtcaagaaggctgtgccatggacctttatgaacttcctttatggatgttaatggcagtaataaagcctgtgctaaaaggctgagtggtgtcttggtggctttttccagtgcccatacctgaggaaaggagaacttgccccagtttctagagcagagtgtgccctagcactgtgacttaaaacatgtcatcgacttactcatccaccaccacttcaactcctggctgagccagatggggatggggtgaaagtttaagggaaactttcattttttctagtggccaatattgcatagtaagctctacgagaaaggcaaggttcgggggtccatagagaaacagcttgtgttccagctcatggaaggtctggaggagatgatgctaaatggtgtttggaagagtgaggaacagtgaatggaattccattggcatgccctttttcccttgttcacgtggctcactattcctcactctaagcatcagctcagaggagaacaaagcgttatcttgctagtgccagcttcacatttataaaccatttggctttagatcaatgtgacagaatgtttgctaacacagatatgcatttttgctcagggagaagcaggattaccaggagctccgggttcacctgggcagaaagggcataaaggagagccggtaagaaaaaaacaaatactgatggagaaaacagggttttgttaaaaaatgacttaaaaatgtgttcatctcatttttctttattctgtacaaatatatgtttctataaaaggctatcaaagactatattaaaatgctgattactgaaatagagactatcagcattctagtcagcttttgaattcatattggtaggctggtgtgaactttggaaagatctggaactgcaagtctttgtacctataagctctagcaaaactgtgaagcagaaaagtctattttctagctgtgccctagccttctttagcattcccttccccaaatccctgttgaattcttgcttctcttgtcttttgatacatccccaccagagatttttctgtagctctctaccttttttttttaaacggccaactttttttgaatactttctgtgtatgaggtatgttgcttggtgttgtagagcacataaagacaaataggatatattccctgttctcaatgattttacatctagaaagagatcgtggaaaattacaaggccatatgtgttaggtgctgtaggagagttgcaagtgtcctggagaaatgatctggggagctagggaggatttaatggaggaatggccagtggactggacctctaagtgtgtaattctaggctatatcccatgcttagagatttgtctttcccttctcccatgactcaaaacttaactgtaatgtttctgactcttttgagtatatcttttgtcagctaatcaggtaaatgaatgagcactgttagaagttgattctgtttttattatctctccaaggtaaaatagattttaattcctttcctgccttaacttgggaagtccatgattctaaattatttgtataatctattgctccccccgctttaaaaagacaggagacggaagtctgagaaatgactgatccctcaaagcttcaacaaagctaaagtcatttgattcctgaaggaatgtattcccatgtaccttgcatgggaacttctgacaactcagcaggtgtttgaaaaagatttttgaggagggacaggccatttattattgctctttaaaatgcattgcttggggtacctttactttcaatatcattttatgaaaattcaaaataattgaacaatatctgattctaaagaccacttcaatcaaactaaacatacaaatcattataccaatagcaagtatttgtttcatggttacatgtaccagacactgagaagaatgttttagatatgttatcatacttgatccttacactcactcttcatgttagggattagtattagcattttacagatggaaaaactgaagcttaggggggttaaattattgcccagtgccacatagcttgtggccaaactgggatctgaaaccagtaggtctgttgactactcatgaccagtatccatttttaaggctgccactatgttctaaaagcaattcagtattatgtatctgtgttctttgatcaggtacttccacttgcgatattttactcttaaaacatcatttaaagatgccagcctagtgtctctatcctcattttacagctgagagccacacataggtaaattgatgtgcccaaggtaacacaattaagaggactcagaaagtggaaagatctctgagttaatcccaactcttctctggttagagggtgaatttggccaagccactcagactctccatacataagttttcttatctgcaacggaaggtgttctcacttatctgttatacctatactataaagtgacaccaaaatgccttgaaaaaaatgcatgtggcttaatttttggtgactgtgatttatacacgttcacatacacatttcttaacttgtcttttcacttctttgatttatcagttccttcatatttaagattgctggcacaggaagaaatttcatgtgttgcttttaggaaaaataccctgcccactgaaaaaaaaaaatctatgtcataagtacagtcctatttgaataattattttaaaaatcgttaaatctactttaaattcttttttaaagattaagtgcttagtcactgttgttagagcctataccttttaaggatgcattttccccctcgattccctttaatcataaatagacatctctcactttaacatttaaatatttatttttctttattcattcatccatcaacacctatttattgagctcctgctattataataaaaaatgtgccagactttggagccttagcagtaataataaaatacagggcctgctctcaccgagtttacaatcttgtgacagtttgttcacagaacattctctccttctatagaaactaaaaccagtagaaaagaactaggaaaaattaataaaaatggataaatattagccaatttattgtatgtcaaatctataaaatatacaaaaatgtatcttagagtaacaatgcattatatgacttctcatctgcagtatgttttaagaatattaacatttgttttaaattccatgataattcataatggcaagagattttagtggcaacgtaaaaacagctgcaataaaggaaatttataatctacacaacgaataactaatctgtgtatttcccttatcttttcaatacatgcacccacatttgcttaaaccaacatatgctctgccttgtaaaaatgacattagatgaccatgaccatgaatgcattcaaccttcctggcacttgaaataaacatggatgtattgtttcattttaaggaatggagggtgggtttatttctgctcctattgcactatgtgatcttgcaactttaatgtgcaataaataaagaaggctttccttcatttttgattctggcatgtaattgtcattattagagcaggtgcacaaaataatgcctacataacttgaagatcgaaagtcatttttgctctaaggcatattcagtagtaaattttgtgaaatgatcagaagtgcaatgttactaagggaatcagatgttgttctaaaggttttctttttgatctgtaagcccaagaaggaatatttagaggaggtagaacagtatgttggaaagagtaccactttggagcctgaaccacttaggattgaatcctctccacctcttacttgctttgaaaattatccttaataatacctagccagtggttgattgtgaagaaggaatacaatacaatatatacacagcacttagaaactggcatattatagatattcaacaaatatatgtttcccctgctttcttatccaccatataattgtccatatattgaaggagaggtggagataactattttaggttgagtttaatttcatttgtggcttgatgaagaacaaaggaatcttcatttgtgagatactgccttagaattttcaatttattagatgtaaaaatgttgagttatcatcacatgctacttgtggtaaatagtaataattgatcaatagttgatttcttcaaaagattactcaataagttgactatttcattcaactctgtatcttttatttccaatattatctgtatctgaccttctctggatacaatgtgctagttgctttttttttttttttttagacagagacttgctctgtcacccaggctggagtgcaatggtgcaatccctgttccctgcaacatccgcctcccgggttcaagcgattctcctgcctcagcctcctgagtagttgagattacaggcacccgccatcatgcctggctaatttttgtattttttggtagagatggggtttcaccatgttgaccaggctggtctcgaactcctgacctcaggtcatccacccacctcagcctcccaaagggctaggattacaggtgtgagccactgctctcagcacaatgtgctagtttttcaaatatgttccttgcattgttttacttagataatgtcgattagaagccatccagacacaattataacttactttttctcattaactgtataatattagtcttttggtgcattttacttttggcccaatgtaataaagtgagaaaagatttgagaatacaacttccacatctctttcaaattatatgtcactacattacagtatttctaaaggtgttaagatttttattaatatgttaattgacataacaattatacgtatttatggagtaaagtgtgatattttcattcatttatacaatctgtactaatcaaattgggataattaacatgtccatcacctcaaatattcattatttctttgtattgggaacattcaagattttctcttttagctatttgaaaatattcaataaattattgttaaccatagtcaccctacagtgctattgaacagaagagcttatttattctttatagctgtaattttgtatctgttaaccaacttctccctatccccactcccacccttcccagccccagtaaccattattctactctctacttctatgagattaactttttaaacttctacatataaaggagaacatgcagtatttatccttctgtgcctggcttatttcacttacaacaatgtcattctgactcatccatgttgctgcaaatgatgggattttactcttttttatggcttaatgtcattccattgtgtgtatgtgtgtgtgtgtgtgtgtgtgtgtgtgtgtgataaaacattttctttatccatttattaattgatagacacccattttgattccatgtattagcgattgtgagtagtgctgtaataaacacaggctttcagttatcttttcaccatacttatttcctttcctttggatacatatccccagtgggatttctggatcacatggtagttccatttttagttttttgaggcatttccatactgttctccataatagctatactaatttacattcccactaaaagggtgcaaaagttcccctttctccacaactttggtagcattttttttggtcatttagataatagccattctaaactagggtaagatgatatctcattttgattccaatttgctcctccctcatgattaatgttgagcattttttgatgtatttcttggccatttgtatgtcttcttttgagaagtgtctattcagatcattcacccattttaaaatcagattattggggtttttgtttgtttgttgctgttgagttgcttgagctccttgtatattgtggatattaatcccttgtcagatgaataccttgcaaacgtttactcccattctgcaggttgtctcttcattctcttgatggtttcctttgctgtacaaaagctttttattgcaatatggtcccatttgtctatttttgctttggttgcctgtgctcttgaggttgtagccacaaaatctttgcctagactaatgtaccaaagcattttccatacattttcccccagaagattcatagttttgggctctacatttaagttttcaatccattttgggttgatttttgcatatggtgagagataaggatctagtttattcttttgaatatagtttttccaacactgtttaacaaaaagactgtcctttcctcaatgcacgttcctggcacctctgtcaaaaatcagttggttgtaaatacatggatttatttatgggttctctagtgtgttccattggtctgtgtgactgttgatgacaatctaaggtgttatgctttgagcatccttactttaatgcagcaaattcatagagaaaaatgttactcttatttatacacatacattatgagttagacaattattccgaatagtcatgtaagcaaatcctgtcccacctgagccaaaacccactaatgacttcttgtctctcttaaggtaaaccccaaagctctaaccatgggctatgaggcttcacataatgtgtagagctctcccctacctgactcctcaatcccagattgtctcgtaccctcttcccttgttcacttttgctccaagtcctttgtaccagttatgtatgcctgaagtgtccttgtccacatccacttggctcgctctcttcttcacatcatttaggcccttgctcaaaaataactttaaaataaaaaggccttctggcatctctatataaaaagcatccttactcccacctctatcctcttactttgcttagcacttttactgccacctgacacattgtcatcacgcatctatttctttccctgttggaaaatgagttctgtgagcctatacatagaacaacacataaataataggagctaaaaatatgctgaatgcatgaatgaacactatacctcaaggaaagtttaaataatcaactcagctatttctagaaactgtaagttctccttcctaattgcccaggagactctgctgagcaaggcaaagattcaatttgcaaggaaagaattaaataatattatattgttaactattgttctactacagttttttcttttaaaaaacaaaaattcttttcacattgatttaatcaggtttagcttagtattgtctaggtaatgaagcatcaaaaatattttgcaaaaagccagaagttttggcaaaacttaatatgtatttttatttgcctattttcttatctactatgatggtttattaatatgatttactactttttctttttttataaaggtgatggtcacctctcatggaataatgcagttttaagtactactgcttgtatttaattatctagttgtgatcagcattctatatcagaacacctaatcaagcgattttaaccatgctctttaacactaaactctgtataacattatttgaagtaataattaatacttttctttcatttagactcaattgtaataattttctgaattttttaattcccttttgttagcaaatgtagttagcaacctaattccttagcaactgcattactttctcagttctttaagacccttgttaataccctcacccatttcagagctgaaattctctcagagttttataaaatattagctcaattttaatgttcttgaacctgaggggaagtgttatctgagctccattttgggaataattttccagtttatttttctattattatcttccatatctccagttaatttgccaaaatgtgttgactttatgaaatgattgctttgctgatatgctttgacagaaaatcaaaactgtttaaaatggaataagttagcttatttgacttcttagtcagaaactggtattgatttatttcaacttctcctgccctccaatcccactatagaggttttcattttgagtagtctaatatgctaacccagagatgatgagtaagtttcccctcattttctttccaatctgacattactcatatgcccattctgtaaccataccacaacaataaaaattaattaaaccaaaatacgttcataatttttaaaaataaggataccttctcttagtaataactttacagaagtaggatttaatattattcttttgacttcttttaatatgtcaatataagaaataataatgtttctttatcctttctaatcccatattgaatatattgaagtaattgacaagtcctttttttggatcagttttacccaatttgatataatctcatgtaatctacaggaattcacttgaaggtgaaatttacttgtgggtcttcatctgaaattaacagatagtatcattataataatggtattacatattcataaaattacaatatatttcttaatttctaccaagtgttagtgacagagaaactcattcaaaaagtgtatattattttccactgtttcgaggataaatttattagactgaatttgtgatagtgcttttaaggaagccatagatgatccatagacttccttgcacctgtttttccatccctgcttggcagttagacagaagagcaaggaagctgatcattggattgacccagctttggggtttttcctggaggatgtaaaggaaagtcaggcatactaaatgaaacaaataggaatatcttagaatctgaaatttcctgacctacttgaattgaaagcatcggataggatgtagcttttaactcatttaaactcatttatcatattaattgaagtaacagcaatagtattattccttacatttggtaaatgtacttttggtaaatattaaatcctacttctgtgaggttattactaagagaatgtatccttatttttaaaaattatgaacatattttggtttaactaatttttattgttgtggtatggctacagaatgggcatatgagtaatgtcagattggaaagaaaatgaggggaaacttacccatcatatctggattagcatattagactactcaaaatttggtaaattacaaagctgaattacatatttctgtgtgaatatgtctagttttagttatgattagcacttagatatttacgaattactgattttttacaatttattattttggcttgtgggcaatatgaggaaggaacttgaagcacaaactttggtgcaagcaaaagcaactcatctaggaagaggtagattcactttgacaacattagtaattaacgcaccccttaaaagtaatctcctaataagcatttctgtattttagggtgcagttggtaataaaggtgaatttggtgctcctggaattcctggggaaaagatatgatggtttactctttgatcaaaatttatggttattttataaagctgtatcagataggataggaaaatatacagaacaagtcctatagtttagaggtaatcaaactgtggccctatagtagggctgccagaaactctcactgtaggattttgtacataaagttttactggaacacagccacactcatttgtttttgtattacctaaggctgcctttgtgcttcatggccaagttaagtaattgtggcagagactgtatggcccacaaaatctaaaatatttactctctggccctttgttgaaaaagcttgctgatccctgctccggaacattggctgctattcttttagccccagggcttctcaaattcaccattttatatataatatggtgtcttaatatgtatttcactgcagacaaaaattaggcagtttatgtaaacattttataatatagactataagacatactataattaaaaatataagaaatatatttcagtgtatcaataaaatgctatactgtaggctatagctcataaaatgattgatttttatgtttttcctgtaataccacaaagatgattccaaacaataaattcactcacgagaagttactgttgcagtttagcatcttattcaacttcagtttttgtagaatatttaaaaaattgttgtatttgtatattaaactgcaatcaccttgtcgtatttttccctatatatgcctatattaatattaataactttgctaaatttttaaagttctcatatgttgatgctaagaaaattctcttctttatgaaaatatgcttagtataagtttttgtggcattctagctgcactgattatcaagtgagtccattgtgtcattatctagaaggccatgaccattgtggttttattcacctaaagttagcacagcaataactgaagctgaagcagtaggaggttcagaggttttcagacagatattttttcagaccttcataaatgtgtctctggtatctgatggcttcattgatgctactttttcctttcataaattattcagtctgatatgcaaattctttactcctataggaatgtaactgttaaactcagtaaagtccaacaaactctattgaaaaacaataccttgctgcaagttgatgtttatttgggctgctatcttcttgtataagcttactgatgacattaattgacgattcttcatcataaataaaagcttctttaaatacttgttcaaagttctaattctttaaaaatatcttttctctagagaatattacttgatcacctaaagagatgccccaatctaaatttaccttgtacccttattctaccaatctttttctaaaatgcatcacaataatctgattgtttagatttcagatcattaggagtttttgaattattctgaacatgggaatcttttttaaaacatttgcagaatcaccgaagcgcttgagctataaaatagattgtttgactttattgtgggatgtaacgtgagacttacgtacatttacacaataaattatggcatagcaggatagaattccctttgaatgctttaaaacagaatttatcaaggttggtataaaatagcattaattttaacactccaaaatgacagcccttggatccttatgtatgacaaccaggtgcaaactgctacttattggttgtggaacaggttctcaactcctgaaaaggtgatgtccacagactgacaatataaggactagatgaagcattcagtagaatcaatcctgtcaaaagctgatcaaatgaattgccatccagggccatgatagtaagaaaacaagtctagaaagttaagtatgcaagccaagaaattctctagaagaagagagagtttcttagaaaagagagggcatttagggcaacgtgaaggaactggagcaagtcagtatttcagagacaggcactactcagaactaaaaattttgtttcttttcccagaagtccacttttgtagaaagaatcttgtgtggtgattcatcctatatttcacttaaagtaaaacttcagtgaatataaaggaaaatactgataatctagttagatgaagtcattctgaaaaccaaaatcctcagcccttggtgcccatttggtcaaaatggtgactgagagagtcttgcaaaatcagttaatgagtgtgtctgtgtgaagacactgttcccagagaacttaagaagctaatatcataaagaagcagctgtttttatggtgttctaaaaccatggcaaaattgtcctggcaaatactctttcatgtttcctcaagcagttttcttctgggtctaatttacttgagttactcttaaagggtctcacagacagttagagaattcatgtaacttccagtggtgctaaatatggtaacagattacgtttaactcttggttcccggattcacacatcatcagagaccgtacttagtggttaatatccttccaatacctatagaagcactgagtctttgaccactttctcttcccaaggactcagtccctggtggtgccagctatgattctaacttgtcacttcatttagctgttaaaggggtgtgacactcttgagtgaaaaaatgccgcctcaatagtgttttctcgcttctataatccacaggttaccacttattgaaaataattctaaagaatgtatacaaaatgaaaacaagaaagttactagcgtattatctaacagtaggttaataaattgtaaaattttttttaaatttcaaaattttaaaatcatcctcatgaggtttatgtttggggtgaaatatttctgttattttacaagaaaaatggtttgttagatttttctaagtaaatttccagagaaaaattatcagttcttaacatgtgtgtcacctcagggctttgtatcccacatttgcttcaacgtgaaatatgtgcatcttccagagtaacttatccagcatccccttaactttgactctgcttgtcagcagttataattctttgttttgttttgctttgctttacatagaatcaggagtacttaagagtactgttaaaaaataaataactaggttgaattgtttaactgtttcacttggagcaaaaacatatgtacaataccatagaatatgtatctcaggtctaatattctcaaagtgaagatttttttctaaagttaacatttaagctaggaaactgatttatattaatggagtgaagcatattctgagcagtatgaagtattaatttgtacattaactatactttacacttacatcaatgtcatacttcaataaattaagtgatttgcatataaatcacattattctaaaataaacctacactttgaaatttagctaggtaatagcagtaaattcttttaagtcaagactctgaacaatgtattaatatactgtggtggcatttttcctctgacaccaaggataaaaatagtacactaaacaacacaattttataaaatgtatttatggaatgtggagtcatgaggactctaataaggatgaagtatagcatttagttatgttcttttgtaattgtaatacttatcacccagtacagacttgcagtagacattcttaatctaatattagttctaatctaataaagccttactgttaaacattgcataaaaataactgtcccctttacatttattcagaacagctatgattttgcctaagagattcggtaagtgttctgttatgagttcatttaagaaaatcagttctgtgtagcagtattattaggtagctggcgacttctggtaagcttggatggacagaaggctctgtcaatcaaaataagtaaactggatggttccatttccaagagaagtgaatgactcaaagcatgagatcacatgaatgcagccacacacacacacacacacacacacacacacacacacacacatgttcacaccttgcatcctcatggtatgaagtaggaaaatgagatgaggatttggacactatgagcaaattttgcccactttgcccccaaatataacactcaaatcatgtttgttttcattacctgaatacttcaaacaaaaaagtgcctcatttcatacttcacttatgtatttaaacataaaagatatatttctctagaagtggggatttttttctaagtaggaataattattgtccaataatcttatcctaataatgtgatagtaaaaattgaacaaatatagagcctaatttatgctaaaacccatattctatctactaaattactttaaatttgccctaaaatgtttattttaataggaaaacttttactaagttaattttgctccccatggagtaagtatgaagtaaatcatagccatcattactttactatgctaatattaaatactcagagttagactgcctgggtttgaattccagctcaaaatcttactctctaatttagagcatgacacttggtctctctaaatgtcagttttctcttttataaaacaggaattatattgcatctacttctagctttatcttaaggattaaataagattattcataaaagtgtcagcacctggtatgtaaatatttggtaaacaacagatataattttaacaataaacagtttgatgattctattattctagccttactgtgggaccagattagaacttatttgaaggaatgtatacacttcatcttagccaaaaggccaagaagcaaacacttgggggaatttatattagttattgaaaatatatttacaggaaaatgttaaagtcacatatcttatgtaaccttgacctcttaaaacaaactagatgtcagaaaaccagtgaattcctcacttattataaatatgtacaagaatataaacttttacaataataataataacagccatttactcaaaaagtgttatatgctaaatgctatcaggagccttcttcacattatttcattcactccttacaacacccctgtgaggtaagatttattgtcactatttcacagattaggaaacagatctagagagagagagggaaaaaaaattaaaaacttcccctaacttggtacggagaaaatagtagagtcaggatttgaacctctatccatggaaatccatagctcttgcccctttgccatattacctcatctggacagctcctcaaatattcagatttcatttacacaggcaggtctgaattagatcttaaatttgtttgcctgccagtttagtgagtgaactgcagtttgcttcggacatcctgctccaaggagggctgtgtcccttccctttaaatccaaggaccccttttaaactgtatctgaccctagggattctgactcccccaccttcataagattgtgttcacctattaagaatcattatgcatatggtttttcaccaaatgagagggttttgtctagctttaccttccaaaataagtatcatggaaaaaaatttgcttggtttccaagtacaggttacatttgaagtgtgttttcaaacattccgcgcttgactctctggagattcttaatctaccctgcatgcccacgtccaggcagctcaatcatgggcactctccagattaaccttaatgcaacacctaatgtagaaatttttctcttacattctccaccaaataaatatatataatttatttatcaaaaacaaaattgtttaacttagtaccatggctttataaaaatataaaataaatcaaccttctggaagtaaaaaaagctgtatatattaaagcacttaagaagtacatctgataacatgatgagagagtggccaagctgcatgtcttaaaaatagctggactaactatcatcattatatgaggatatgctttgtatgatgggtcttttcaccataaactctgaagccctcagcactgcagtgagatgagactgaatgaggcagatccattgttccctaacagtctttgtatttcttttctgctggaaaatgaaatgactatgatctttgaatcttgattttccctaaaaagacattttatgagaagactgcagcttcagaaaataaaggcagatgctgttacagtttatgtaagtgcagacaaggccaatcactgttgtgaattataatgaactttctaacagtgctggtccagatgtagcattaatgcttcagagactcagaaacttataggcaagtagtataaaagctagagaattttaagccatttggcttcctctctatatttctagcctcacctaatttttctgtgcttaattttagacttcctaagtttaaaacataatttaaaatgcctaatgcatgtgacaatttattatagaaattgaggccattaaatgaggaggaaaaaaaaagacaacttagctttattctatcaatggaatacttcctgcctatgaaattgttaggctttataaaacaagaatgttttccactttagagaaaaatacctcttaagcagagaatcacctgtatatctgtgtaatttagaaaattctctaatgagtgaaggtatagtcaaatctacacacaggattgaatttttaatcataattagtattcatagaaaaaaatgaccacaaagaaaacagttttgtaagcctacttgttggctttacttgttaaaggtaggagaataaaacttgaattatcagtgaaaaactattgctcttacatggaataactgtcatttaattgtcttatctatagacatatattgatacaatatagcactaaaataagcagaaacataagaaggacaaagtaatagaaggacaggaaaaagaaaaagaaacttgctcactctgcagctgattttatttcttaatggtttcttattcccttctaatgccttccactcacaccccaagtagagcagttggcagggaacacaacagatggatgacaagctcaccacatgccatgtatctggcacccaggcacttgacttttatttgctaaacagtcagatttcaagaacctagtctgctaatgttcctgtttggtttaatgtactaccagcttctagcacgtaaatattaaaatattgccataagaaagctcacacactctgtgtttctctgcatagttaagtggctaattattttattcttggtgtagatactgaacagtggatttaaacatataactggtattttataaagacatctatgattttagatattagagtttccttaaagtggctctatctaaaggagcttttagccagacacatcagggactgccaaagccggtgtaaggtattgaatgaacctgttagggaagactagaagatttgagcagatgatcacagatgattggtatctttcttttctatctccatcactgcattttcagattattaaactcaaaacacatgcatttttttcatgaattctcccaggccaccaggcaaaattacagcttatccactcagctcacatagcactttatttatatcaccaatgtagagtgtgtctatacaccctgctaaaatgtgagctcctggagtagaaggacttggggtctgtctcatctctaatcccagcaactgacccagcgtatggtacctggctggttctggataagtgtttgttgagttgttcagaattcgaggacttagccccaagccagaaatagagaagagaaatagagaatgactgttagaaaacttcgctgaggaaagatcggaaaagcaccccaatgccagcaacacttcagtgaaagtccttcgtactttctacagaagcataatttagggaaacaagggaatctcttctttgcacaacaaagtttacaggtattgcttcctagaattaaatataatagaagtgtgtgcatctccagaatttgctttccattttctcttggagaaagtatgctcttccctctctctcaaacacaaatattcaagttatattgctttctttttatccaaactagatttgaaaatctcctaactttcttacaacattgttagggtgtgttccttctccatatcttcataaccatttacttcagggctaaagataagtaaccaatggcttcagtacatttaaggtccagtagaagtaattgatatggaatagaactataaattactcatcacgaggaatactccaggcaggaaatagttttcagttactgctatatcattgtcctcaattaggagctgactgatgacactgtccttctctttatatcttaaatcatctttcacttgttagaattctgtattcagatgtcaatcactatacttcagatatttcagtagatgattcacattaaataagtatttctgtagtatttttatgaagttttaagtttggtttaaagactctcttacagttagtctcataataaagtgaaaagcccaaacatttgtgcctgacactttcaggaaatcatcacagttacataggagcccagattttgtagtgggttctacaacattgactaaggcttaattctctagctttgctatgtgtaggaagaaacttttacctctccaagacatttcaaaattacttgggttttctttttgtttttttatttgaataactcttagtacaacttgtatttaattaatttgaaaaaggattgtaaaataacatccctttgacaggaaaacttaaggattgtagttgactacaaatgtagcatatgtaaacaatttagttttaaaaagaagcacgttgtattaatagaagtacaaaactgtatagtagccacagcaaagtgtgtgtgtgtgtgtgtgtgtgtgtgtgtgtgtgtgtaagagagagaaagagagagagagagatggtcctgttctgtattctatgtgagtaagaccatttctggaatgatgtgctgagttctgagagccacattttaaaagacatgactgacccgtgtgtgcccagagaacagggaccatagtattaagagactccaaactatcatttgaaaaatgagtggtttactgaatagaaggcttgatagtggcacaaagggatgtcatgtataagacctataactttttttctgtgtaattgcagacagaagaaataagactgatgggcaaaatatggggaaggttaatttgggttcagaaagcatttattcagtaaccacacagtgaattttttttctttgctctccacaatgcaaattaagcagcaaaagtatttgactttaagaagctttcaatagagttggtgcctcatcagattctttggtggagttgttatacataaatgcatgaatttatatttgtccttaaatttaagaatgcccatcctgcttgttttctaggcacatgcacctgtatatacatacatacacacatatacatatacactcaggataatagattttaagagagtagatgttgttagctaccactaaccacccatacatacattaccatgatcaagacatgtattgacccataagaataaataataataggatctaattcatttaagattaaagtttcaaattggccttatcctgagcattaatgtgattaaaatatccctatgcattagccgcattaaggatccaaaaaatataaagaattcaaaaagtttgagattttaaattctttgctatatatatatttttaacttggtaatttatttcttagaatgaagtcccaaaatatagaaggaaaaaattctccccttgaaataaaagcattcagattggatatctgaaaaaaatttaaaaatataggtttttaaaaatttcctgaaacgtttaatggactgccaacagtttaagaaccataaaatatttcaatttctaaagattatggctgaataaagcaggactatagtcagtaatgtagaggtcaccttagtaatacacaaaatcaaaatcagatttacttttttctgcctattttattggttttagtcctagaatcctggcattccacttctgatatttcttctagttatttcatgcaatattcaacttaagtaaattttcttttaataaatatgaactaatgaatggggaagtatgatatatttcaagtggacactaaatttatatagaaggttatactcctagaaaaatatgctctaagtaaaatgataggtcaattttttcagtacagaaatgttataataggatctcggacattttaatcaaaggctgaatgtctaactgttaaaaaaaatcaccacaggatagtatgtaactttctactttctggatcaaatgctggttatttgcaatttttttgtttccctgcttgctttatctttatttgcttggtctcatttatactgggtttgcaaactatagccctagggaatgtgattttttttatcaaatgtccttcagacaatatatgtttcctgcacaataagaaatacattacttccaatgtcaaaagaatcaagaaaactaataatttatagtttatgaccagctatgcttactgttgaaaaatatgcagtgattacaaggacgtaaaattaaatccagtgatcagtttttcagaaagcaaccagctgaccctaaacatcacctaactttgtcccaaaaacttctcaaagaggttattttgaattttggaaagggtactttttgattgtcctgtgaagttaaagacatgctatgtgttatagtaataacccaggcaacgatactatcggcagcaacattagattttgcctgctttatattacacatatttattaacttatcttcctgtagtttgaatttgtacctgaaaaggaatacaagtcctttcatagaaaaccccgtaatgaaaaaaaaaccctcagaaataagttttgaaagttatggtttctatgggaatcatttattgtgattttctttcaataatgaactaaagtattgattggaagccaaagaagaagcatcttatttcttcttggactgaaattttgaggaaggagaggcagcaggagttcagaaaagaaaactaatgtgtaccttccagtaattttaggaggatatttattttatgaatagaattaaatttgccctcaaagtgcttgtggcacctagaactataaacctgggtgtcagagggagcataaagaaagacttcttctgttgacataaggtaggttttagataaacacatttcctatgagataatcagtgatgtccactgagttatcgttgagtctagaattatgtttataaaacacattcagtcaagaaagagcagagaccatttaatgctggccacaggaaaacacagtgttttaattacaacaatcataaaacctgtgtccattaaagacatattctcaatatcacagctctagagagttttggtacccaattaacagtgcatctgggtgtaatcctaacctgacatatggcaggctaggactttgggtgccagtacccagagcacctggtgcatgagtgggctgtgagcaaagaaaaaggggagatactatcacaaccttttttcccaaaaaagtatttttggcagtgtataccgtattggcgtactttaatggataatatgccatatctcatgatcgtatgtaactagtaatatgatataaaacattatactggatcaactgatgaaaataatctgctccttatggacaagtggacatacttctgtgatgagtaacaggagctccatttccatagactgtttcctggcaccaaatacttaatgtgttttcactatcactttatcaaatgatattggaagtttctaatagatttgtgtgatgcctgaggtctaaaactataacaatttgtttaatgatagaaatgtatttattatatagataagtagattatattttgttgattctgtaacatttaattacatttagcagcaaagttttactttagtgtttagtatatactgtgatgatagctgttttaccgtagaatactttgataatttaatctaatctaagaaaaacctcaatctttaaaataatatgtgtgcatgtatgtagcagacatctctggtaagaaccactaaaactgtccttaaaatgttttaattaatgaaataatgaaaaatttccttagatttagacagaatattgctattttaaagtttaaagatgtgacttttttcttcatagattttgaattttgcttaaataattcaaataaatgatagctaattgctttctagggaatgtttaaaaactgttatcttataaattaattgtaaatatttgatagaaataaagcagttccatgaaattgttagcgtattttgagctgtctaaacctggaaactcagaagccaaagtaaattcctataagcaggaaaattcctaaaactctattgagaatatgcacatcctctcaagagtatctcattctagcctgtgtgctgtttacaaaccagacttgtcaaagagatgaccccagaattccagcaatggaaactaaaagccatctgtctttttacccaagacagaaaccagatgaacaggaagaactaaaaagtcttccaagtaattgctttatattaaatggcattgggtatgtattcaaaattgatctaatggcaatcaccagatatgggtaataaagtaaacatgcttgtacatatataagaatacacacacacacacacatatatataatatatatagtgagaaaaaattccgattttaggcaagaagtcacttaaagccagaattaaatctttttccaaagacagtgtaggaaggcagctaggtatgcagagttgaagtgtttgggctcaaattccaagtctaccacctattactgtgcaatgacctgtaagaagttcattgaggcagtattatctgcctgatagttttgttgtcaaaacagcagtgcctggcccatagaaagcacgatgtcagacttcaatattattcccagaagtttcaaagagagaaaatgaaatgagatactaaataacatgtggaaaaacataggctgtaggagacctcagtcccaatcaggtaagttactagttaggtgacctttgacatgttaccaaacctctcggagcctccatttccctattttaaaaattgaggtgacagtcctggatttgagaaataaggaacagatggaaagtccctatgcatgatagatattcagtattaggctacctttccccacaacactagagctatttgttaaagaccacaaaaacgtctatgttcatatatctttatggatcataaacattattctgtgtacttcttttagggtgaaaatggtttacatggtgctccaggattccctggtcaaaaggtaaagagttcttgaatgtttcatctgagttaagaattttaacgtgttaaaaataaatttgcacataatattctgaaattgtatttgattaagctgaattcactcaaagacttttagaaagctatggatgtcttttcaaagagaacttgtggaagcaatcccctcttgaagggaccattctaggaggaagctttatcacagagctttagtaacatgctcctccaaagaactaaatggtagtagtgctttctggggtccgtgatagctgctctggaaacgtttctgcttttattagtcagagtctaaaatgtaaaatagaacaaactgtactccctttgactagttttgttacctcttgcttatcttcttttttgtatatcccagatagagctaaacataatagttagaatgacataaaatattatatattacaaagatgctgtagacaactacctcttcaaaaatatttttctttcagaacaagggattcctaataagcaaggagttttgcatgggccaggctgcctcttcctgtgcctagtatctttctctttaacaagatgaacttcctttgtgcccccacttttttttttttttttttttttttgagacggagtctcgctctgtctcccaggctggagtgcagtggcgcgatcttggctcactgcaagctctgcctccgttcacgccattctcctgcctcagcctcccgaggagctgggactacaggtgcccgccaccacagccggctaatttttttttgtatttttttagtagagatggggtttcaccatgttagccaggatggtctcgatctcctgacctcgtgatccacccgcctcggcctcccaaagtgctgggattacaggcgtgagccaccacacccggccagggctgctttcttcttctgggaagaagcatggttatctgtgacaagcattactaaaaacacagagaccattatattccagtttcttggagggacggggagccacttcaggtggggccagctgtcatgataccatccagataatcccgccgcaggagagagcattattgatgtaatattagatgcccaccaaagccaagcatatcatttctgtgctctggagatgttttactggttttggcaacaacatgtcagaagttactatgcatgtaggtttttctctatagctgaaaatatcttttaaaaagatatgcacttatttatagttacagattgtgttaaagaatttatttacttggcccaataaagataataagattgaactggcagcaatgaaacggcaagcttctgaatttcttcacagcagctctagacaaaacccattaatacagcatgtactgcatctgcgagtcaagttgcaagccaagggatgtgcagatttatctgctgggaaatagttttggactttccagcagctgtttgtggtggctgcatcatgctgacattgtggctgatgtactggaggcgtttagcagcttcaatgtcagcttgaattaacagatcaagttaaagtctatattttaggaaaaatggtagaaaaaaatatagaccatgcattcagtggtgaaaaacaatacctaacaactgacatatattctttcctggtaacttttagagggtagatgaagcaaaaataattatttaattacatgcatgtaacacacacacatatattatttaatcatctaattatattatctaattatgtatactatttaattatataatcataaacatatatgcaattatgtgggtatatatatataaaaaacatactcacaaactaaatatgtatgtatacatgcatgcatgtttctatatagttaaaagctggcattccctttcatataattagtataaattttatgtaccaagggtcaccttgttgaggcattacagaaaaaattctagagatcagaaaccctctatctcctgtctctgtgcactcaggaaatgcttgctgaatgcttcttatgctccaggccctccatgggtggagagatgcacatgacctgttcccaacattcacttgctagctatgttgtcatgagtgcctgacatgtaggaggcactcagtcaacttttgttgagtgtatgaatgaaacaccagttaaggggggagataagcttgtcagatcagagagggtgtagatgaagaaagggagatgtacaccttttagtataatcatggtgattgagagccagcagccctccaaccaccaatcttctttctgtgactgagccagcatagtggacaagaagaagcatagcactggtgtcgaaggtagagccagaacccaagggttcaaacctgaactcattcatcataagacacttaccagaatggtatgccatagaagtcagctttctaagaaggctgtttccactgaatctagtaaaataaatagtaattataagaagaatggctaacttagtctttgccatgaactatgaggatgaatcaaactctcaaaacaaaccattgaggaagatagtattatcatacttattttatacctgagaaaattcaggcttatcaagattaaattgccttggaagtggtgaagctgtaacttataccctagaaaattgttcctttagtatttagaaatatttaaatcttatgtaacaatattggtttagagcttacatgttagaaatggttatttacaattactgatttttcattgtttgaaacataatttttattgtaaaaattgcatgtgttataagtatcatttttattactatacacatcatattcctcttctacagggagagcaaggttttgaaggcagcaaaggagaaactggtgaaaaggtaaatatctctttttacattcacatctgtaaaaagaaattgttcttgaaaatgttttgaaataaaatatttaacttgttttgtgcattccctataagcaattcaataattttatagacataactaaaacatttgcttccattgaggtagaataaatatattaatgattgccagaaatctttcaaaacttatttggatggtattaatagttagatatttctagttaaatttgtttcattgacatggaaatgatttaaacatttataaagcattatatttttatattatgaaatcattcactcactaagtatccaattatttaaataaatgtttgtttttatgtacaactggtttatcagtggaatttttttcctgaaggagtaaataagaacaactaactgtaaaagtcaggatcccacagaaaagacttggcatactaaaactcgaataatttcaaagagtttaataaaggcatggtttaaaaagtacggacaaggtataagaaaaccatagggattgtgcagtatcccaggtcaggttacagcagacctcttaaaccccacataattaccagacccagagacagagaaaagtgtgtggccaaggctggagacaggagctgagggtagcagtcagcccaagataagcacataaaggggaaatcagggcaataaacacctccatcccactatcctctagccctcagctctcctactagcccgcaccagccaaaccaagttgagagccagtgagaatggaggaaacctataaggctcagcctcccaaagtccagagcaggtgtataagggtggacagtggatcatgagagaccaatggcagatgccagcccactaatctaagtgctgtcatttaaagtcaccttcttacaaaactaaattctgggtgcttaattttacatgttaatagagtgttttattataataaataactactgaaagtcatttgatagtgaaaatacttaagcaatcattgttttacaaatttacaactttctattgaaagtacagagaatagaatgcttggtcatccaaaattttccttcagataatcatttgaatcctttttcatttcaaaattcttgttttgtttttaaataaaacaaaaacagtaccattcttttgtttaataactcttgtgtacatcaaatgtatgtatggaattggatggccaggagagctagaaaggagaataatctcaaattggacagtcttgcctgtattttgctttcttgccagtgatcagttgtttgctttttcaataagtatttatagagagaatgagcatctattataattataagacaaagtacacatgttacaaactacatgataattacttttcctcacagaactcagaaagaaaaaagaatggccttataataaccatacttttggagatcatttcattaaatgatgactatttttaaggtgaatatcttttcttagaaatcccttgaacatttttgctttagaataacagccatttggaaggccatgtctttaaataaatgctttatttatacatattcctgatttattaagtgggattttacctgtaggaataagtagtgaataagcctgaacagatatattctctgtaatttaaagtcaccaatacactaaagtcttagtagttgttttgatagtttatatacatagctggtatagctcaataataaatagattctcacaggttataaggcattagaaaaccattcaccgtatttggcttcaaggattttccttgtggttccacatatctattaactgttgcattcaaatagtcaatttcaccacaaggtagaaatatgtttgtagaatgatttaaatatattagaaaaaaataaagcatcaaacagaaaagacaatatgtaccttgaatgagaatcccaatttagatgatttatagtcagatataagattcatgtaataaccgttatgttactttgattggtgcaaaagtaattacattacaccaaccaagtaaaaatgatgttctgctttattatttactgtatattaaatttttgagttttttcaatgttagcatgctacatattctgacccagaaccacatgtattttttcatgagataaataattgaggtcttgtagttcactttatttctagattaaacaagaaaagtctatgaaacattcacattggtgtgacaacagcatggattactcacaacataatttattttctgaacaaagtcaatctaccttggactttaattttttgtggaaaactgagtatataatcattttttaaaaacccactttcttctttaattaccctactgtggcctttactgtgtttaatttgactgtttgagtgacaagtcaccagttgcaaaatacaattcaggacattgttattggtcagagatgtcatatcttccagaaacacatagttacggtcaaaatataaaaattacatcaactgcaaaaggtaaaatactacctgatattttcaggtgacatttctataatgcagtggaaaccaactggagtaatctgcttcttcccattatggctaaaaaaaactagctttcaggccaaccgaactcactagactgacaaagtagctcctcaaagagttgaacactctctccttagtcctgagaaaaacctgtggcactagaacaagtataaaggacctcatttaaagtatatttctgaatctatagaaacttgtaacaacagggcagagcctcatacattcctgaacaaacacaattcagccaaattagtcctgaagtgaaagttattttaaggggtagtaagttctctcagaaaggttgttggtgctgacatgactctctcagatgacagctatttgcaggtttaccatgctgtggtttatcatgtagacctataggaatgaccccatcccacttcaccatccctagctggcaaagttaggtgtgtatcacccaaggatccttgggctctccaacagcatagctcatgaggcaggagggatgaaggaccctctccacagctgagagttgtattttggcttctctctctatataggagtagtcttctggggattttccttagattccttcagtactattattatagtgcaggctgctactacaaacaaaatacggagttcaatcctcagataacagttatccccatactatctgtcagccttcccagcaatgatttcatcaaactcttgttatgtaaccaaatgtaaatgcatgaactaagctcttacattacattagaagccgtccgggaggtggggggcagcccccgcccggccagctgccccgtgcgggaggtggggggcacctctgcccggccgccccgtctgggaagtgaggagcccctctgcccggccgccaccccgtctgggaggtgtacccaacagctcattgagaacgggccatgatgacgatggcggttttgtgaaatagaaaagggggaaatgtggggaaaagaaagagagatcagattgttgctgtgtctgtgtagaaagaagtagacataggagactccattttgttctgtactaagaaaaattcttctgccttgggatgctgttaattataaccttacccccaaccccgtgctctctgaaacatgtgctgtgtccactaagggttaaatggattaagggcggtgcaagatgtgctttgttaaacagatgcttgaaggcagcatgctcgttaagagtcatcaccactccctaatctcaagtacccagggacacaaacactgtggaaggcagcagggccctctgcctaggaaaaccagagacctttgttcacatgtttatctgctgaccttccctccactattgtcctatgaccccgccaaatccccctctctgagaaacacccaagaatgatcaataaatactaaaaaaattaaaaaaaaaaaaaagaaaaaggccatttagcaaggattcattcacgtgctcttcactccttaaccctgagctcaagtttttactttatgtccttgtgaaggtagaaatattacttggttacatttatgaaaagaaacagcaaatagacaatgaaatgtaaacatctgcctcattataccattcaatatttttaagtaattgcttcaaatcatgtaatttagtttgcttttaaaatgatgattattttatgttgtcactcaagttctaacttgaagtttgagaactaattttctcaaagttaaacttaactgcagaacctattgctaaatatcatttgattgtgagaaacatccagtggcaactgctacttataccttacttttcttgatttattacctaaaatgtagtcgacttggttcactgaatagtgatgtttaacttgggcatatatggtggcagattcttacctggatctaagatgcttctgctggtgtggaaattttccatttgggaaatgaaagttttctggtctcttgagggcctcttaagtttgataaaaagaaaaaaacaatcaaatgagcacttcttcgtgaatcataagactgaaggagaggtggagagcatcaaacatgtggcatattctgcagctgtgagagtccatggttgagcaagttcttgctttctcttgtttaggcttctgggcattatctactttgataatctttattgctgatcttttcttccattctgggttatactaataacaataaatgcaaacacaaaactaacaagttcatatggtccctgctttaactcatctcttaaaaccattgttggaaaactagttgtaaatttccagtgacttgtgattttttttattgtcttcttcttaccaaaatataatctaggtcctaaaatgccatatgagatatgtatttaaattagaaaactgtgtttaaatatttattactctggttttatagtggttgcaaatattttttaccagacagaatccactggaaaaacattccacagacccgtattcttagttgatttattgaactctatattgttataaaattccgtacaaaatataatattcaaatgaatacaattatttaaatgtctactataacgtagcgtaaagtacacgtagcgtaaagtacactttgctacccacaaactatctggggttatttataataaagtcatgcatcaaaacatttgtatttcttttatcaccagtcaacatcagctaattttcagatgacataattcaaatttttgtaagccagcctaaaatagaatatatttaggcttggtgctgattgtattagtattgattttattagcactaattttatatgccaccttttgccttcagtggttacttttgaagatgtgatgggggaatggaaaatgcttaatagaaaatgtcttcacttatctatttcataggttaatcattgatattgttttcttatcaaatgaatattaaaaatagcagcagtgaattcattcttgttattctgttgcttttttgttttcagcattaaaaatatatcagcaattatgatatgtctcatatagtcctaggctcataagcttgttggataatttatttggtagcattttgttcatttatttcagatagatagatttaacttttatatttaacttgtaacagcagaaattagataatcagactatttttatactagtaccacaaataaataatgtcacctgcaagcaactttctaaaatattgacttctagcattaaatgtcatgaaattatagtaactcagaaaatcaatagtgatcatttgctactagaaacaacagttatggctttaaataaatgaggatttttaccctgaaaaatctttttacttttgtcaatttctcattcagttgttatggtaattacatgcaggacatgagaatttgaatgagtggttgtgactttgggccacttaaaatttggtattgagtgagaaaaagcccaaataaggatgtttatataatatacgtaaacgattattcaggacattctggggcagcatctagatcactcaacaaggaatcaacattcttagtttctggagtaccactcctgaaagagcctagacttgatgtttattttgaaagtgatggtgacatatcgtaaaataaatggattcacatatttttgtgttctgtgttccagtccagctctgtaatggcagctgtgtgaacttggatatgttcctagctttctttatcatagtttcctcttttataaaataaagttaattactacctcacagaatgactgcaggaattaaatgagtgccggtgaataaaagatgttcaataaatgttaatatcctcagcagccaatatacaaaagtaatataaaatcttaatattttgacaaaaatttatttgacagaattattatatatctttatttgtgtaatattaattcctaatttttcttgtgaataagtaaataaaagacaggaggctatagtagttagctactgatatgtgacaaatcaccccaaaacgtagtgacttaaaacgttcatttatttagcttgtgattatatggtttagaaatttacactaggcttagctcagtgatttttttttgtcttagttgatcttatctacgttcattcatacaattcgcctgtgttatcggcaggttgtgcatccagggactatgcatctgtggattcacccaaccatgaatcaaaaataaatattgagaaataaaaattaaaaataacaatacaacaataacaaataatacaaataaaaaacaatataatctaacaactatttacatagcatttacattgtgttaggtattataagtaaactagagattatttaaagtatatgggaggatatatgcaaatactacttccttttttataagggacttgagcatccatggactttgttatcagcagggatcctggaaccaatccccagcagattctggggcaagagtgtgtatctcttctcagttgccaggttggctgagggtggctgggctagtttggcctctgctagacaacatgtctccactccagatgatctctcatcttccaacagttatcctggacttgtcctcaaggtgaaggcagggatccaaaaagaggaagcagaagcatataaagcctctttagcctccttgctcagaactagcttgcccccacctccatcaccaccatgttctactggccaaagccagtctcaaacccagcctagattcaaggagtaggaaaatagattccacctcctgatgagagaagctgcacggacacattgcctagggtgtaaatatatggagaggtgaaaaaaggggccattttataataaatctaacacaaatgatataaaattttattttaaattaacagtagagtagaaagattaaacagatttatcaactttacttcatttttttccttctcccatggcctaaaatataattcttaaagttaggtttatatagtgggacttgcagactgtgtcaaaacatattttgaatttgaaatggtagaaatactttatatgtaataggaaaatattattttaaaaatcttaattagaatgggaaaaaagaaacacaatatatcaaataattaaaccaaggaatggttttgtacttttacatagcaaaatgtacttattaactttatctaaactaaaactgatacaagaataaatggaaaaaacaagtcaaagttgaaatttttttttaggatttcatgattaaagcttcttggtgattatgcctattatttaaaactaatgcaagtatgttaaatactgctattataaatatagcactttcccttcatcactctaaagcaactgtctacatgttaccttacttcccgtgaattctgtcttggttcaccttgcagagttctactgaacatcagcgtgttatacaattgtttcctttaccctagtaacatgtaaactaaacttctacaatttttaggaaggacttacttgtttgatttgacagctgacttaaaaaataaagagaacagatggagcaaaataataactatgattttaaaaatcatagcaatttatctgtggccaatgataattggtatgggagtaaccatgccaactttcaattatccatggtagcaggcaattgggaaagagtgatggtaatcccacagccaagccagaggcttaatgctagtcattacagattgtgtattattttcctaattccttacagtgctcgtgaataactctaatttatgtgaaatatgtttaaccctctgttgttgcatcacttgctagtagttatagaaaaagtaaaatgtccagagagagagagaaagagagagaaataagaggagaataactataaagggctataatattttatgaacattagtcttttaaagtattattttaatgattgcataatatttcactatataaatacgtaatattttatgtgagcattcccttgttgttagaaatttaagaacatctgttaaatgtgttttcttatttgtgtcactggtgactttagcaaaataattttgatggaatagagagtagaagccaggttggagtttcctgaagagttaaattacaggtgaccgataaagaggccatgcagaaaaaccctcacgagaactagctgtgaagaggacaacagccataggacagtagctggagagggtgtgagtcatttaagaagactttattccaaaatccaaagccatcataaggtccttggcaggaaatattcttgaacaagttaggacccaaaagaaaaacacggactagttcactaatacagagaattccaaacgttttatacttcctaagaaatgtcagactttaggccatcatttttaaggaattcccactaaaatcaagactaagacaaaggtgtaactgctattatttaacaatattctggaatttctgaccaatgtcaattttacttccaaattatagtttaaatctgtctatttctctccatctaccccagtgtcaccaaaccgtaatcattagtcacctcctagttaatctccctgttctcactctttctcattcattttccaaattatggtcagatgcatctttacaaaactattcatgtggcttctattttaaaaacattttagttgtttcccattaggttaaaatcctgaatcccacaaggtcctgcaaagttggacgtagatgtgcttctcagaactcatctcttcccacattccccttttctgcttctattccagccacactgaccttctttcagttacttgaatgtgccaggcgctctcctgactcacagttgtccatcagtgtccccactgctttgaatattttccccttcatttagcttccctctatccacttagcacatcttaaaagtcattttcttggaggcttccttgactctccaatcaaaatctgctccttctgttataatttctcattgtacctttagcactatactgcacctgtatagcatttaccacaatttataattataaatatactggcatgaggattttgtttgtctgtttttctttctccaatagagtagaagcttcaagaaaacaacgaccatgtctgtctgtgtacgtttttatctctaacacctagttgaatgcctagcacacaaaagtattcaattaattcattctttactgtggggaagtattatagagaaagttaagtagtgtttcttttcagcctccagaagtatttaataattattatcttgatgcattcaattcagtatcaaccctatttttttcagactcctactattgaatttgtgagatatagctagggataaaaattaattttacatgtatggcccttagaattgtgtttaaaaagacaatatataaaacattaatatatttaatagtatgctaaaatttacacaggaaatattgtttaacctagtatatttccaatttttattatttgtgaatcacattgccttttggcaggcactatttagctcataattctataaaataaaatacagttcttttaataccagatattgcaatgtcttttgaatttagtagtaatgttaaaggttgtctactggctcctgtatcataattttactttccaattacagtggaattttgggctgttgactgtagtgaacctaggttagttttgttaaggaaatttattcactcaatattttatgtaatttaagtacaaataaatatgaaagtttggggtcacataagaaagaataaatagaaaaaccatgatcctcatttatgtaatgattaaggcaacttgacttttagtagtttctccttagtcagtgctgggtataaaagggtggttttacaatgtgcctacattttgcttttattttgacctttactccatttatcctatttcttcactccaggctctggagctgcctcaggtttctactcttagcttttggtcttccctttctcctttctcaggatctgcctgtgccatagactccacttcctctgctctctgctgggctccttgtcctcagctgctcattaatctcttcacccccactgctttctttttcatttgtttgacttacctcccatcaagcctgatttccacttcaggttactttctttcattttttcgcatatttttgtattcaaaaacaaggaatagatctcttaggcagtccctcaccacgactgaccctgagcatttctgaatgcagctgagtttaaattgagtaaaggcaactctcacatttgttatgaggtttatacacacagggtttttaatgtataaaaaaaagatgtgtttttttaaattaagaaaaacagaatagatttaaaaatcaagcaatttcttctgcttaatacaatcatcaaatatccataatttctaactgtttttagtaaatctcaattaataaatatgctttattaacaaaaatctcttttttggaagtacattccagatggtaaaaagataattaattcgatgtcaccaaatattacatgacaggtgtgttatttttattcaggagctaccggcatgtgaacttctttcacaatcaatgtaaaagcaattcactgtataggaattgctgaacaagtgtgtcctaccagaccgaaatagcagaattccactgcacagaaaacagaggtgttagtgcagctgctgttccaagtggatgttgtacagtgactagctgttttgtaagttattgtctaggcttatggtggtctattgcttcttagtctaatatcttaaaaaaaatcattggtttttattttccttgatatccttgatatttccttacaatctcctttaagaacctccccatcaatgatctgttctaatatcagtaaaggatcaatgaaacaagacagaaatcaaataatcaatttgctttgtcttttttcacttttccttattgttcctcattttctgctgctaatcattttgtgtaatcaaaactcaaggcaaaatggtaaagcgataatgctttgggcaaacattttgtggaatgttattttaattgcctgcacttgtccagccctggggaggagtgtggcaatgcagatggcttcagctggctgtattccaggaactcactgatagtgattctgcctcccacttaaggtttacttatgtgtacaaatgaatcatgcagttcatgtcttggtaagaactacaaggctggagcacatgatagcacccagtaatcacagagcgaatcaaggattcttccttaagttagtggaaagttaggaagttatctaaattgactttattcctttatccggattttgacaggtggcccaccattatcattaatgtttataacagacaattctaagttctttattttaagccaaaatttgttccgtattattttgaccaatctaatttatcccagttctaatctttcagaccagtgttttctctgattatatgttcttgcaaatgaatgactgaccatcttttggagagtttaagacagcttccttttttttttttttttttttttttgagacggagtcttgctctgttgcccaggctggagtgcagtggagcgatctaggctcactgcaagctccacctcccgagttcgcgccattttcctgcctcagcctcccgagtagctgggactacaggtgcctgccaccacacccggctaatttttttgtatttttagtggagacagggtttcaccatgctagccaggatggtgctgagctcctgacctcgtgatccacctgtctcggcctcccaaagtgctgggattataggcgtgagccaccgcacccagccaagacagcttcttaaactgtctcctaaacatgaagatgcattctcctgaacattttcatgtaagtatctcagttttgagcaagtgtttcactgtgcttcatggatcactgctaatggatcccttgtcttcctcataaccttcatcttgtaatgttataactcatcagtgtactgttagtgtaatgctcagacatggacagaattattctagcactttgagcagtcattcatataggcagtttaatataatgaaggcatttggattttgtggagctgagtcctcatcctggctcctggacagctcaagttatccatggctatttcaatgtcttcacctgtgaaagagacagtgaggctagattaggcctagaatcacacatgtttagagctagagtgaatctgagaatatatagagtttataatactgtcaggtggttgttttcttgagtcacaatataagcatttacatgtatacgtgctgcctttattctggggatttaagcctgatgtttctgtttgttaacgttaaacttttgattctggcaggtattacaatggtaaccttttatcagctctgtagacatgaattctaggtccttgaattttgtagatatgaattctaggccttgagtagctaatataaatattgaataagacatgaccagaacacagcactgtgacacaccactggagttctctttttaggggtgatggcctaatagaaatgaaggtagaatgagcgtatttatttaactacctattatttacctcactaaaatttaaccaacatttatcaaacacatcctaagaaactttattaaatgtcttactgaattaaataaaccaaactcataacacatggtttttgttttctgacatggtattgcctattgataatcatcttattcttaactaagagtttaaaaccaatttgtttaataattaaatctagaattttgctaggaatcagtatgaaacttactcatcattcatgtatattttttaaatgagcaagcattagtgtgtctaggcctttccttctccaagattctcagagattcatctcagtggctaatttccatgagctcttagttatctgcccttaatctgtcctctcctatcttaacgtctgtcttggtctcaagagtggttatctagaattaatgaattaaaaggccttcaatttattttcaaagtagtttgatgccgactataatccaatatgatactgtatccctttgaaacatatgctgggttttggaatatatttgtttattcaatcatccatttatttgatcatttaggacccattttttaccagatactgtgttcagcactagggtagcagatatgaaagagacaaaacatcctttcagagagtagatatgaaatgcttgatggtgttttgtataggacctgtgggaaggaagaggagtgagtacataacgctccctaggagaaggaggggagtttgattaagattctttagtgagtcctgaagcataggtaagagttctccagaacacggaagaggcaaatgaaacagttcattgtaaggtttagagtaagaacaaagtatgagatgtttaaggaaccacatggagtgtcttgagtgacaaaaagaaaaccagtgaccaccagagaaaaaaacaaaaggacttttaaaaaattcctgagtcatagtttcaggcaaaacactcaagggagacaattgccaggaaataacatcaagaggatgcctctgagcattcaggtgatgtcatgtttagctcactcttccctggtagggaataccacctgaccaaaagcttgagggaatcctcttactagaagacccatctgaagccgccagacaaaggattagaggctgatgtccctttgagtcagtgtggcgattcctcagggatctagaaccagaaataccgtttgacccagccatcccattactgggtatatactcaaaggattataaatcatgctgctataaagacacatgcgcacgtatgtttattgcggcactattcacaatagcaaacacttagaaccaacccaaatgtccaacaatgatagactggattaagaaaatgtagcgcatatacaccatgcaatactatgcagccataaaaaatgatgagttcatgtcctttgtagggacatggatgaagctggaaaccatcattctcagcaaactatctcaaggacaaaaagccaaacaccatatgttctcactcataggtgggagttgaacaatgagaacacatggacacagggaggggaacatcacacacccgggactgttgtggggtggggggaggggggaggggggagcgatagcattaggagatatacctgatgctaaatgacaagttaatgggtgcagcacaccaacatggcacatgtatacatatgtaacaaacctgcacattgtgcacatgtaccctaaaacttaaagtataataataataaacttaaaaaaaaaaaagaaaggttcaggctggcttaggtaacaatttaattaaactttttgcttggcatttcccaggaatttctgaaactttctatttttattattcttgcaatttatagaaactgaacatttcaatccagtggaggataatagatgtggcctctatctaggtttattttgctagttaagttcctgaagcaacttaatccaaatattttattttgtccttaattaagaaagaaaagaaagaacatgaaatgtagccatttctttcatgaatcaaacaagatttaatatttgatcatcaagaataagtggtaagtttcttgctttacctgctaataaatggccatggtcatattgaaaaaaaaaattttactgatctaaatttcaataatttactagccagaaacacagtctcttgctgtgatcttgctcctcaaattgtcacaagaatccccagagattctatatgtgttacctctgtgaactgatcagtatgtgagtcaacagcaggccttgctatcattccctcctgattcctgagaagaggagtaagaaatttcaggtataatttgagctggcacctgaaacttttgctatatctctagttaggttgaagtatagctgttgccagatacacgtatacatatagatacatatacatacatatatagagagagagaaagagagagaaagagagacagacacagagataaagagataatgttttgcattttatccaatagataattttttatacgttcatggaacagtttgaaaaatttatgattctttggacaaaaaaaataaaaaactcaccttaagttgaaaagtagacattttgtaagactcattccttgatataaagaataataaagaaaccaatacatgaagaaaacagtcctcaataaccccggaaccaaagagttaatgaaaaggaaaattcataaaaatcaatgcacaagaaaaatactttatataaaacatatggaccatatcaaaagctataatgaaggtgaaaatacatagtgtcaaatctggttattataaagaagaaaatataaaaataatgaaaatatgcttttatcttatataataataataaatagccccgaaacaaaatagtagatgggaattaataaatatggtcactaaaatcaatgaaacagaaaattttaaaaattgtagaagggacaaacaaatcaaacacctgatttaataaatgactaagaaaatgaatacacaaagaattaaattattctattaaggaaacagaaaatagaaaaaagacaagctagaaataagaaaaaaaaatgaccacagatagtagatggacttaaagaattctgagactattgttatatgtgtaatttgaaagaaacaaaaatttgatcacctagagaaaatggatgatttcctcaaaaaatataaaaaattgaccaagaataactggaaaatatgactacactaattactgtggaagaaattggagaggtgattcaaaatctaccattgaataaagcaccaggactaattgggtttttcagcagggttttatgtagccagtgttattttaactattctaggctaaaggaaagatccacagcctccaagaagtcagcataatgttaatactaaatctaattttttaaatataactatattttatttattgttatagatacaagtatttttaaataaatattaccaaacagaattcaaccattcagcaaaagaaaaatcaagtaggataatactatgaagtcaaggtggattcatgttaagaagttatatatatcaacataatacatcagccaattaaagcataaaagttaaatgattatatcagtagatgctgaagcttttgataatatgcaatattcattcctaataagatcttcaagtaaaataggaattgatgaaatatttttactaaaagccagcagcaaatactattcttaaaaagggcaaaaatagattagaaatgaaatatgcagaatttagacttaaggagataaaattgccataaccattacttcacaagaaaattaagtaacctatgtagcactagaaaaaagagataaactacctttttttactaatgagttgactctataggtagaaaatctaagagactttgggagaaaatttagaatttagataccagggatatatttaaaaaacaatagattttgtttattttagccttaaacatctaggaatgtaatgggaaatattccattaatataagtggtaaaagcaataagaattttggaaaaatatgaataagaaagggacaagatgtatacaaacaaaatcaaagggcgtaaaataaaatctaaatgaatgtatgtagatacaccattttctttaaaattataaccttaaaagttcagtaattcaaaattaatacgtaaatgtaatgcaatacaaacaggaattccaacatgttttaaattttgtcttgaagttggtaaaattttttaaagtttatatgaacaaataaataactaaaaatagtcaaaaattttttgagaaagagaaatgtagtaatttagaaatttagggtgaacttgctttaccagacatcataacattctataatgtcatagtaacaaaataaatattgcatcatgtagaataaagatagatagactaaacctgagaatctagaaactggcctcagaagttatgtgaagttaatttaataacttttgtatttttattcagttattcagttgaaaggatgggttattccacaggtgcattggcactaccgagtctatccacgaaaaactattttataccctatataaaaataaatgccagatagatgaaggacttatataaaaatcaaaacaaagcaataaatactttacatttgtgtaatccaggattaagtgtatatctaaccaagatttgaaacccagggactgtaaagtaaaagatagacatattagacatataaaaattaaatgtttcagtggtaaagtcataatcgaaatcaagtaggaaataattgttctgataaaatataattaataggtgaccagttaacatttgtacgttccaaagagtttttaaaagctgagaaaagacaactcaatatttgaaaatggacaaaatgtgtgaataggcagctcgctaaagagaaaaattctaatgctagtaaacatgtgtaaggctcagattcactggtagtcagtgatatgtaatgtaaagcaattatgagatttggctttacagccattagcctgccacctgttgctggatgtgattcaaggacaaaggcattcccatacattgctggtggtaagtgtagagctacagtctcttttagaaagcaactgggtaatatctattcaaaaatgaaaaaaatgcataatctttttacctagaaatcaccttcttgaaaatctgacttatataaatatattacatgcatgtgatggcctttattttttaagtggtataagctttaatacaactcctaacacaaattctgttaaattcaaacatttgctgggttcctagaacagtgctcacagagttggcacacaaatgttataacatagtattacttgttaggtatacaaaaaacaaaccatacagagtttttgccaatgtggaatataatggtgttttgtaggggcagaaaactggaactgagtgagtgtcattaacaagaaaacacctgaatacattatggaacatctatatcatagagtattatagaactactgaataaattaggattctgctgggtaatctaaattgatatgtagaatgtgatgatgagggagaaaataaaaaatgcagaaaaatgtatataatataaccaatttttaaaacaaaagtgattaaaatcctgattgtgcctgtatgtatgtgtgcatctattgtaacttatgatgacataagtttggagtaaaaatttggaaaaatacttacaaacttaaaagttaataacaaaagtctggcatccagaaaaggagtaaaagaaattaaaaagtgagaggagagtatgatttattgtcttacttcagaacttacattatattatatatattcttcatatttaaaaaaacatttaacattcataaattttgtatgtgttttatatttataaacttttaaatttataaatgttatattcataaaatataggtataaatatatatcacattacatacatagatacatgcattgcatatgttcccttgcccatgccaagtcttgcaaagaaaacattttaaaatctgtcctaaaatatatgtttcatgtatttaaggatttatataaaattacaaatatattttaggtaattttttaatttcaagaaaagcacaagagaaatggattaaagataggaaaagcagcaaagtagctgctacaataatacacaaatgaaatgaccaaggagcatgacaaacataatgccaggattgttgccatcattgttgccatcatagcaatgacaatgtgaggatcatggtggaagcagcagcaatttaagaacaaaaatgaagatatagaaagaaaaaaagagggggagttaagaagaataattctgttctgatgcattggtctatttgtctacacttttttatttttattttcattttttgagatggagtcttgctctgtctcccaggctggagtgcagtggcacagtctcagctcactgctacctctgtctcccaggctggagtgcagtggcacagtctcagctcactgctacctccgcctcccaggtcaagcgattttcctgcctcagcctccccagtagctaggattacaggcacctgccgccacacccgactaatttttgcatttttagtggagatggggtttcactatgttggccaggctggtcttgaactcctgacctcgtgatccacctgcctcggcctcccacagtgctgggattacaggggtgagccactgcacctggcctacacttttaacaatacaatattgccaaaatattatagctgatgtttatagtgagtatttagtagggaaaattcctcaccaggctctttaagattatcttgggtatcctagaaccttggcattttcatatcaattttaaaatcaacatgcccggccaggagcagtggctcacgcctgtaatcccagcactttgggaggccgagacgggcagatcacgacgtcaggagatcgagaccatcctagccaacacagtgaaaccccgtctctactaaaaatacaaaaaattagccgggcttggtggtgggcgcctgtagtcccagctactcaggaggctgaggcaggagaatggcgtgaacccgggaggcagagcttgcagtgagccaagatcttgccactgcaccccagcctgagcaacagagcgagactctgtctcaaaaataaataaataaataaataaataaataaataaataaataaataaatataaaataaaatcaacatgccaatttccacacttacatacacacaacttgctgagattttgaatgaattttctttcaatctatagatgtttgggaggaatttaccttgcaatagtatagagtcatccaatccataatatatctatttatttaggtttcctgtattgcctgtaagtaatgtattttaattttcactgtagagttcttacataattttcgttagatttatgactaggtatttgacgtttttgatgctattttgaatacttttaaattttaacttccaattgcttctagtatatcaaaatacattgatttttgtttattgacctgtgtctggccaccttgctttattaactaattaattctaatagttcacagactaccatgcaatttgtgaataaatttctacttctctttacaaatcttatttcttggattttttttcttgccatattttactgactaggacctccactacaatattgaaaagaagtggttatagtgtacattcttgttctttttctaaatttaaggggaaagaattcaatattttatcactaagtatgctgtaggcttttgtagagaccctttcttagaatatgaatattgagaatataatttgctgaattttctttgaatactattcaaatattgaacttaaaaatgctttttccacatctgatgagatggtaatataattttctttctattctgttaatgtggtgaattataatgattgattttcaaatgctaaactacccttggattcctagaataaaattcatttgttaagaatgcataattttttctgtgtataagtggattcaatttgctactatcatgattaggatttttgcacctatgtttataaaaatttaagatttttttttctggtcattttctggtcaaactttgctatcagagttatgctaggatcataaaatgagttgaatactgaataaccccttttcttgtttccagaaggagtatgtgtaatatctgtattaatgtttccttaagtgtttttaagaattcaccaaaaagccacagggtctgaaggtttctttgtgaaagatttttacattatgggtttaattatttattttgattgctttgtttatgtttctcctgaaaatttgaaatttttgctccagtggttataaggagaactacataaaatatagtgaagtttctatttctgcagtcagtgtctattgatttccttccctagaatggctgaattaacatatttccacttcttccatccctgccactctctgatgtcaatgaatgacatatttttagttttaccttggtattgttaatatgcttatctttgttacgtattttggttttaaaggcaacttaagttgattttaaagacaatcttttaacacctcactacaaaagataatggacttaaactacccattattgccaccctctttcctctccttccttctaatttttgtcagatatataattttagcattttttggtattcataatatttacatcctgttcttaagtcgcaagccctaatttttatcttatttttagtcttgtagctaaatgaaacctatgttcattgtcaatcttttgcctgaagtttctgtatcattctcttggttggctgatgtttgcctcctagttttttcacaaaaagttaatgagaaatatatatgcgaaggacatggaagtcccccaaactttgctttcactttatactttaatgacaatttagctgtgtttatagttcttgaaagattatttgtttccttggggacattttagccattagtcttctatcattgagtgtttgaatgttgctcgggagttatctgagattagccagcctaaaacctatttccataggagattgataattttcttcattttaaagaaataattaatgcaaatgtaataaccaaatgtgtaatttaagagctgcatttaagaactggtaacatttgaagaaaaaacattaggtttaatttgggtaggttcaaaatgtctccctacccacttgtagttgggatcagaatacaaagtacacctcaaaacatgtcttttaagggaagaattgtttccttgggtaagataaaacttgaaactgaattcctcactattgaaattttaatagtacaaggttaaaaatggcattcaatatgagttttgttgtgtgggatggttttggaatctttaactgaataattccatttgtttaagtagtgaggtactaactttcagaggaagagactttaagagaatcagttgaaaatgactaatgccaaacatgaaagcagcatcatcatttctttactcattcctcagaagagaaacacccttactgccatccagaggtctatggtccagtggcgagttcagcaacattagcaaagggggtgaaggatgagagatgactcagagacttttcagtcaggtctattgaagagatagcttaatcaggaaaattaggaccactttaaaatgagtatcaagagtggaaagtagagacatgctaataagaagataggacttctgaaaaaaaaagtagctgagtatatatgcaaacagccaggaccctggaacctaagtttccttcaccattactgaacgttttcaaaaattccttaaacttctatttctttgtctaaaaaactgtgaaaattttccttatttcaaaactttgctcagaaatgtctctcctgagagtctttgaaagtttagggcatttaaaaatgcatattattaattttactgagttaatagccattatagtctagtagtgtgtgtaatatatatcaggggacatcttaaaaggcatattatcataaaatgcatatttaaggactttccacctacataaattgaacttaatagattataacaagtctagtgggcccattagggtctttggaaaatacagttcagggccttgttaaaacatatattcttcatgtcatattctacttaaggagcttgcttcagtaacctagaatttgaatatgtttgtcttgcttagtcatgaaaaatgaaaataaagaactctttctttttcagtaagacagtctacaaagtcaggaagaaagcaaattttgccgctaattacattgtttttagtttcaaataacatacatagaaaagtgtcaattaaaataatagctgccagtaaaatgttaaatgacttacacgttttatatatatatatatatatatatatatatatacacacacacatatatatatattaatcctccttttataagtcagaaatgtgagggattatatgtttcagtttaagctgaggttattgattgttagttaccaatggatatacttcaatgagaagcattgggtataaattatgtccagtgtttctcataacgtgatctgaaaaaccacctacatcacaatctcgtgggtgcttaaaatgcctgtttctgagcctcattcctgatcccctggatcagaagtctaggcatgtgccttgggaatttgcattttaataaactctcttagagatggttgcataacaactaaagtttgagagcagttattttaatgtgcaaacctatacacataatgtactaaatatgtgaagccctatctagaacgaacttctgggcatatatactttgaccgcagagtttatactacaattccttaaactttcttcaagtaatgcttattttgaaaccagttctggtctccagtgcccaacttggtcttatttagaaagccactgagctttctggctctaagactgagacatggagctctaactttgtagctgcaattggaaaatgcattaataagatatttgagtgcaattgcccattagaaattctatttctaagattttggatactttttgtattttgtttcattttgtgttgtgttgtgttgtgttgtttgagacagtctcactctgtcacccgggctggagtgcagcagagaaaacacagctcactgcagccttgacctcttgggctcaagagatcctcccacctcagcctcccgagtagctgggactacaggcatgacttttgatattccttaaaaatctttttttgttgttgttcaaaatcaagaggcatcatcccaaaggtgtccactcaaggcctatggatattcagcaatgataactgactcttatctgcagcacatcactagctacaccaacacaaaacaaaacacagcaaaataaaatccttctgtcatgttcatttatcctacagtcttcctcaaagtggaattataaaaaatggaattttattatttactaataactctatgtctaaatttgtttttcctgttttctcattttacaagtgcaaacattatcctcttgactcagtgaaaattagacttattcttgacccagacatacggctatactgaaggaaaattcatcattggctactgagaaggatcaactctgatagctgaaataaatttgaaacaaatctcacactagagacttgaaagtccttaaaacgattgcttggtttcacaaacaacactgtgtttttaacatatagaatcggctagaggtccttatgtgcttgtgaaattttccaaatgtgaaagacataagcaccaccgtttgtatcacagctctttctttcactggcttctaggacttgaatctaacaaaatacctcccagctgtgcttaactgccttgtggggttggttcttgattgttggtaaggattccctgccatgcttacttgggagcctcctaacattcttccttctcctggagagagcccctaatggaatggagttcttaataccagaaaattgcctagaaaatttactcaagtagtgggctttctcaacccagggttacagtaaaagggaaatgtgaaaagtttagaattaagtatgaacatctagttctgacatgggaggaataaactgagtacagcatgtaagaaagataattatttggacccttaaagctttaaaccaaatactctgactcatacaggttctggaaaagactcaaaaatggttcactattgaccctgctgtaagaaacagatctttattttgttttttaaagaagttttaaacaccagattcgaaatgacttaaatatgcaaaagtgcagcattattaccattttctttccccattcttatatgttcattctctaactgcagcctcatcagtggtttactacaccaaaggcagtgaaaaggttacatgtcatttcctgtactcctcatattcactagatttgactataaattccatagtgaattacagcaccaccattattaaagtaatataggccaaaagataagcattacttagtgtgcttagtgcttaggattttgcatgaagtatctgaaaagggtcttctgccctccaccatatgtgggcttttaatagttggcttttccttattagttcccagatgagaaattaataaaacaaatgatcgttgctactgataaataaatgctataccggaatcatttgggaaatcactactgcttatgaaaagacttctagcacctcttatacctttccatgtatcagacaagaaagtttactgagttctgtgctagatgctctggtggaataaaaaggaactagaaaacaacacccacgtgttaagagactgataataccgttggagattcaaaacaaacctcttcccctcctccctcagcagtctcaacttgtcttatcagttcaatcatcatctctcaagaggatggttcctaaatctataacctaaacctgatatctttcctggagtctggtctactttacccaactacctgttagacatctcctcctggatgtcccatttattcctttggttcagcatgttcaaaacaaaacccttctgctttcctttcacatctgcttttcttcctgcatttgctcttttctatttgtgctgataacatcaccatccttctgggctttgcacaggtctgaaacctgtaatttttatgaactcttgcttctcccctcttttcctgtcacatctcatttctcatagccgcccttctttttcagccccatggcatttccctaagttctggctttccttgcctttgcctagattgttggaataggtttctaagtaaattacataccgctaagttttttacccactaattttttcctacataactagctccattactctccaaaaagtacaatgccggggttctactcaaaaagagtcagtgcctcctcaatggctaaaagagcatgtccagacatccctaacttgcccttcgtggtttctacaacctgattctgcctgcctttccaatttagtttcatagaattttcctttttcggaatcctgtgctttacctaaagcaagtaacttgctaatccatatatttgtgccttttcttttacttttcccttgttctagaataacgtccctctatttcttttgatgtagatcaagcttgtcccaaccacggcctagaacagctttgaatgtgactcaacacaaattcgtaaactaacataatgagagttttttacttttttttttttttttgctcatcagctattgttagtgttagtgtattttatgtgtggcccaagataattcttcttccaatgtggcccagggaaggcaaaagattggacaccactgatctagatcctacctaaaacatggaaacttgctcaatagccacagaattagactaaaatttaagagccaatttctagaacagaatggtctaggttcaaaccctggctctcccactttactatgtcaaaatactttaccttcctctactttagtttcctcatctctaaagcagagtagtagtacctaatccctagtgctatgatgaggtaaatgagttaaagctcttagactaatgtttcatgtctataagatcttatataaatgctagacttcaattgtgaatgagtaatttttgccttcatttctagagctttatcttgttaagaaaattctcattgcatatcaaaaagcttaataatgaatgtgtacaaatgatgtatctctttatttgtgagcatgtgaagtacccacttataaagactctggtcctaggcataataaaaaattgttagtatggacaatttcaaataaacacaaaagtgtgcagaataaaatattgaacacctgtatatacttcagctgtcttcaattcacagccaatcttgtttcacttagactccatcttgtattattttgaggcaatcccagtcagcatatgtttcagctattaacagttcagtctgtatctgtaaatgataaggcttttgtttttacataatcattatttcattataacacttaaaatttttaaacataactttttaatatcattaagtagtcatttggtgttcaaatttccaatagtatcataaaatcataattttcgttaacaatttgctgtagtcaggatccaaataagataggcacattctagttggttgctgtgcttttgatggtctcttgatctataattttcctccccctctctgtcattttgtttgttttattacattatttgttaaagaatcggggttgtttgtcctgaagaatcttccatagcctggatttgccaactgcagtttcatggtgtactttaatatgttcctctctcctctgtgtttcctttaaagggtggttagatcagtttaggtgtgatgtttttagcaagactacttcataaattgtatggtggtgtgtgccaagagccacataatgtctgaaaatctttctttttgtgatgattgcagccattgatcatcaatatctaggccaattaattcattcagggtcacaaaatggtgatttcttaaaaggatttattcaattttaactttttcttcctttttctgacttctattttaggtttggggggtacatggcaggtttgttacatgagtaaattgtgtgtcacaggggtttggtgtacagattattttgtgacccaggtaatcagcctaatacctgatagatagttttgttattctgatcctcctcccactctctatcctcaagtagaccttggtgtctgttattcccttttttgggtctatgtgtactcagtgtttggctcccactaataagtgagaatgtgcagtatttggttttatgttcctatgttaattcacttaggataatggactctagctccatccatgttgctgcaaagggcatgatctcattcttttttataactgtgtagtattccatggtgtgtatgtagctcattttctttatccagtccacttggatgggcagttaggttgattccatgtctttgctattgtgaatactgctgtgatgaatatatgcatgcatgtgtctttatgatagaataatttatattcctttaagtatatacccagtaatgagattgctgggtctaatggtagtttgtgttctctgagaaatctccaaactgcttttcacagtggctgaaatagtttacattcttaccagcagtgtataaacatttccttttatctgcaaccttgccaacatctgttattttttgacattttaataatagccatcctgattggtgtgagatggtttcttattatggttttgatttacatctctctgatgatgagtggtgttgagcattttttaatatgcttgttggcctcatgtatgtattcttttaagaagtgtcctgttcacgtcttttgcccattttttaatggggttatttggtatttacttgtccacttgtttaactttcttatagattccgggtcttagacttttgtcagctgcatagtttacaaatattttctcccattctgtatgttgtctgtttactctgtgaatagtattttttgtttgttttttgctgtgcagaggctgtttagtttaattagatcatatttgtcaatttctgttttcattacaattgcttttgtcatcttcatcatgaaatctttgccagggctgatgtctagaatggtattttctaggttatcttccagggtttttacagttttaggttttatatttaagtctttaattcatcttaagttgatttttatatatggtgaaaggaaagggtccagtttcaatcttctgcatatggctagccagttatgccagcatcatttattgaatgagtcctttccccattgcttgttttcgtaagccttgtcgaaaatcagatggttgtaggtatgcatctttatttctgggttctctaacctgttccgttggtctatgtgcttgtttttgtaccagtgccatactgaacttgtagtatagtttgaagtcaggaagtgtgatgcctccaactttgttctttttgcctaggattgctttggctaccaaggctcttttttggttccatatgaattttagaatgtttttctctaattctgtgaaaaatgttgttagtagtttcattttgcacttgtatacaagaacttaaagtaaaatttaaaaaaagaaaaaaaaatgttgttagtagtttgatagaaatagcattgaatctataaattgctttgggtaatatggctattttaacaatattgattttttctattcatgagcgtggaatgtttttccatttgtctgtgtcatctctaatttctttcagtagtgtttggtaattctcattgtagagatctttcacttccctggttggccctattcccaggtattttattctttttgttgctactctgaaagggacagtgttctcgatttggctctcagcttggacattgttgatctatgggaatgctactgatttttgtacattgattttgtatcctgaaactttactgaagttgtttctgagatctaggagcatttgggcagagattatggggttttctaggtaaaaaatcatatcttctgtggtgagagctagtttgacttcttctctttctatttggatgtattttatttctttctcttgcctgattgctctggctaggacttccaatactgcgttgaatgggagcgatgagagaggccatccttgtcttgttccagttctcaaggagaatgcttccagcttttgcccattcggtataatgttggctgtgggtttttgtcatagatgactcttattattttgaggtatgttccttaaatgcctagtttgttgaggattttaaacatgaagggaagtttaattttattataagcctttccttcatctattaagatgatcatgtggtttttgtgcttagtcctgtttatgtgatgaatcacatttagtgatttgcataggttgaaccaatcttgcttcccaggaataaagcctacttgatcatggatgattagctttttgatgtgctgttggatttggtttgctaatattttgttgagaatttttgtgtctatgttcttcaaggatattgacttgaaattttctttttaaattgtatctatgccaggttttggtatcaggatgatgctggcctcataggatgagttagggaggggtccctccaccttagttttttgaagtagtttcagtaggattggtaccaactcttctttatttgtctagtagaattggctgtggatctacctggcccagggcttttactagttggtaagcttttcattactgattccatttcagaactcattattggtctgttcagggtttcaatttctttctggttcaatcttgggaggttgtctgtttctaggagtttacctatttcttctagattttctagtttgtgtgcctagaggtgtttatagtagtctctgagggatttttgtatttctgtggagtcagtggttacgtcccttttgtcatttctgattgtttatttggatcttctctctttttttattagtctagctagtggtctatcaatcttatttattctttcaaaaagccagcttttggttttgttgatcttttgtatgtttttttttgcatctctatttcctttagttcatctcttattttggttatttcttgtcttctgctagctttggggttggactgctcttgtttttcaagttcctctaggtgtgatgtttgtttgttaatttgagatttttctagctttattatgtgggtatttagcactatacattttcccctttacaaaagtaaataacatatatggatagtttgtaaacatcttctcaggcagcaactcaaaataatgtggagatagatgataatgatattatgaagtcaagtttattaataaggaatctgaagctccaaaaagttgtgattttaatgatgttaaattcctagctcttttcatcttgttcactctaattgagtgagaatttttagaaagtttatagaagtattaatgcccaagcaaataaagaagaaaatgctctaatccatgtatcctggtcaaacaaggaacgagttaaagacagcaatgagagtagtgagtcattggacctagtggaggtttgcctatgacgcttgtggagaatttctttctagatctgtcattctcactggattcccaggcaacagctgtgacagactaaattgtctctctcagatgagtataaaatttcatcttccttcctcatcagcaaaatgaaatgaaatggagaattttggaaatggcctgaaatattattgcagacattgctataatttggaaattgtcacatgagtacacagaagatttggcagtttcaagaattcattctggatgtggcaccagttccaaatcagcctatgagaccattatttaaaatgccatcactgtattttaccccagatgattcctgatgatattttattcaggagacatttgtgggagatctgctgtgtgcctctatccatttgcatctgagaagaggaagaccagcctaatgattttcagaaatgagcctatgttagcatatctgaccctgcccacggtgtccccacatcctcagacatcaccttaggcctggcttcaccaaagaggcaccttctagttttatctctctacccaggactttttattcctttgtggactcccttcctttgaaaatcaaatgttctctctctcacatacacactctctctttctttctcttaagactcagctaatctgaaaataacttgccccattatttgtcattcgaaatgtagtacccacaagttaaacaaggtgggagggtgagttgtggcatgccaccttgccaacatgttccattgggaccatttctatggatgcattagtttactgccaggtgttagtatttatagaagttatggcaacagttctatgaatgtctcctttatccctctaccacaaaataagcttctaagaagtctggaaattctgagagtatattagccaatgtgagtgatcactatctaatagtatattttccaaaagcctagctttctaaaagagagtcttgaattttagactgtcatacaaatgtcagttaggtagctttcctgccatagcaattagccaagttaactaggtagccaagacaaggataacttgatgatagatggtttgatttaagtaaaaccgtgtgatttttttttttttttaccaaaagcatgctctgggtaagttagcaaatcaaagcaaagactatgtctttctatctggaattccaacaaccatctaaattctttaattatacagataattttgcatttaaaatttttgaagtagtggactattaactagatcttagaaatggtttgtgaaacttcaataaaagtgtttcttgaaagaagatttgattctcatatatgaaatatgaaccaagttaaatgtacaatctattgatacctacatttgtagttactaaagggaattgagataagctgattttatagagttatttcattagattaagtcctttctctccttggagaaataacttaattaggtatatgtcacaaatgcaattaggtgaggaatcttggccctaattcatttagttgaaagaattacgaacaatttgtgacatagcaagtaggtttttatcaagacagtctttttgagatcagctattcaaaaagcaggggcactggactctgaacacaaatttatctcaaactttatctcgattcatctttgtggcctgatgaggtcatcatttgaaaagaatctaggtgaatataatttataatacagtaccttacctataaattcttctttatctcagtattgacacaatactattcaggtggctttaggagttatttgcttctatctgttaaaaatcacaaaggataataatagaaaaagacatgtatattcggacagctatagaggcagacatgtgattagaatcggacctcctgtttccaagcactagactcaggtcactagatcacaattacagctttatgctttggcttggcagttttgaaaagctcttatttttcttagccttatatttgactgccagagacataatcatttctttaccactcatcatgaacaacaaagcactaaattagtatctagtgttaagatggtaagctacaggtatatttaagttaggaaagaatttcttatttggaaaaagaagttatattttgtaacttcctttgtttaactaatttatataggcaggttagtagtacactatacatgtatttttttaatgtttaaatttaaaacatttaggcaaaggagttttgtctaaaataatattccttagcttactgattcttaataattaatcaaaaccaatatattttaatgatttacattactgaaaaactgtaacataagcttatttaaaacctttaaaaaactataacaagcttatttaaaacctttaaaaactacaacataagcttatttacaacctttaaatagagtctgtaaaacagtacattcagtgaaatctagttttattcctattcttctaccttgttagactgtacataatctctctctcaaaaagacttgtgtgtgtgtgtgtgtgtgtgtatatatatgtatgtacatatatagtatgtgtacatatatgtatgtgtacgtatgtgtgtgtgtgtttatatatacatatatatatatagagagagagagagagagagagaaagagaaccaaaagagaatctaacagagtagaaaaaggagaaggatcactgggaaacttaatgcatatgtgggggatatcaaataagcccagcaaaaagaaaaagcaaagaagccttgagaaaggactgcaacattgaatgccttctccaacccacccacagattgatcagaagtggatggaagccttatggacttgaggtgctatcacagcttctgtccaaacaactagacaatgattaggttatttggacacaggggtgatcccaacaaagccagtttaaaaataaaaataaagagaaaaatgggccggatgtggtggctcacgcctgtaatcccaacagaagctgactctgagagggccagggtctcagatactgaatttagcaaagactttacagaaatattgtaaatctgttcaaggaattagagaaaactctgttcaaataattaagtgaaaatatgacaattactcaatctcagtagagaaacagacatcataaaggaaccaaatggaaattctagagtttcagagtacaataatccaaatgaaaaatttactagctagactcacagtagatttgaggtggcagaaggaaaaatcagtgaacttaaatatggataaattgaaatgatctaaagaaagacgagaaagaaaaataataatgaaaaatgaacagagccacaacattctgtgagacgacatcaagcataccaacatgtatgtaatgggaatcccaggagaaaggaagagagagataaataagagagaagcaagagccaaacacttctgaaatttgatgaaaactattaatttatagatgaaactttagagaactccaagtagaataaacacaaagagaaccacgtttagacacatcataatcaaactgctaaaagccaaaaaaaacagtaaattttaaaagcaataacagaaaaacaattcatcatgtacgtgaaaacacaataagaatatagcaatttcagaaagaatggagacaaaaaggccttagaatgacatactcaaagtgcaaaaataaaaaagagattgtcaactatgaattctgtcttcaatgaaactatcaaagatgaaagcaaaaatgaagacattttgaagcaacaaagtataaaatgaattccttgctagcataaatgaactataagagttgctaaagaagtcccacatgcaaatacattataacagacaattttattttttgcaacacaatttatttatttatttatttattttcccctttccccacaatttattttttaatgttttcattatttcacatagaaacttcatccctttagccaggcttggtgtctcatgcctgcagttctagcactttgggaggccaaggtgggcggatcacctgagatcaggagttcgagaccagcctgaccaatggtgaaaccccatctctaataaaaattttaaaaaaactaaccgagcatgatggtgcatacctgtaatcccagcaactcaggaggctgcagcaggagaattgcatgaaccgggaagtggacgttgcagtaagccgagatcactccactgcactctattctgggtgacagaacgagactccctctcaaaaaaaaaaaaaaaaaaagacagaaaaaagaaatttcattcattagaaagtaattcatcattcctacctcctctcacaccttagttccctcattttattgtgaaaatattcaagcatatacagaaagattgaaagaattgtacagtgaacactcatatattcatcactattctacaatattttgctgtatttgttttatcacatccatacatctatccatctctttgttatgtacttcaaagttgcagacatgagtacgtttcacttctaaaatgttaacatgcataacattaattagagtttatgtttatctttttttttttgagactgagtctcactcatgattttggctcactgcaacctctgcctcccgggttcaagtgattctcctgtctcagcctcccgagtagctgggatcacaggtgcacaccaccacactcggataattgttctatttttagtagagatggggtttcaccatgttggtcaggctggtctcaaacacctgacctcatgatctgcccacctcggcctcccaaagtgctgggattacaggcgtgagccaccatgcccggccttcttttttaattgctaaaattaaaaagaccaggtgtagtggctcacgcctgtaatcccagcactttgggaggccaaggcaggaggccacttgaacccaggaattcaagacaaacctaggcatcaaggtgagaccctgtctctacaaaaaaattttttttaaatagctagatgtcatggtgcatgcctgtggtcccaactacttggaaggctgaggctgaagcatcacttgagcccaggaggtcaaggctgcagtgacctgtgatcgtatcattgcactccagcctgagcaacagagtgacaccctgtctcataaaaaaattttttttgattacatttaaaaacctttttagaaacagggtgtcattataacagacaataatttgaattaagaggaagggatggaatgaagaaataaagagcactgaaatttgtaaatacattgggtcaatataaagcattctacatcgtcatcaacaacaaagcactaaattagtatctaatgtaagctctgttaagatggtaagctacaggtatctttaagttagaaaagaatttcttatttggaaaagaacagttacgttgtgtaacttcctttgtttaactaatttatatatgcaggttagtagtacactatatatgtatttttttaattttaaaatttatttttaagttttacttaagtttcaggatacatgtacagtacagaatgtacaggtttgttacataggtatacgtgtgtcatggtggtttgctgcgcctactgacacatcctttaagttccctcccctcaccctccatccctcaacagcccctggccctggtgtgtgttgttcccctccctgtgtccattgttctcattgctcaactcccacttaggagtgagaacatgcagtgtttggttttctgttcctgtgttagtgtgctgagaatgatggtttccggcttcatccatgtccctgcaaaggacatgatctcattcctttttatggctgcatagtattccatggtgtatatgtacaacattttctttattcagtctatcattgatgggcatttgggttggttccatcactttgctactgtaagtagtgctgcaataaacatacgtgtacatgtgtctttatagcagaatgatttatattcctttgggtatatacccagtaatgggattgctgggtcaagtggtatttcttgttctagatccttgaggaaatgccacaccatcttccacaatggttgaactaatttacattcccaccaacagtgtaaaagcattcctatttctccacagcctcaccagcatctgatgtttcttgactttttaataattgccattctgactggcatgagatagtatctcattgtggttttgatttgcatttctctaatgatcagtgatgttgagcttttttcgtatgtttgttgcccacataaacgtcttcttttgagaagtgtctgttcatatcctttgcccactttttgatggggttgtttgctttttttcttgtatatttgtttaagttcattgtaaattctggatattagacctttgtcacatgggtagattgaaaaaattttctcccaactataggttgcctgttcactctgatgatagtttctctggctgtgcagaagctctttagtataattatatcccatttgttaattttggcttttgttgcaattgcttttggtgttttcatcatgaagtctttgcccatgcctatgtcctgaagggtactgcctaggttttcttctagggtttttatgtttttgggttttacatttaagtctttaatccatcttgagttaatttttgtataaggtgtaagaaaggggtccaatttcagttttctgggtatggctagccagttttcccagcatcatttattgaataggagattctttccccattacttgtttttgtcaagtttgtcgaagatcagattgttgtacatgtatggtcttatttctgaagtctctgttctgttccattagtctatatgtccgttttggtaccagtatcatgctgttttggttactgtagctttgtagtatagtttgaagtcaggtagcgtgatgcctccagctttgttctttttgcttaggattgtcttggctatatggggtattctttgattccataagaaatttaaaatagctttttctaattctgtgaagaatgtcaatggtagtttgataggaatagcgctggatctacaaattgttttggtcagtatggccattttcacgatattgattcttcctatccataagcatggaatgtttttccatttgtttgtgttgtctcttatttccttaagcagtggtttgtagttctccttgaagaggtcctttatatcccgttagctgtattcctaggtattttcttctctttgtaacgattgtgaatgggagttaattcatgatttggctctctacttgcctgttgttgttgtaaaggaatgcttgtgatttttgcacattgattttgtaccctgagaatttgctgaagtggcttattggcttaaggagtttttgcgctgagatgatggggttttctaaatatgaaatcatgtcatctgcaaacagaaaatttgacttcctctcttcctatttgaataccctttatttctttctgttgcctgattgccctggccaaaatttctgatactatgttgaataggagttgtgagagagggcatctgtgtcttgtgcctgttttcaaagggaatgcttccagcttttgcccattcattatgatattggatgtgggtttatcataaatagctcttattattttgaggtgtgttccatcaataactagtttattgagggtttttaacatgaaggatgttgaattttatcaaaagccatttctgcatatatagagataatcatgtggtttttgtctttggttctgtttatgtgatggatttcatttattgatttgcacatgttgaaccagccttgcatcccagggacgaagccaacttgatcatggtggatacgttttttgatgtgctgctggattcggtttgccagtattttgttgaggattttgacattgatgttcatcagggatattggccttaagttttctttttttgttgttgtgtctctgcccagttttggtatcaggaagatgctgacttcataaaatgagttagagaggagtccctctttttcagtttcagaaggaatggtaccagctcctccttatacccctggtagaatttagctgtgaatccgtctggtcctgggctttttttttggttggcaggctattaattactgcctcagtttcagaacttgttattggtctattcatggtctattcatcctggtttagtcttgaaagggtgttttttaaaatatatttatatatatatatatctatttcttctagattttctagtttatttgtgtagaggtgtttatagtattctctggtggtagtttgtatttctgtgggggtcagtggtgatatcccctttgtcactttttattgtgtctatttaattcttctctcttttcttctttattagtctagctagtgatctatccatgttgttgttggtttttttttttttttcctcaaaaaagcagcacctggattcattgattttttggagggtttttcgtgtctctatctccttcaattctgctctgattttagttatttcttgtcttctactagcttttggattagtttgcttttgcctctctagctcttttaattgtgatgttagggtgtcaatttgagatctttctagctgtcttatgtgagcattaggtgttatataaatttccctcttaacactattttagccgtgtcccatagattctggtaagttttctctttgtttttattggtttcaaagaacttgatttctgccttaatttcattatttacccagaagtcattcagaggaggttgttcaatttccatgtaattgtgtggttttgagtttcttaatcctgagttcaaacttgcttgcactgagagactgtttgttatgatttcagttcttttgcatttgctgaggagtgttttacttccaattatgtggttgattttagaataagtgccatgtggcactgagaagaaagtatattctgttgatttggggtggggagttctgtagatatctattaggtccacttgatccagagctgagttcaagtcctgaatatcctttttaatttcctgttttattgatctgtctaatattgacagtggggtgttaaagtctcccactattattgtgtgggagtctaagtctcttttgtatgtctctaagaactcgttttatgaatctgcgtgctcctgtattgggtgcatatatatttagaatagttagctcttcttgctgacttgttccctttgccattatgtaatgcccttctttgtcttttttttttaatcgtagttggtttaaagtctgttttgtcagactaggattgcaaccctttctttttgttgcttgccatttgcttagtaaattttcctccatcactttattttgagcctttgtgtatctttgcatgtgagatgggtctcctgaatacagcacagcaatgggtcttgactctatccaatttgccagtctgtgtcttttaattaggtcatttagcccctttacatttaacgttagtattgttatgtgtgaatttgattctttcatcatgatgctatctggttattttgcacattagttgatgcaatttcttcatagtgtcattggtctttatattttggtgtgtttttgcagtggctggtaccagattttcttttccatattcaatgcttctttcaggagctcttgcaaggcagacctggtggtaacacaatccctcagcatttgcttgtctgtacaggattttatttctccttcacttatgaagcttagtttggctggatatgaaattctaggttgaaaatcctttcttttaagaatgttgaatattggtccccattttcttctggcttgtacagtttctgctgaaaggtctgctgttagtctgatgggcttccctgcataggtgacctggccttctctctggctacccttaatattttcttccttaatttcaaccttggagaatctgataattatgtgtcttggggttgatcttctcaaggggtatcttagtggcattctctgtatttcctgaatctgcatgttggcctgtcttgctaggttgaggaagttctcctgtatagtattctgaagtgtgttttccagcttgtttccatgctcctcatcatcttcaggtactccaatcaatcgtagtttggtcttttttacaaagtcccatatttcttggaggctttgttcattccttttcattctttttctctaatcttatctgcatgccttatgttagcaaggtggtcttcaaactctgaaatcctttcttccacttcacaaagtgtaatgctctgtgtatgcttcatgaagtactattgctatgcttttcagctccatcaggtaatttatgttcctctctaaactggttattctagttagcagctcctcaaaccttttatcaaggtttttagcttgtttgcattgggctaaaacatgctcctttagctcagcgtactttttttttttttttgacggagtcttgctctgttgccgcccaagctggagtgcagtggctcgatctcggctcactgtaagctctgccccccgggttcatgccattctcctgcctcagcctcctgagtagctgggactacaggtgcctgccaccacacccagctaatattttgtatttttagtagtgatggggtttcactgtgttagccaggatggtctcgatctcctaacttcatgatgtgcccgccttggcctccctaagtgctgggattacagcatacttttttattatccatcttctgaagcctacttctgtcaattcttccatctcatcctccgtccagttctgtacccttgctggagagatgttacaatcatttggaggagaagagacactctggccttttgagttttcaacattttttcattgattgtttctcatcttcatgagtttgtctagttttgatctctgaggatgctgacctttggatggattttttttagggacttttgtttttcttgatactgttgttgttgctttctgtttgtttatttttctttcaatggtcaggtacctcttctgtagggctgctacggtttgctcggggttcacttcaggccctattcatctggtttgctcccacacctggagatgtcactcaaggagtctggagaacaacaaagatgggtgtctgctccttcttctgggatctctgacttcaaagggcaccaacctgatgccagtaggattgctcctgtatagggtgtctaacaacccctataggagggtctcacccagttgggtggcatcgggaacaggacctatttaatgaagcactttgtcccttggtggagggggtgtgctttgctagggggaaacccacttgtctgggctgcccagattcctcagaactaccaggaggaatggttaagtctgctggtccacagagactgtggtcactcgccccctgcccaggggctcatgcccagggagatccaggttctgtcccggagcctctggctggagttattggacttcctgcagggaagaactgcccagtgaggaaggatgagtcagagtcaggcctgaagaggctctctggctgcagtctgccacagccagtgtgtcaggctttgggggatacctattgggaccaagccattcagtctcccttgaaaagcacagactgaaaagcccttgaaaagggctttttcagtctcccttgaaaagcccttcccccacccaaggaacttagtgtgttaggcagttgtgagtcccagtgctggctgctaccccttcctcagggagctcaaatggcttagacagtaagccacagctgtggggctggttgcccctcaccctgggagctcagcaggcttaagcagattccagctgagagcctgttgagaatctgcgcagctctggggttgggaccctaagctctggtggtgtgagtttgcgagtgggattttcccatccatgggttgcacagttctgtgggaaaagcatggtttccctggctaggcagcatgctcactcaccacttcccttggctggggggtgagggctcccctggctctcaggtgggctgctgcaccacactgctcttccttcctctctatggatcatgccagtcacctagtcagttctgatgagagaatctggataccttggttgccggtgaaggattcacacgcttattatggttcttttctatgggagcctctgattgccgttgtttctagtcggccatcttggccccatccaaatttttaaatttaaaatatttagatagatgactataattgtatttgtcatgtcatatatttgcgtttgtatagtcatagatatatgactatatttgtatttttcttctaattttttaaaaaatataatgttaaagcaataactattacactacactgttacatttataggatatgaatatattatatatgatatcaatgatacaagaaaatggagaggaaatacatctaaactgaaatttgccatagttttctgaaattaagtcaatgttaactggaatagattatgataaagtaaagatgcatattgtataatcactttaaaaatttcaaaaaaagctaaaaatttatgaaaaactaaaatagcatgctaaaaatatttgttgaacaaaaatgaaggcaggagagaaagaacaggggagcaaaaatgattacacttatagaaataactaaataacaaaatagaaacctttacccaacccaatgttagaaaatatttttctatgttttgttctataatttttatagctttggaatttacatttgtgtccattgttcatttgagttaatttttgtgtagggtgtgatttatgaatcaaagttaattttttgcacatagatatttgccatatcaataattacattaaatgtgaacagaataaatacatcaaaaggtaaagaatgtcagattggattttacaaagcaatatccaactatatactatctacaagagatatggatgagattcaagatacaaacaggttgaaagttaaaggatatatacaaagatgtactatgtaaagagtaaccacaagaaatatggagtgagtataatagtattacacagactctatgacaagtgacattattggagacaggaaagaatattttatataatgataaaagggccaatatagcaggaagatatagcaattattattgtgtatgtacctaacagagcctcaaaatgcatgaagcagagacggacagaaatgaaagacaataggcaattagaaataaatagaaattagaaagaagcaattaacacaattatatttaaagatttcaatactcctctctcaataagaatatagtagacttgaataagcctacagtacactcatctgaactgacattcataaaacactccacccaacaataataaaatacacatttttccaagtgcatataaatcatttaccaagatagactatattctccattactaaatgaatcacaatacattttaaggattcaagttatataaagtatgtttttggtcacaatggaattaaattcgacatcaatattagaaaaaatctctattaaatcttcaaatgtttcaaaatgaaaaaatatgattctcaacaccctgtaggtcaaagaaggaatcaaaaggaaaatttgaaaacattttgagcttaataaaaataaaaacaagtttagttgtatagatttaaatgcttatattagaaaggaataaaaattgaatgttaataatctaagtatccacctccaagaatatggaaaaaagagcatatcaataaccaagtatgtagaaggcaggaacaataaaatcagagtggaaataaaataaaaatgggaaaaaaataactagaagaacaatacagaaaactaataccatcaaaagttggttctttgaaaagatcaacaaaattggtgaacttctagccagactgatcaggaaaaaaaaaggaaagaaaaaattaccagtaactacaatgagggaggggacaccactacagaccctacagaaactgaaaggcttacaagggaatattatcaatgagtttaggctaataaattctataatacagataaaatgtacaaattcttagaaagtcaaaaattaccaaaactgactcaagaacaaatagaagaattgtatagtcctatttcagttgtatacattgtaatagttaaaatcttgctattaaaaaaagcttagattcagatgtctttaattctatcagatgtcttcatctttatttgaaatgagaccaatcctacacataattttttcaaaaatcaaaaaggagggaactcttcctacttcattttatgaggccaatattactctgatactgcaagtcaaagacctcagaaaagtccataggccaatatctctcataaagagagatgcacacacacacacacatatacataaaaaaccacttaacaaatattagcaaactgaatccaataacatatagaaacaattataaaccttgaaagagtggtttaacatttgaaaatttgttgatgtcatgcaccatattaggaaataacaaaaccaatatgattacctcaatgaattcaggacaaaatattttttcaaaattcaatacccattcaacaaattaagaatagaagagcagtttgtcactctgataagagggatttgtgaaaacaaaaattgtgagtattatctttcacttaatggtgaaagactgaactctaagatcaggatcaatacaagaatatccactatcctcatttacattcaatattatcctggaggttctagccagtgtaatactgcaggaaaaagccattaaagacatataaaatggaagagaagaagaaagcccatctttattcttagatggtataatcttatatgtaaaaaattctgaagaatctacaataaaagattacaattcattagcaagtttagcaaggttgcaggaatcaaattgaatatacaaatttttatttgatttccgtatacaagcaacaatcaatcaaaaaaatgaaattttgaaaacaattttatttatggtgatgacctgtacacagatgactaaaaaacattgctaaaagcaattcaagaagacctaaataaatgtagagttgatttgtggtttggaagacccagtattattaaggtgacagttctttagatattgatctatagattcaaggaaatctcaatgaaaatctgaagcatttttgcaaatgcaacaaatttttctagccatcatgtgtaaatgcaaatgacctggtatagccaaaatgatttttaaaaaaataacaaaactgaaggactaatattacctgatttcaacatttatcataatgataatcaaggaagtgtggcatcagcttaaagatagacaaatagacaaatgggaaataatagagtcaaaatgtaaacccacatatatctagacaaatggctttcaacaggggtacaaaaataactcagctgataataaatagcttttttcaacaacccttttatatggttggatttgcatgtttaagaaaaagaaagacaagaacttcaacccatacctcccacattatagaaaacttacttaaaataggtaatagaaataaatgtaaaaaccaaaactgtaaattttttagaagaaaatacagaataaatactttgtgactttaggttaggcataggtttttaactatgacactaaaaagtcaatcaatgaaagaaatagttaaaaatatttcttctttgaaagacactgccaggagaataaaaagacaaagcacaccatgggagaaatattttcaaattacatatatgataaaatgacttttatccagaatatataaatagctctaaacaaacaatccaatttttaaaatgagtatgattgtaatagcactccacacgaaagatatatgaattgcaaataaactcatgaaaagttgttcaacatgattagtcattaggaaaatcaaaacaaaacaaagcaaacgagggaggagccaagatggccgaataggaacagctccggtctacagctcccagcgtgagcgacgcagaagacggtgatttctgcatttccatctgaggtaccgggttcatctcactagggagtgccagagagttggcgcaggccagtgtgtgtgcgcaccgtgcgcgagcggaagcagggcgaggcattgcctcacctgggaagcgcaaggggtcagggagttccctttccgagtcaaagaaaggggtgacggacgcacctggaaaatagggtcactcccacccgaatattgcgcttttcagaccggcttaagaaacggcgcaccacgagactatatcccacacctggctcggagggtcctacacccacggaatctcgctgattgctagcacagcagtctgagatcaaactgcaaggcggcaacgaggctgggggaggggcgcccgccattgcccaggcttgcttaggtaaacaaagcagccaggaagctcaaactgggtggagcccaccacagctcaaggaggcctgcctgcctctgtaggctccacctctgggggcagggcacagacaaacaaaaagacagcagtaacctctgcagacttaagtgtccctgtctgacagctttgaagagagcagtggttctcccagcacgcagctggagatctgagaacgggcagactgcctcctcaagtgggtccctgactcctgacccccgagcagcctaactgggaggcaccccccagcaggggcacactgacacctcacacggcagggtattccaacagacctgcagctgagggtcctgtctgttagaaggaaaactaacaaccagaaaggacatctacaccgaaaacccatctgtacatcaccatcatcaaagaccaaaagtagataaaaccacaaagatggggaaaaaacagaacagaaaaactggaaactctaaaacgcagagcgcctctcctcctccaaaggaacgcagttcctcaccagcaacagaacaaagctggatggagaatgattttgacgagctgagagaagaaggcttcagacgatcaaattactctgagctacgggaggacattcaaaccaaaggcaaagaagttgaaaactttgaaaaaaatttagaagaatgtataactagaataaccaatacagagaagtgcttaaaggagctgatggagctgaaaaccaaggctcgagaactacgtgaagaatgcagaagcctcaggagccgatgcgatcaactggaagaaagggtatcagcaatggaagatgaaatgaatgaaatgaagcgagaagggaagtttagagaaaaaagaataaaaagaaatgagcaaagcctccaagaaatatgggactatgtgaaaagaccaaatctatgtctgattggtgtacctgaaagtgatgtggagaatggaaccaagttggaaaacactctgcaggatattatccaggagaacttccccaatctagcaaggcaggccaacgttcagattcaggaaatacagagaacgccacaaagatactcctcgagaagagcaactccaagacacataattgtcagattcaccaaagttgaaatgaaggaaaaaatgttaagggcagccagagagaaaggtcgggttaccctcaaaggaaagcccatcagactaacagcggatctctcggcagaaaccctacaagccagaagagagtgggggccaatattcaacattcttaaagaaaagaattttcaacccacaatttcatatccagccaaactaagcttcataagtgaaggagaaataaaatactttatagacaagcaaatgttgagagattttgtcaccaccaggcctgccctaaaagagctcctgaaggaagcgctaaacatggaaaggaacaaccggtaccagccgctgcaaaatcatgccaaaatgtaaagaccatcgagactaggaagaaactgcatcaactaatgagcaaaatcaccagctaacatcataatgacaggatcaaattcacacataacaatattaactttaaatataaatggactaaattctgcaattaaaagacacagactggcaagttggataaagagtcaagacccatcagtgtgctgtattcaggaaacccatctcacgtgcagagacacacataggctcaaaataaaaggatggaggaagatctaccaagccaatggaaaacaaaaaaaggcaggggttgcaatcctagtctctgacaaaacagactttaaaccaacaaagatcaaaagagacaaagaaggccattacataatggtaaagggatcaattcaacaagaggagctaactatcctaaatatttatgcacccaatacaggagcacccagattcataaagcaagtcctcagtcacctacaaagagacttagactcccacacattaataatgggagactttaacaccccactgtcaacattagacagatcaacgagacagaaagtcaacaaggatacccaggaattgaactcagctctgcaccaagcagacctaatagacatctacagaactctccaccccaaatcaacagaatatacatttttttcagcaccacaccacacctattccaaaattgaccacatagttggaagtaaagctctcctcagcaaatgtaaaagaacagaaattataacaaactatctctcagaccacagtgcaatcaaactagaactcaggattaagaatctcactcaaagccgctcaactacatggaaactgaacaacctgctcctgaatgactactgggtacataacgaaatgaaggcagaaataaagatgttctttgaaaccaacgagaacaaagacaccacataccagaatctctgggacgcattcaaagcagtgtgtagagggaaatttatagcactaaatgcctacaagagaaagcaggaaagatccaaaattgacaccctaacatcacaattaaaagaactagaaaagcaagagcaaacacattcaaaagctagcagaaggcaagaaataactaaaatcagagcagaactgaaggaaatagagacacaaaaaacccttcaaaaaatcaatgaatccaggagctggttttttgaaaggatcaacaaaattgatagaccgctagcaagactaataaagaaaaaaagagagaagaatcaaatagacaaaataaaaaatgataaaggggatatcaccaccgatcccacagaaatacaaactaccatcagagaatactacaaacacctctacacaaataaactagaaaatctagaagaaatggatacattcctcgacacatacactctcccaagactaaaccaggaagaagttgaatctctgaatcgaccaataacaggctctgaaattgtggcaataatcaatagtttaccaaccaaaaagagtccaggaccagatggattcacagccgaattctaccagaggtacaaggaggaactggtaccattccttctgaaactattccaatcaatagaaaaagagggaatcctccctaactcattttatgaggccagcatcattctgataccaaagccgggcagagacacaaccaaaaaagagaattttagaccaatatccttgatgaacattgatgcaaaaatcctcaataaaatactggcaaaccgaatccagcagcacatcaaaaagcttatccaccatgatcaagtgggcttcatccctgggatgcaaggctggttcaatatacgcaaatcaataaatgtaatccagcatataaacagagccaaagacaaaaaccacatgattatctcaatagatgcagaaaaagcctttgacaaaattcaacaacccttcatgctaaaaactctcaataaattaggtattgatgggatgtatttcaaaataataagagctatctatgacaaacccacagccaatatcatactgaatgggcaaaaactggaagcattccctttgaaaaccggcacaagacagggatgccctctctcaccgctcctattcaacatagtgttggaagttctggccagggcaatcaggcaggagaaggaaataaagggtattcaattaggaaaagaggaagtcaaattgtccctgtttgcagacgacatgattgtttatctagaaaaccccatcgtctcagcccaaaatctccttaagctgataagcaacttcagcaaagtctcaggatacaaaatcaatgtacaaaaatcacaagcattcttatacaccaacaacagacaaacagagagccaaatcatgggtgaactcccattcacaattgcttcaaagagaataaaatacctaggaatccaacttacaagggatgtgaaggacctcttcaaggagaactacaaaccactgctcaaggaaataaaagaggagacaaataaatggaagaacattccatgctcatgggtaggaagaatcaatatcgtgaaaatggccatactgcccaaggtaatttacagattcaatgccatccccatcaagctaccaatgactttcttcacagaattggaaaaaactactttaaagttcatatggaaccaaaaaagagcccgcatcgccaagtcaatcctaagccaaaagaacaaagctggaggcatcacactacctgacttcaaactatactacaaggctacagtaaccaaaacagcatggtactggtacaaaaacagagatatagatcaatggaacagaacagagccctcagaaataatgccgcatatctacaactatctgatctttgacaaacctgagaaaaacaagcaatggggaaaggattccctatttaataaatggtgctgggaaaactggctagccatatgtagaaagctgaaactggatcccttccttacaccttatacaaaaatcaattcaagatggattaaagatttaaacgttaaacctaaaaccataaaaaccctagaagaaaacctaggcattaccattcaggacataggcgtgggcaaggacttcatgtccaaaacaccaaaagcaatggcaacaaaagacaaaattgacaaatgggatctaattaaactaaagagcttctgcacagcaaaagaaactaccatcagagtgaacaggcaacctacaacatgggagaaaatttttgcaacctactcatctgacaaagggctaatatccagaatctacaatgaactcaaacaaatttacaagaaaaaaacaaacaaccccatcaaaaagtgggcgaaggacatgaacagacacttctcaaaagaagacatttatgcagccaaaaaacacatgaagaaatgctcatcatcactggccatcagagaaatgcaaatcaaaaccactatgagatatcatctcacaccagttagaatggcaatcattaaaaagtcaggaaacaacaggtgctggagaggatgtggagaaataggaaacacttttacactgttggtgggactgtaaactagttcaaccattgtggaagtcagtgtggcgattcctcagggatctagaactagaaataccatttgacccagccatcccattactgggtatatacccaaatgagtataaatcatgctgctataaagacacatgcacacgtatgtttattgcggcactattcacaatagcaaagacttggaaccaacccaaatgtccaacaatgatagactggattaagaaaatgtggcacatatacaccatggaatactatgcagccataaaaaatgatgagttcatatcctttgtagggacatggatgaaattggaaaccatcattctcagtaaactatcgcaagaacaaaaaaccaaacaccgcatattctcactcataggtgggaattgaacaatgagatcacatggacacaggaaggggaatatcacactctggggactgtggtggggtcgggggaggggggagggatagcattgggagatatacctaatgctagatgacacattagtgggtgcagcgcacaagcatggcacatgtatacatatgtaactaacctgcacaatgtgcacatgtaccctaaaacttagagtataataaaaaaaaaaaaaaaaaacacatgaaaaaaaaaaaacaaaacaaaacaaagcaaacatggaaatgtttgttattttaattgttatgatggtttcatggctgtttgcatgtgtcaaaactcatcaaatttgtgtacgttaaatatgtgaaacttattgtatgctggttacacctcaataaagctgttaaatttttttaaatttaaaaatattatttcaagaataaaataaccaaaccatattctgggagcaagtatttgcaaattatatatctgataaatgacttgtatcaataatacataaagaacttttacaactcacaaataagaaggcaaactaaaaatggaaaaaagatttaaatagatgattcttcaaagaagatatgtgaatgtctaacaagcagaggaaatgatcattaatcattaagaaaatgcaaattaaagccacaatgaaatactatacatccactaaaatggctataatcaaaaagattgacaaaattggtgagaatatgtggaaatcaggaaccctaatacactgctgatgggaatgtaaaatggcactttggaaactggtttgggaatttcctagaaagttaaacacatacttacctattatgacctagcaattgaactcctgggtatttacctaagaaaagtaaaaatctgtgtccacaaaaagatgtttattttattgttcatggcagcattatttagaatatctaaaaataagaaactggtgaattaataaataaaatatggtgtacccacataaatgatactactcaaaaagaaacaaactacttagccatgcaacatgggtaaactcaaaagcataatgttgaatcaattaagctagacaaaaaaggctacatattgtataattctatttatatgaaatttctagaaaaaagcaaaactatagagacaaaaactatgtcagtagttttctgggactacaagagtgagaagcagttgactacaaatgggcacaaggaaacttttttaggtgatggaagtattttagtcttaggttgtggtgatgggtgcagacctatataaatttactaaaactattgcaccctacatgtacagtgtatcagtattatggcaagtaaatcataccttaataaaactgttagctaaacaataaaaaagatatctatgctggaagtaggaacatgagactcattagcatatagatgatcattgtagctgtaaaagtagagaaaacatctagggaaagtttgttgaaagggaaaacataagaagctgggacagatccctgtggagcagcaacacttagaggatctagcaaaaatgaaaatgagtaaatgcagctacagaggtagaataaaaatgaaggaaatatagtatcacagcaagtaagtatttctaggagggggcttgtcataaagatatcaaatgcttcagataggttaaggaagaaaaagactaaaaggtgtctgatggtggtcacccaagaccttggcatgagcagtttttgaggaccaaataaggtacaagtcaatctggagtgaactgcagagtgagtgggagtaatgaatgcaaacaggagtattgggagcctggctcaagaagtttatctgaaaaaggaaggatttccttccaggtgaagctggaaatgacaggatatagaagtgcaagattttgttttaacagaagattcaacagcatgtttcagtgtggttagaaagaagtgagggagaaaaggctgaagattcagaagagggccataatgagggagcagaaaaagataggattgaaaacacaggttgaaagattaccattaaacagtaaggaataattgttccatgtagaagagtaaagaatggttttaaaataagtgaatttgtagatttcatggcatcaaggaaaggcttgtatgatggcttcttttttcttggtagaaagcaaggtttttgagagtaaaagcagaagtcataataccaaggatttgaggggaatggcactctttaaggacctagaattaggttagtgatcatgaatttataataataccagtctacccaattgtatattttttctctaggaacaagaggtggacagtttgattcactggagttagctccatcagaaagctagtagagcaagggtgtttagagtggtggtaacaaaacacttggaatgacagatcatggatggacaaaagtgaaggcattgggggctgatagacattgtcttcacttgcattcccctgaaacaaggtccgagacaatgactttaggtcaggtagttgatttgagagggagctcaggatacaggagtgacggaatggggaaaataagtcaggaaacaagggaaagataattaaagggtgcatgttttgagctacgtatcattgtgggtaactgcagctgagtcctactggaaatcctctgaggaagcctgtagaatgtgcctggaaattatccctctgtagaacagaaagctgacacattaatccactaattcctgtcaccctttgctggagaattatttctagaagcattaactacccccatttttccaggataccttgccagggctgaacaaactctctggcttcagaaaaatcccagaggcagaaaatgaaaagtaatggggaggattgggcttgaggtgaaatattgacagcatccaaaactccacaggaattttctaccaccagcttcagctaaaagctgaagtagtcctaggggcatatggtagaagatgaaattgaaccagtttacaaaagtccctatgcagtcaaagtaattgaggaaataacttaggataatagatggagttctttgattgtatggaagttattgatatcctctgagctattgatttatcatctgtaaatggggatgagattacccactttgtgtggttactgctagaattaaaagtccttattatgtaaggtgcttagcacagggcctggcatgtagtaaggtatagagaacaaaagctactatattattgctattatctattgaaagattagtaatattaataactacctgcattatggataatagactaattcaaattttatgtataatatttttgaatattatattcaagttcactacttaacttgaaccagtaagttcactacttaagaatataatatttcatatgacaagacattgcagttttgtttggaagaacattaaattctggtactttttgaaattagttttatcatagaatggctattgggaaaatcataaatgtaatctaattcccatgcattctttttcctttggttaggatttcgttgaagtttttattagactagaatgatttattttatttgtaaagaaatcaccacagatgtattgttggttttgttttcaaatcttttctgcttttcaacttattcaaacacaagaaacaatctaaatgcattctactctctacaacctctgatgtcaaataagttttctttaattctagcttaaatctttaatgctgcagttttgtttttgcttattttcttctcagtggagaaaaaaggaacagctggttactattgtcaattttctattgtttggaatttattaaatatgcaacacttgtgaatacatagatatcaatacatatttccttccagatatagaactcctattgcttttctttcaagagtgatagaattttatatgggaaagctttagagttcttctagtcccagtatatagtctgattatttaatactagttaaaatattattaattgccatctagaatttcttgtggtaaattgcctgatgtgttctttgctcaactaccaattggactattattatatttcttatgaatatattgcaacgcaacacaaaatatctttgcatattgatgttaactattaaaccactacatgatattttcccccaatttgttatttgtcttttaattcagttgatagtatttttgccttacaggttcataatattttgtcagatatatatatttttctcttatgaatttctttttttggtttcatgcttagagatgccttactcaccatgagcttttatctaagttcacctatattttcttctggtcctttaatatttttatttttaagttggttttctaatccatccagaattaacttaaatgcaggattgcacatttgttcctaataaatttcaagttgtttattacagcatattgctttgatatgttgtaggattttatatcataaatctgttacatatatattcatgctatatatcagtggttctcaatcagaggtgattttgccctctaggaacatttggcaatgtctgcagacattttttattttccaggactaggggagaggctggctactggcttttagtgagcagagagcaaggatgatactaaccatcctacaatgtacaggactgcccccacaacaaagaattgtcaattgtactgagattaagggaccttaagagatgatagatggatggatgcatagttgatagatcaatagataaatgtatagaagatagatattcattgaataccatttttctgccagttacataccaatagtaatattttccagcctatatttttattctttacctatattctattctttaccctgaagggcattttaagagacattgactcctactttatggaaatccagatacattgaattgttggatatccctggtttgagcacataataaatattgaatgagcgttttataaaaatgacaacaataaatcaaataaattttaatgaaccttatttcactacagtaacttatttttatatgttaaaaagtatgctttttaaaatccattgcggagttttgctaggaatcaattttaagcagtatgtttcttctttagtcttctgccacatctgttattctcttgctatgcagcataaatttcatcagaatattaactctgttctctatattatttttatttagttttattaccactgtcaagcttgcagatttccttgtacacacacatctctttaatatgtagagttgcttattcttaccatctatgagaatcattacttttgcataaagactatatccatttttagttacattctgggagttaatattggtatccatggaattatatgtgtcttctgtgtcaaaaatttctattcactctaataacttatcctgaacatattttgtattggtattaacactttattgtttctgatccccttattagaaagatattttcttctgtgtatttgtgagccttttaattcttattttgcttcctgtcatatttgacatcctctacaacagcaatgtccaatggatggaatttatcgtgatgatggaaatgttctgatctgcacagtctaatatagtaggcatggttgagcacttgaaatgtagctagggcaactgaactgaggaactgaattttacatttaatttaatttagttttaattttagtagccacatgtggctagtggctgctgtatcggacagcacaattctatagagtaattccttacccttccatttttagcttaaaatcctcagctttattttaacttaaacctatttttactggttgtgtttgtatgcagttttgtttgttttgtatattgtatgcgtttcttatgtcccagtgattacgttattttttacttcatttcctatgctttccatacagtaataatacatatccttaggcaattgagagtgtgcaaaggtatttctgtaatgtattatctattaatatcaggtgcttgcttttctttacttttttgcaaataaaatgataatgttcattgtaggaaaaatgaaggaagaaaaacagaaaatataaagaagagaataaggcaaagattattactactactaacttcacagacacacacagacatacgcagagggatacacttggttgagtactttctatacatattcttttatttttaaacaccttactgattgtacagctaatacgtatttatcactagaaaaaaaatttaaaaacaggagtaaagtgaaggaaaaaaatcatctgtaatcacaatgcatagattaaccacttttattactttgatttgttttctcacagtgttgtttctaagacctgtgggtagatggtgtgcaggtaggtaggtagacagctggatatgtagaaaggcattttcaaaaattgtattatactatatgcagggtgggacaatagaagtatacacttttcaggtggcaagaaaacaaaattatatgtcactatgagtatgtatcatccacagtggtattagtgaccattctgaacatttgtaactttaatagaaatatatattggttaacatttatccactgggtttgtctatttattaactgtatcttgctttttatatcatgaacatttttctctagtataaaataaaattcacaaatgtgattttaatggctacgtcataatccattcgttgtctctatatcattaactagtttcctattattggacagttaggatgcttctctttttttactactataaatagcattacactctacatttagtgcctaaaatttttcatctctgattttttcatttctgattattttatctctgattatttcattagtatacatttttagaagtgaaatcactggcccaaatgaaatgaatggatatgagatccttggtatatattgtcaatccaaatcaccttccagaaagttctttgttgcttatagaagaaaatattcttgttccatttttatggtttaatcatttttatgcagctattttttttttttttttttgagatggagttttgctctcttacccaggctggagtgcaatggcatgatcttggctcactgcaacctccgcctcccaggttcaagcaattcttctgcctcagcctcctgagtagctgggactacaggcgcgtgccaccatgcctggctaattttttttgtatttttagtagggacaggtttcaccgtgttggtcaggctggtctcgaaatcctgacctcaactgatccaccggcctcggcctcccaaagtgctaggattacaggtgtgaaccactgcacctggctgcagcttttcttcgaacttttaaacttctgtttggttttacgactcaggattgttttttaataaacgtgcctttcaagggtttagcaaagtaatcatattgttataaatacccaaccaacataactttattttttgctagcaaaggttttcagatataagatttttcattgtataaattgtttctttttagggtgaacaaggagaaaaaggagatccagctctggctggccttaatggagaaaatgtaagcctaactcttttttctgatactctgtttacattttaccactaagatatgctatttaatgctattaagatttgcctatttttggcagagccagccagccatgatccaacaaaattaagaatcatggtgttctttcacatggctcagtagaggcccagtgtttttagtttcatttcattggctttatgtattttctacctgtgcttagccttaacaggcctttctccttgacgtttcttgcttgcaaattttctagtcttttttttctgtcttttttcatcttacatatcttctgccatggcttgtgctcttatcagtggttcacttttcatctcagtccaaatctccatctagtctatagatggcgtctgtattggtaggctttcagtgatgggaagaaagggcgaagtgaagggaaactaactccgtattgctcccctccatggcaccagttccacagcctcagggataacattgcctgtgatatcctaggaccccagtcatcttctccccttcccctcaggatggttatcctcccagaattgcactccagattttaggataaaatttgaaggatggcccaaatgtgggtttcactctgaaatgtaattttatttacatttactcaccatttactatagatttgttatctttactggtaggggaagtgtccaaaatgagaattagtttttccctcggcttccttttctcacttacataaatatgttttggaaaggacctgaagggccacatgacttataaaagaataaggaaaaactgtgagactatatctagctccctaatgccctagatgtgttcagaaacccattttgtatgcaggagatcattacagcggaagagaggctgaagaccaatctttccggcctgtggagaaagtcgtgtgtgtgtgtgtgtgtgtgtgtgtgtgtgggtgtgtgggtgtgtgtgtgtggagtctcccaaaaaagaaagaccctagtagtaatagtagttaatgtttctatgtatgttaactaaaataatagttgtttcaccatcattcttatttctctccctttgaagtgatttttctacaccagagaataggcactagccccagtggcttgtagctatgggagtctctgcatcttctttaccacctgtaatacatcaggacactgaatgtcacacatgtttaaatagagtaactgactcacctcttactcctgtcattggaggcacgtggtgaagtgggatgagttctggagtagaaagccagggtccagtttgtcttccagttctgtcacagaagagcagatcacttctcagagtctgtaaaagtgatggacttgggatagattcttttttttttttttttgagacggagtcttgctctttcccccaggctggagtgcagtggcagtggcatgatctcggctcactgcaacctccgcctcctgggttcacgccattctcctgcctcagccttccgagtagctgggactacaggtgcccgccactaggcctagctaattttttgtatttttagtagagacggggtttcaccgtgttagccaggatggtctcgatctcctgacctcgtgatccgcccgcgtcggcctcccaaagtgctgggattacaggcgtgagccaccgtgcccggcagacttgggatagattctaaagcccctatcgctattatgtgctatgattttatgcaaagagttattaagattataaacttgaaaagtctgacgaggcctgaagcattcattcaggttcattgagtgcctgctacatgtaaggcacagtgagaaaaacaaaacaggaagagatgaagccagagcataggaagtcctggatgtgaggatgcttgtccttcctcctcaggacaaaggggagatgtggcccacactttgtttaaatgaaaattccttttacagtggattctgaaatggatagaatttgggcctttgcctgtgttttctgttctttctattacactctccgtgaaagcaaagaccatgtgttggaatcctagtacttagcacatgtttggggtaagttccaaataactatttgctgaatgttagtttgaaaaactgagcggttattaatattatgacagagtaaaatataagtaattagagtctaagctagaataacagatgtggaagggaagatacagagaatgatgctaaagaggtaaaatacatatgatttggcacttgattggagttgaaaactcaaaaatagcccaacatgttgaccgttctgtgtgagaaggatactaacttgtgagaaatgtaggagtgttcaaacagattaattacagtgttccaaaaaataaccaaactacaagtatgtgggctctctgagatagaggagcaaaacagagtgtattacaagtgcataaaagtaatattggaattgaaatagaaagaggagtttttgaaatatttgaataaaactagaaagatatttgagaggttggaacctgaaatatattcacattaatttcaagatttgaaaatttttcttacattgtctgaaagtaaggtttttgggctttttaattaatcaactgatacatgcatatatttgagggcctactatattcccaaactctctgtcagccactgtgtgagttccaaatctgagtaacactaacttactgagagatcccaaaggcctagtgagcagtgtgaatgtctatccctttgaggaatcttgaaagagtccttcacatgccccaataacaggaggtcattcctttagcaccgttattgtctgatgtagctcattaagtacaaccataaagcatgacaaagcacattaacttttctcacttggttacttagttaataagtagatgatgttattttttccccttaattttgccaaagatattcaggagttatgactaaggagaaataacaaaaagtagtaagagttctcctctttcccctctatcactagtagtaaagaatcagctgcttggttattacactgttggagatggggggagtgttaatattgtgttatagttcataaactattttcacaaggaatttgaaatttgaccctcacccagcttaattggctagtagagtggggaatgatagtattcgtattttcagaagcaagaaattaaaggcttcagaaattaagcaactttcttttttaaaatactaaaattggcctttaactctaaatatttggctgaaaagtctgatcttcccagtaaatcctgccacacatcattgcttatttttcagtgctaaaaaaactgagtctgcaaactaaagtaattcagcgtttatgacagttcactctgactttcaataagcccaggtatacattcttaggaattgaaaggtattataatggctattttgatttgaattaaagtcaagccaatgatggaaatcataacttcagaaatattgtcttagaatgtatggtaaataaactcagtgagccaggtgactccagctactttctaagtcagagtatattggaatgctttaatatttctactaaatgaattccacagcctttttaatagtctttattgctgtgtattatatatgtatcttagtgtcaatgtatcttataataacttattttgtgccagctttctcacaaaatgggccagctcactttggaaagtgtaaactttaatttaaagggtagtatgtagcaattcagtctttctcaatgtggcactcttggcattttggcaagacagttctttttcaagtcagactgtcttgcaagagcagaatgtttagcatccttgaagctcaccaacctaatctaaatgccagtagcagcccctagtcattgggacaagaaaaaatgtgctgatatttttctaagtgtatcttaactgtgtgtgtgtgtgtgtgtgtttgtatgtgtgtgcatgcctaaacttttgtttgatgtctgtggtattactaaacaaatgcatgctcatatgtccattctagtttaaataatgcatacaaaacatatattaaaattttcaaaaatttgaattgctagaaaatttaaccttgaaaatatatgaccttgtctttacacacaatctagtgtataattaaataattttgattgtggcctaatacaagatatatttaacaaaggtatcttagaatagacttgagagagaataatataaagttgtaattgtgatctttaaagccagactatctgggttcacatcccagctctgccactaactagctgatgtactacttggtaaattacttagcctctctgtgcctcagtttctttatttgcaccatggaatgataatttcaatatcctctctgtgcctcagtttccttatttgcaccacggaatgataatttcaatagtacttactgtaggggaaaagataattttcccttcccctctgaggggttcagtcagctgaaatgaactgacaatggacagattaacaggagaaaaggcatacaaatatattaacgtgcatacagtgggagccataaaaaatacgagactcaaagaaaggccagatggttgaagcttaaatagaaccctctttataggaaagaaggagatggggaaatgtaggcaattttgagaggtagtaaactcttttttgaattgaatgggaccaagagctaacaatagcttgtggacaagttacagaaaggtgaaggctggacctccactgtgaacaaaagttgtcttgttttgcagataaagactcccagataatctctcagagctgccctcagaagaatagaccaagagtctgtctgggcatcgtgacaacttttagtttattctcttctccagagattaattttcctggttattctgttagattcctaggaagggggttttaagacaattgctttttttggaagaagatttctcagtctgataaagaaacttccagagagagctcctccctgtacttgaggaggggttggaggaaaaacaagagaaggttagaaagttcttggatctgaggcagcttctaaggcttttcaattccttttaattcaaaagtactcagcatgccaaagcaccacactttggggttatcactctctgtaccccaaaattacctcatggatttttttgtgaagattaaagggactatcatacagaaagcctttagaacagtgtccaacatagggcaagaactatataaacattcactattattagaaaccaagttaaataaaacacatttagctctaataggtacatgtttttatttatttgtttctgtggggttatacaatcttagaaaagtagacttaattgttgagttgtctctttttctgaatctatattatggtcttttaagtatcccttattagaattacagcatctgatgtttctaaaataatcatgttaatctccttataccaatgcaatctgtactagaggatacaaaaatattgaaatcacaaaaccagagataacagctggcaacagctgttgacattgctagggaataacattaagtcattgaaagcttgtgaaaagaattaattgatgggttaaaaatttttaacaaataatatttttatattatcttctgaattttaaagatatgatatcccatgagtagtactaggtactccaacaaaaattgattttatagtctacccgcttttataattctagttataatactgctcttcagcttttgtcttgcctttagataacggtttctgcctccacattacatgtagaatcaactactgtgcttttgggaatctttatgtacatgaatttgattgaaaaccttcataacagataccgatcttactcaatatttaattcagagtctattccatttggctctttatgcctatggtgagtgctgtgtcctttctccctagcactcaataaccattgataggagcaccagtgtgacacaaggagaaaaaccgcatttgagaaaagcattactgatgtgtttctcagaggctattacaatgccatggccttaacaacattgtactttgtcacaggaagacgtgagttacatgggcctactttaatggtcataaaagtagaagcttgacaaatgcagtacttctcaattgcattttatcctatgtgagttaaagcacagttgttacatatccatcaaactggtataaagctgaacaagaaagaactatcagttatcccttaaacttgaacttgaaaagtaaaaacaacatttattaagtgcctaccgtatgctaaatgtctctacaacatatgattctcagaacaacccttcaagaaaactattacttattatacctattttataggaaagcttacccaacttacccatgattatacataaaaggccattcgtcttctgactctgctgaaatccacatctgtgaagtcttggacaccccagtagaattaggcatctgtgggaaatgcttttgtcatacctgctatatacttcaatgataatactcaatattcacatcagcttgtaattggctacatcatcccttcccctcctccctgcccatagttgactgaaccagggagagttacctgattcaactgccaatacattgcttccctagaaattacaactgggattaatttgttggaattaatctttaaaacttttaatgtattattttatacctacaaaataatatatataacatatatgatggttataaatcatagttataatgaggaccccagtgtacccagaactcaatgtgagaactaagacgtcatcctccacttggaatctccctgtgtggttcactatatactgtcctccactccagagttaaccatttttctaaatgctgtacctaatgtttccttccatgcttaaaaattatgtttcacacttacacatttataaggagtatataatttagtcttacatgtttgcagacgttcaataatatttgttgagtaaatggatactcaaggtttttatcagtcatttctttttttgtgtttgtcttttctctgcatagttttacacaagcaaaaagagaaaacctttttttaataaatttctctgctcagtgaatgggataacttcctagccagttacttaagtcaaatgcaactcagcctggagactttccttcttcttctccacttctggcatatctgccagtcttgcttccagcatgtgccaactctgaccacttctcatcatctccactggcacaagcctgtcccagccatcctgctctctttcctggaaaagctgtcatagccccttttatgctcccactcttgctgcccataatttgtgttccacgttgctgccaaagtggtttgtggggatttttgtaaacatattcacatcatgtcattttcctgcttaaaacacttaagtggcttcccattgcatgtagaacaaaacccatcttcctcatcatggcctgcaattacttatgtaccatgacccctggcaaaccttgacttaaccccctactccttacctgtgtgctcatgacactccttttatcttagtgacctctgtgcttctttttccctctgcccccacacagatcattgcgtggctggatcctttttttttttatttgagcaaattcatgaggtacatgagaatttttttacacatgtataatacatagtgatcaaatcagggtgtttaggttgtccattttccaagtgcaatacattttttaaaagtatgcttatcctactctgctatcaaacattgaatttattccttctaccttactgtatgcttgtatctttttatccacttcttttcatcctcccttgccccctcactcaccctttccagtctttgttatctatttttacactttctacctccatgtgttcaaattttttttgctcccacatgtaagaaagaacatggaatatttgtctttttgtgcctggcttacttcacttaatataatgactttcagttccatccatgttgctgcaaatgacaggattttgttttcttatggcttaatagtactccgttgtgtatatataacaccttttctttatccattcatctgttgatggacacagaatgattccatatctttgctaggatccttctgaaacaacaaatgtcaccaccacacaaggaccatttctgacaccccccttgaagtagcaactctctcctctttcacttttatcacattcagcctgttgacctgtttattgtcagccactcacctcttattacatgagttccttgaggacgggaaccttcacctagttaaagaaaaaaatcgttgacacttgtttttaaaaagcgataaggaagacattttattccagactattgcaataggggaattgcaataagggagacagatcaggttcaactctaactacaacaaggacaggtggggatttatagccaatgagtagagggagggatgtcactggatagaaaattactaagaggagacatcaagggtagggtgattcttaccaaactgatctaagaagattcttgctgaagacaggccaaagacttagacatcaagttagaggatgaagaacttgatcttctcaaaagtaaggaatggagaagagattttaagggtgagagattctctctaaacatacttagcaagattcttgctataactgagctgggaagaccaaagacaggatgggggccatggtccaggtctagctgagaagagggctcagagaaccatgactaaaagtttggtgatggagagaatcttcattaatttcttgttcttttctgtatctctaaagtcgtactaatcaatagaaatataataagagctacaaattcaagatgaaggcaaatatattatttttttctagtaaccaaattaagcaaaataaaagggaacaggagaaaatacttttaataatatgttttatttaatgcaatatatccaactgttatcatttaagcatataataatttaaaaattattagtgagatattttacatttttttcttatactaaatattgtaaatctaacagtgttttatattcataatacacctcaattcagagtagtcacatttcaagagttcgaaagctacatgtggctgtggctaccagtacaggtctaaaggccagaagcaacttcacacaaggtatataataaatgtttattgaataaataagtgaaagaacaaatgaattaataataaatctattcacagaaatggcaaatttcttccttcaagtgtttacaatattctgtttccaagttctactctggaaacatgtataaatagagtatgcgttgcttgatttgggaagaaatggatattgtaaataataagacaatactgtatcacatctcaaatatcatttaatttttcactcatcctttttctataaatattccaaggtaatgatggaaaaaataataactatgagttttatacgtgaaggcatttatgcaactagaagttttttttgccaattaggtattgttttcatccattaaaaatgtttttcttaaagtataatactacaattttcacacactgtctgcaacaggattattttaagtatctaattttcttttgtttctttcacttcatcactggtgtctatgttgagtacaggtgatggcatttggcattatttattcactacaaaatgtcagggcagtaatagccgggtctttcagctaggaacagtaagacacttagacttactgtgcattgtgtggcttcagaatacttctttcttctattattgttcttccttcatccagtgtgttaaactaaggaaaaaagaagttttttttttctatttaccacgtagtcaggatgtgtctatctaactttctacgtacactgtgaattcatgcagctgtagagctgatctcctctggtacaatctattgtggaagtctcaaaagctgtcattgcttagtcagatcaactaaatacccattaaaacatccaacagtccagaggacttatgaaaatatttatctgttattctgtatatgtcatatatagtttcatttgacatctttataaatccaagtaaaaaggaattagagaactaaaatatactttaaaacaggcaagagattacattttagctccagttgtatgatagcaaaagaatacatctttcattccttttcccctcacaattagatttcttgatagagacataaaaatgtttttgattttactcttgaatttttttggcaagcttaacaaaggccaaatcaatgctaaatcagaggtatttacaacatccacaaatttaatccaaagtggatacttaaaacctcatatagatctaaatgatattctcccagatggtgaattaatgtaattttagcaggaagcaaagttgcacaaatatgcagtattgaggactcgcgctgatttaatgtatctgtgcccaccacggcacagatgttgcttatcattttagtgccagttgtctctatttctctctatactacaaaaggaagaatgagatttggaggttcagtaaattatgatttattttgttactaatgacttgttagaaattaaagctttctgtgaactgtgtattggttatattctttctacagggtttgaaaggtgacttgggtcctcatggtccacctggcccaaaaggagaaaaggtattgtgtttacccagccaagcccaacctttctttaagaaaactctgacaacctatgcagtgacttctcattcatactgtttatctcctaaaagcattctaaaattaaccaaaagctgttaccttaatagcatctgaataagaacagcctttttgttcatttaattagtttgaaaagactaaatgcacaattgctagttgacattagcttgtatttataagatttcccttttctcacccttgcttaacagcatgaggtattcaatcatcaaattagcaagtgtgacctgtattggaaaactttgccaataacactgagctgctgccataatggtgaggcaagtggcttttggaaagaagctagttttgtatctcagtcttaatttaactattccattttctgccactttttctcataaaataagttatttcataatgacatgttggcaatgatcttgaaaaggaaattaagaaataggaaaaagcaagggttgttttgaataaagtagttgggtgatcccagtttgatgaaaattgtatgtatatgtgttttgcaatgcattttgttctccatttttagcacatttagaaatccttgtctatcttcaatatttatctctgtgttaaaggtgatcctgcaaatgagtccccagtgactgatttaagccacttcagtgttcccttagcaactgttggctattttaattcaattgttccaaaaaacaatgaatacacaatgctaagttttaacttctgaggtggctatattggttgagaaaagagaaagtcctaaagatactcaatgtgagactacagcatcctggtaccccacgctatacagtacagggcttccataatgtgcagctaaataagaaccgtggaaaggatgcgtggtctttaatgtttgagagttcttaagaaataaataaagttcctgggaaagtaaacatgaaggtgacatagaaattggaaaatagtgaacttttagatgaaccattttttaaagatgttgaatagtttgttgatatatccacctggaaatttgtattcacatagatcagcaaagcaattttagcgttcagaaatacataaatataggcaaagcctcttacagttgatggcaaatgcaatgccaattcagcagagctttagaagaggccatgggactgcttcttgcagctgggaagcatgaaatggggagatccacttattatttctgctgatcttcatactaactttgtcagacaaattatctatcgccgtgacacttcccagctgcttcattggcaagtaaacatacttgaaaatatattatttctaattttggattagtagacaaaagaatagaaaattagattattttcgctttcaaaacaagtcctgctgttgcaaaaagcatagagtatacaaggtgatttttatatcatgaaagctaaaagggacatgatatattttctttatgcagagacttttatcaggatgaagttctatttttctattcttcaagatttatctctatatattgcttctatccacctagaaatttataaataatgtgcaaaaagggactagtggtaattgtagcttttctttaatctattttagggagatacaggacccccaggaccaccagccttacctgtaagtattcttgaaatcaaaattcaaaattgaaatccattattctgtttattatccatattacatcatgactaaaccagaatttaagtcacagagttaagaattgaaggtgacttcgagtacatgtagtcaaacctccacattttaaagatggggcatctgcccacaacagtgaaatatctgacccaaggtcatacaggtagttacaattaaagtctggaatcagtacctaccctgagcaatttcctctatcctccatatggctcataattttgtctcctaaatgtttgattatgcactcttaacatcaggtttaatgtaaatggaatcagatacagtcctacttgctttaaaaactgtaaaaggacaaaacaaactctaatcacccagtgaataaaaacagctacctatttaaactggtaattacattctcccaacactttccaaaatcattgttattttcctctatgatttgattctaaaatttgcagatgataaaattgcaatattttagtgacagatttatgagaaaagtttatagtgtgcacataatgagattgttctcaatcaaatggtacatcatgtattaagcactttataataaatatatgattctcttatattcagatacaatttactattacagacttttttcataggtgattaaagattcttatttaacttaaataagactctaagcctaatggaaaagaggacagttttgttttgttttttttaaaaaagatcttctatagcctgaagtcttttgaattttatgttgatgttacctagtgagataaattaagcatttaaatcagtagtattcgaagacctattctgattatagaaggtcagatttttaaaagtattctagtaatctgaatggagcccttcccataggtagaacataggaatctcaaaaactgtgtgattttgataatatttatatttatctttgtacttaaaaatcccattatgaaaaatacattaataatgtcttacacaaataattgttacaactcccacataaacaaatgttttttgatatgtggaaaacctaaggaactaaatagataacttacttggggataactcattcaatttgcagtggaagtttatgctttaagcttttattttaagcatgaaaagaaagactatttttttgagaggaggttttaagtgcatattattcagttttttatactttgtagaattttattttattttattttttgagacagagtcttgctctgtcacccaggctggagtacagtggcacgatctcggctcactgcaacctccgcctcccgggttcaagcgattctcctgcctcagcctcctgagtagctgggactacaggcacctgccaccatgcccggctaatttttgtatgtttagtagagacaggttttcaccatattgatcaggctggtctggaactcctgacctcaggtgatccgcccacttcggcctcccaaagtgctgggattacaggcttgagccactgtgcccagccttacactttgtagaattaaaaaaaaaaaattatttagcagtgatttagttaaacctgctctttttacttaggacagatgcctgtttctctttaactaagttacatgcagtcatttagttaaacctgctcattttatgtaagacacatgcctgtttttcttcaactaagttatatattcaactactcagttatctgatttcattgtcattttcaactcatgttggaagactgatatgcaatctacatatattatttcgcctgaaatacaattttggcttctcaatcagaaaattgtattggattacatatattttgtggatgtttaatagcagctagcttctttctgccaaggaacaccttgaagatacctctctgcaccaattcatctgtcaagcacttagagattacaagctaatttcatacttgtctaaaaatacgacaaggaaaaaacactatgaaatgaaatgttttatttcataaagtaaaatattcatattattggggtattactattttgtatgcttgacattactttctttattaatataaattatcaactcttccctacaaaatagggataaactaaaatgaataccaacttacaatacactaaatatttaattgatcttataatacaggttggtacattattagttgaaataatttataatagtctttgaggaagcccaaatgactaactgcgttatatttggattaaatgaggcagtgatatattggagtcaataaacagagttcatccataattgttctcaaaactagctccacgctaaaatctactgaagagttaaaaaacttaaccaatattggggctccacccccagaaattccaattcaatcaacctgatgtgggaccagtatattttaaaagctccccgagtggatctaaatatgcagcaagagttgagaaccattatttatgggaactagaatggaaaaagctttcttcctactcaaaaaaattatatcagattgttgaagaagtccaacttccatttgaaatccaacttaatacatagcgataaagaactatctctttccgttagggaggcatactagtaaaatgaagttaagattgaaccctgcttcattaaatggagagaattagggctaggaagatacctttaattacaaccttcatctaaatgtccatgtactcctgtggcttgggtgcctttcatgcttcttaaaatttaatgtatgtaggaacactcagggtcttgttcaaatgcatatttttattcctaagtctgaggtgagatctgagcttctacatttctagcaagccccaagggagtcagatactactggttgttgcactacactggtcacaaaggcttagcaccctcttcccagttagctgccttttcccatagatcaatggttctctgtcgcatcctggccaacatggtgaaaccctgtctctactaaaaattagctgggcatggtggtgtgtgcctgtagtctcagctacttgggaggctgagtcaggggaattgctcgaacccgggaggcggttgcagtgagccgagatcgcgccactgcactccagcccagctggagacagagcaagactccgtctgaaaaaaaaaaaaagattaatggttctctatcttgactgcacattggaattacccaaggtgctttaaaaattctaattcccagactgtaccacataccaataaagccagaatctccagggagggactcaggcaacagttgtttgagatttttcccaagcagttctaatgtgcaggcacgctcgagaactaaggctctgaaagcatgtctaatacttttctttacagctttctcttacagatcttgagcaaacattttggaattactcattacactagtatttatatcaaaaacacccaacctgattactttcaggagcttccaggagaggccagccttcctagtcatacctacaatttgcttcctgattacttcattatagaggatagatgaacgtccatctccacatttacaagctactagcaagtccaacagtaatccttcttgagaaggacaacaagcattgacaacttcaggacacagaattccagaaattctcaaagcacacacagctgaactgcccagaataactaagggcgaagagctgaacactttttccccctctaagccatacattctatatttgctttacttttattcatattttgtttaataagaaattaagagaaatagtaattgagcacactgtaatactgagtttactgatgcaggggcaatcctttatgatgtttttggggaagtattgttttttttttttttcttttgagacagggtctcactctgttgcccaggctgaagtgcagtagccccatcacagctcactgcagccttgacctcatgggcttacgtgatccacccacttcagcctcccaagtagcagggactacagacggttggcactatgcccagctaattttttttttttttttaacaaagacaaagtcttgctatgttgcctaggctggtcttaaactcctgagctcaagtgatcctcctcccttggcctcccaaagtgttggaattataggcaggaaccactgagtccagctgggattatgtttattgctgttatttttgtgtccctgtggattcttgtgcttttggtacttaaattttttttaatcacatagaaccagttcatcaaaaaaaatctgatatgtaaaaccatctatttcattaaatgttacttttgttgcttatttatactttcttttataactcgttgagtctgtatataattgggtctcagtggaagagagagaataaagaagtgagggtgaccaagtttaaaaaggagtaggaaaggtaaaattgaggaaatggcgtgaaacacagactggagtcctagaaacagtttgatttgctaggttcagctacaatagcttttaccctttatttcacctctcccttcctatcacctgaaagtattcttactgccagtgaccagtgcttcctcactctctaatatataagaaacctattaataagaaagccaaccaaaatggtgctgcagtttcaaatgcagtttgcaatatacccctttattatttcaggaaatgggaccccattcaaaattccacagttgaatccctttgataacgtttgaatccttctatagattcatgttcacgggtcatatggaaaatactccaatgtgactgccttggagaaaagaaaaggaaaaaaaataataagagaaatctgaggcctgtaaaaatgtcatggagattaaagtgatatttatggcattaattgtcacttacatcctttaacctttaaatattctgtcaatctacttgacttgataaaaatagaattatactttttgatatgacgttaataaacttgcaaatcttattttgtagactttccagattattctaacaataaaagatattgaaattcaagaacaaatttgtgaatctgtaagtggaacatctggaaactattttgtaaaacagtgtccaagaggcttcccttaatactttttttaaacaaaatttcatatagagatacggaaaaaaagaaatgaaacactttcagcccagaaggtgggaatgtggttgaattacacacacaaaaaagaaagactaaaaatccatggttgccaccataaacccaccttcatgtatctcttgctaggaatattttcagcaaatacagctagttgaaaataaaaaatttaatgaaatatctgatttcttttcagccactttttggaagataccaaattcactaattagtttggtactaacaactattttgttaacacaataagccattatagaaacttataataattttaaagttctaaagaaataaatatgagattcttcaacttgatttaaattaattaactgattattccacccttatcctttttatatttcaaactgataaccattttaaaaatagcacatcttgttagattttaagtaataataatataaataataaatggtagacatttattcagtgctatgtattgtttaaaccaaaccttaaacaaccctgtgaggtataaaatgattattactacatcgtacataagggaactgaggatgggaatatctaagtaaattgtccaaggttcacagatgttacataacagagctaatattcaactgcccatttggctgactcttaaaacctaagctattaaattctgcaagcattatttaaatctagtttaaaaaattataaaaaaaacagaaatgttctaaactattgcaaaaattaaaatttttaaatcaggtcaggcatggtggctcatacctctaatcccagcactttgggaggccaaggcaggcagatcacttgaggtgaggagtttgagaccagcctggtcaacatggcaaaacctcatctctactacaaataaaaaaataaaagtaaaaaaaaaatagccggatttggtgatggatgcctgtaatcccagctactcagggaggctaagtgggagaattgcctaaacccaggaggaggttgcagtgagctgagattgcaccgctgcactccagcctaggtgacatagcaagactctgtctcaaataaaataaaataaaataaaattttatcttgaagccaaaattcagaaaaattcaagtgcctagcagagatggggtggaaatgtaaatgtgcgatgcagcccagtgtaagataatagagtgtgcttggggttagggaccaggatagctatgtttatctcaaagtatcaaattcgaattaaaaactacttagagattgcctaatgcagaatataggcatactttggagatattacaggttcggttccgtaccactgcaataaagcaagtcaccaattttttttgcttttccaatgtatataaaagttatgtttatattataccatgtcctataaaatgtgcaatttatattatgcaaaaacaattttacacattttaattaaaaaatactttattgctaaaaaatgctaatgatcatctgagccttcagtgagttgtaatctttttgctgtggagggtcttgcctccatattgatggctgctatctgatcagggtggtggttattgaaggttggggtggctgtggtaatttcctaaaataagacaaaaatgaagtttgccaccttaattgacttttcctttcatgaaagatttctctgtagcatgtgatgctgtttagtagcattttacccacagaacttcttttgaaattggagtcaatcctctcaaatgctgctgttactttatcaactaaatatatataatatttcaaatcttccttgtcatttcaacaatgtttgcagcattttcaccaggagtagatttcatctcagaaaaacattttctttgttcacccataagaagcaactcctcacttattcaagcttaccatgagagtgcagcaattcagccacatcttcaggcttcacttctaattctagttctcttgctatttctaccacatctgcagttacttcctccaattacatcttaaacccctcagagtcatccgtggggtttggaatcaacctcttccaaattcctgttaatgttgagattttgacctcctctgtgaatcacaaatgcctttaatggcatgtagaatgttgtttttcaatttattttgcccaggttcatcagaggaagcactatctatgcagctatagccttacaaaatgtatttcttcttcttttttttttttttttgagaaggagtctcgctctgtcgcccagactggagtgaagtggcgcgatctcggctcactgcaagctccgcctctcgggttcacgccattctcctgcctcagcctctggagtagctgggactacaggcgcccaccactatgcctggctaatttttttgtacttttagtagagacagggtttcaccatgttagccaggatggtctcgatctcctgacctcgtgatctgcccgtctcggcctcccaaagtgctgggattacaggcgtgagccaccgcgcccggccacaaaatgtatttcttaaataataagtcttgaaagtcaaaattactccttcacccatgggctgaagaatggatattgtgttagcaggcatgaaaacgacattcgtctccttgtacatcaccatcagagcccttgggttaccagatgcgttgtcaatgagcaggaatattttgaaagaaatatttttttctaagcagtggtatcaacagtgggcttcttcagtaaaccatgctataagcagatgtgctgtcatccaggctttgtcattccgcttatagagcacaggcagggtaaatgtagcataactcttaagggccctaggattttcagaatgaggattggctttaccttaaagtcacaaactgtattatcccctaactagagagttagtctttcctgtgaagctttgaagtcaggcattgacttttcctctccagctatgaaagtcttagatggcatcttaactgctttgttgacattgaaaactcgttgcgtggtgtggttaccttcattgaagatcttggataacttgctgcagcttctagatcagcacttaatgcttcactttgtacttttatattctggagacggcttctttccttaaacatcatgaaccaacttctgctagcttcaaacttttcttctgcagcttcctcacctctctcagccttcacagaattaagaggcaagggcttgctctggattaggctttgatttaagggaatgttgtggtttaagggaatttgtggctatttgggtcttttatccagatctttaagtctttcttcatatcagcaatatggctgttttgctttcttatcatttgtgtattcactatagtagcacatttaatttccttcaagaagtttttctttgcattcacaagttggttgtttgtctggagggacctggcttttgcattcacaactcggctgtttggctggagggacctagcttttggtgtatctcagctttcagtacactttcctcactaagtttaatcatttttagcttttaattgaaaatgagagatgcgcaactcttcctttcattcgaacacttgaggccattgtatggttattaattgacctaatttcaatattgttgttccttaggaaatagggttgcccaagtagagggagagagacagagaaatggctagtcagtggagcagtcagaacatacattctctctctcttccctttctgaaatgccagtggcagatatgttagatttttgataatgtccctcttgtccataaaactctgttcatttttttcccatctaattccatcttcttgggaatggatcatttccaataagcccttatcaatcttactcttgctttgttaatttccattctgctgttaagactatcatgtgaattttttagtatagatactatatttttaagctagtgaagtttattttatattaaatagtgtctatttctctgctgttatttcctatcttttcattcattatgagcatgttttccttcctgtccttgggaatacttttaatagctactttaaaatctttccaggcacggtggctcacacctgtaatcccagcactttaggaggccgaggtgggcggatcacctgaggttgggagtttgagaccagcctgaccaaaatggagaaatgccatctcaactaaaaatagaaaaattagccaggcatggtggtgcatgcctgtaaccctagctacttgggaggctgaggcaggagaatcacttgaaactgggaggtggaggttgtggtgagccaaaacataccatggcactccagcctgggcaacaagagcgagactctgtctcaaaaaaaaaaaaaaaaaaaaaaactttctccgatcattctgtcatctgagtaatatcaagtagttctttgttgattgtcttttctccttagaatgggttatgttttggtgcttacttgtatggcaagtaattttttattgtattttggatactatgaatggtaagttacaggaactctgaattccattttttctgaagagctttaatatatttttaaggcaggcagttaaattggcttgactcgcatagcaaactctgtttctcctacagctggcaacagctgaaatccgttttgttcttttaagctaagctgagctacttgcagtttgcactgtgtatgtttggttaggagtcagccagagatttggggagagcttatacgcagaattttggacttccttacttatttcaggatttgacaaaccaaccccactttactttacaggaattgcatttgccctaaactctgtcctcagatttttcaatccagcaagtctgtaggctttctatttagctaacccatgacccagacttgagcctgtcctcagactaaacatcttaaaaacagaaaactgactccatgctgtttaatttttccaaatgttgactcccctccagtatctgcctgcttttgatgagtttccagtgtcttcaggtagttgttctacatgttgttcagtatttatagttgctatctgtgagcatgttgatttaatataactactgggccatcctggaagcccatttttgtaatacaatgctgagtaacttataatttacttagatatcttgctcctgtaaacataagtgagttagccttcacatttctttacttattctattgaccttgccttcaaaaaatatctagaatctgaccaattctcacacctctgctattactacttggtcctagttaccattataaatctcttgattttttcagtagccaattaatggtctccctccttctccccttgctcttcttgcgtgatttacacaagaagccagaatgttccttgtcactcttcttttcggaatctccagtgtttccccaggtaattaaataaaacccaaattccatacaatggcctacaaagtcttacaggattcaactctcattgcatttctgacttcatctcattttcttctctttctttctgattttactccacaacaaagtaatttttccagaaaattatccaatattcaatttttttttaatgcagagtgctggccaattagaataaatggattgttctgattcagtgcactggtgctgtttgtattttcaggcttacagtgaagaatgaatgactattaagttttaattcctgtgatttgtctaatgattatgatacaaagtttaaattaaaatgtctttaatctatagttgtagattttaccatgtcttgccttattcattttttcatttctcagcaacttgttaaactcatagatggtaaaatttagcattctaatcataaaaatgtgaaataacttgctataaatttgagacttatggtttcaacagcacaaatgaagccaaatacagtcaaataatgcagtgattcagctgaaattctctaagcaactgggttattaacaacaaagaaaaattcccttataaatatgtttttcatatatatgtaccaactttttgaaattccacgttttaaaaatatcaccaaatcacattttttcaaaaggtatttgggttctaccacatctggaatggccatattgctaatatcattgtcacgtattgagttgcagtaatgatggattagaaaaggcacttttgaataacctgttaaagaataaaaattccttttctaaattatttaaaataaatatgttaacaaaactatattcagaatcagcattttttaagatactgtattctgattgtgagaaaactaaatacttaatgtcaagatgacacttaaccagtgagttactgataaacttaaattatctcttctgttgatatttgtaatttacaaggcagatatacgtgagctaaaaccaatgctgaataagaaaaatgtgtttatcataataagtatacacatttatttgatcaaatataatgtatccaaggtcataatgaaaatctgataaattattctgaaatatgaagatgttgacataaaaatcctctattaaaggtaaatatttcatggtttaatcatgttatttgaaaaattgcattttatattagcttttcctcctcgtgttgaaatattagttgtaaatcattacattcaaatattcaagtacgataagcacaaattctttggttatatgtcatctgttgttaaaaccttaattttatataaatgtagtgtgtctttatatgtaacttcacaaattgtgtatgttctataaccttcctattacatactattgccagattctcctcaattaaataatataatcctgtttttacagtaaagttttactgaaatacattactaaggcttcagaagcaagacagggactatgagtgaaatgagacagttggctaacatctctatctccttttctcttccagtctttgcatgtcatgtcagaggagagacaggtgaaggaaggtagaacagtgctatttcatgtaatatatccactaattttagttcctaggaaaatggctgtgttgctctggccatgtctctttgggaagttattaaatactcatccagatggcaccaaatgtttatgcagaagccaaaggttaagtctgtcaacagcagaagtgccttagacatgcttactaaatgatacttaaataccagttccttggagcccacataaatccagcttcagtgagaaattacgcacagagagggtgcatagcttttactctaagaaaactaccttaaataccataagcaacggagagaaaatctcagctggtcatttataaatcaaatgacattcaattagcagatgcccctaatgcacaagagatcatatagtgttcacataagggaatttttgaaataattatttttctaagttggtatgtacaagaaacaaaaataactgctcagtaagtgatatggtccctttcctcccttcctcttttacccactcatttagttgaatgcttactgtgtgccagatactgtgttaagccctgcagacacagtaacaaacaacaatcattgtcgttgccttcagaaaacctacgtggtttaagaaaaagcaaccaattggttaaagttgatcatttttaaaatgatcgtttgtgaattgtgtataaaaagtttacaagtatttgtacaactgtagttgttcatattatacacagacatctagttatttcagagaaaattattttttaccagaattcttatgttgtaatttaaagttatttacttttggtttgttaaaatcagttaattggaattaatataattctaatcctttttagagaccaatcgttttttagttccatttaatatatcaatataaggcattaccacaaagatttttaaatgcttagaatagaattgaattaaactaattttaatgtagatttatgactgaaataaatacgtgctttgctgcatataatttttcaaaggcttacccattttataattttctgatggcatttagaaaggttcttgttgtatgcccaaagagcgtaattcctctttccattctgactagaattaatatgttctgtagcatatatgtattataaatatttatatgtacatataaatgtatatattatagcatagtaattaacaggctattcaatttaagattattttaaattcctcacatatcaaaatctgagttatttagacactttatgagttgcctaaatttgaatcaacactattagttttctaaagttgcgtaatttgtatttaattcattgttagttttctgaaactagtaatccaacttagtattgggatttctgaggtcctaatctgccagtagaaagaaggcagttgaaatattttaaaaaatcaatccttttttttatttgtgggcaaaagacatgtaagtgaattagttgattaaaatataaggtatttttctacaatacaaagctatttttatctattctgtgaagaaatactggcgagttgatgcttaaagccctggaaatatttatgttttagcctcagggaagatttatgttttggaaaaacttacagttggctcgttcgacatggaggtgatttatatctctttcgttagatgattaatttgagaataactccttctgcccttttgtttatagtttgcttctgtttcaaaaggcattttaaattgttttcatcaaaagtccaaattatgcattttaaacctcaatcagtaaaactttctttcctaaaagtgctatgcattgacaatttgtgacttttacaaaagagttattttatttcatgttgaaatactcagcaatctagaaaaataaattaaaatgtattttaaatgccattagaaaattataagatgggtaagccttttgaaaaattatatgcagcaaagcacgtatttatttcagccataaatctacattaaaatcagtttaattcaattctattctaagcatttaaaaatctttgtggtaatgccttatattgatatattaaatggaactaaaaaatgattggtctctaaaaaggattcgaattatattaattccaattaactgattttaacaaaccaaaaacccatgcagcttagctcaggaattatacagatcaagggaccaggctacctgagtttgaacctaaccatgtttcttgacctttctgtgtcatctataaaatgtgatactaatatttcctattgtatagtgttgtagtgatgattaagtgagttaatatatgtaaagattttagaacaatgcctggcttctagtaaatactatttaactcttagctattgatgttattgttagttaatatgctaaatgtgaatggcaaaaatatcaatagcaatgagcctaaagttctttatgaaataattgctgacaaatgtttatagagaacttttataaaatcacaggatttttatgggtagaattccttcatcttaagaaaactattaactataaactgaattctaagtattccttttataaccagtgtaaacttcatgagaataagaaccttgtctatcttatttacaactgtatccccagagactaaaagtatttgatgtagtataggtactcaataaatatttcttcttcataggtagaggaaacaaatattttttactgacaaacaaattattaaagtaaaatatcacccaatcctacagtgaaaatatctacagaaaactataacatcacttacttggatatcataatgaggaggagattccctctttccagctaccaaacctaattaatttaggacaggtggtcaccttctcccatattaaaaattttcagcaataacaatattaatgtcacttactacccctgattatttttgatcaatttgaaagtcacgctttttgtgagaaacaggaattatctctttaagactcctattatctgttcattattctgcagacatgaacaaaagctttatatagcttaatccattactaaagtcatattttgcaaaatagagaaacactggatgtaaggccaggaaaccagattctatccttaaatatgaactattttgatttatttagttattttagcttgggcatatcacttagtaatatgtaagggtcaaacaggatgttgttaaggtcattttcaactctaaaattctgttattttctcttttacctttcctaaggaattcaatttcctttagctgtataccatctaatatctatctccttaataatattgttcttttccttaaatcccctctattttatcacattattttaaaaggatagagaataaatgtaaggaatatttaagtcagacacatgcccaatatagagaaaggattagacttaccagtgtcaagaactgtaaaagatatgagattttacccaacttgaataataacaacttagcctgccacagtttcatcaatcctggcagaagacatgaaacttctgagtcagagaaaaaggcattattactcatggcagcaagcagcatgagccttatgtttgttttggttgcccttgcccccaggtaccagaaacaacccaggtaggtgccacatattcagtgggtttgcatcacagcaaagtagggaaggcaaatttttaaaaaatggattgcaggcaaacttgccctttgccaaaagggagactttatctttaacattctaaacagtaagcaaatctatccttgctttgcggcataaacatcctttaaaagatagcccagaacaaaagggtggttagtacctccctcgtaagacatgcagaagcacaaaagcctcatggaaagacccattgtctctcaacaataccatttttcatttctatactgtcttggtgtctggcaaattttttatgagtataccactccattaacagctctgattaatattatcaatagagactgtgaccaaaactattcaatttgtctcatatagcatttaattaaaggctactgttaatagaacgccaagcaagtagatgaggccagcctgcactattgatctcaaccctgtcccccaggattgcaaactcaaacagccgaatagatcccataaatcatccaagtctatcttagaaagccagatgatttgctccctacgtttctgaattggcctttctgcttgatttgaggcattaattcaggaacatcaacaaagacaaggacattttttagaaaactgcaacagactcagtgtgtctccgactttggcccaagtgggcaaccataaggatactgagctaacagtgtactaaaccaagtagtctttatctttttttatttaggaccatgtcaaggaataagaatatccagctggcagagccagaattaagtttgaatcctctagattcccttttggctaggtttctaccctacaggtgtaaagatagttcagaacctagagcagttagtgcctcactcacaagataaatagaaatgcaaaagactcagagcattgttgccaacaaccagctcttgggcattgcatttgtttatgaacaaatattagcaaatgttgctcttttgtttaccacaccatggctaactataccgctgactcattcagcttacaatcagctctagtcccggagtatctttttttctggtgtttttctattcttacttctcttcagtctatactgttgatttttcattccatttcttgtagaatgctgtcctatttcacagccacttcttagtttcctatataatctattctggaaagtttaataccttcatgtatcaaaaatgtcaagggtcactctgtgtcttcactctgataatattgacctgaatccccagtaatggattaagataaagcacattcaaatatatcttattttctaaagatttatttggaagtgcaagtagaatatattagaagtagatagagtttgggggtcagacatacttgctttaagagctcagctccaccatttatttaccatgttatctttagagaattcatcttctcatctataaagggaatgcttctatttcttagagttgttaaaattaaataagatcatatattaaagtaactggtggaattccagacacactagcaggtatgcaatacatatcaattctctatccccttcttaatttactattgtgaatgtgtggaggccatcaaagaatgtattgaaatgatattgaaatgttgcactagggcttccacattttgcttctgtgcaaacatggaagtctttttgtatgttatgcattattattttacttactattatttgcttgttatggttctgtaatatgcactctatatctgagaatataatgaatctcaaattatcttgatttactcaaggacttttttagaaacttgaaaataacattctgattgctccatttcattgaaatattaaaacaccaattgtaatttactttcatgccaactttctagtgactggtaaattgaaaattagggtttttttctgactttgatagattcacaatctgattatttggaagtcacatactacccatgttaccaacccaatagactggaaagtgacactggaacaacctgagcatgtatgtaacacatcataactaatcttattaatgccattagtactgaattggagttacactgacacaaccttaccttatttagtccataaaattaggtagttcgaccgattaaccctgtttctaaaaggttatgtttaaagaaatatttgtatatagacttattttttcattgacctgcaatataattcccatagaaatgaagttagccctcagatgtatttagatatcatatttctaacatttttaacgttcagtcttttttgtcaatataaaaattgccagcatatatttttccatttaacacccacaaattgtgaataaataaacaatgcaactacatttcactttatttagtgcatgtattaccaaaattagccatattgttaattcttaattcatagggagggagatctcacagattttatgaatgaagaattaactataaatatttaaggatccactctggcattttttcaaatgttctgcagaattaacaagacttgttcaatttgtaacatcattctgcctgattctgtcaccaataagtacaaattgagtctaatgacaaaatgataaaaagatattttggccaggtgcagtggctcacgccttaatcccagcactttggaaggccgaggcaggtggattgcctgagatcaggagttcgagaccagcctggttaacctggcaaaactccgtctctactaaaaacacaaaatttagctgtgtgtgatggtgggcatctgtaatcccagctactcgggaggctgaggcaggagaatcacttgaacccaggaggcggaggttgcagtgagctggaattgcgccactgtactccagactgggtgacaagagcgaaactcctctcaaaaacaaacaaacaaaaaagatatttcacatgatatgaatagccattttttgtcatccaaattattaacaaatcactgcaatttcagaaaagcttctgttaacagtaatgacaacttatcatctttgtactttagaataagttgccaggtatgaaaattagggcaattccttactatttcaagtgctaaatttgaatctgtatgtaataagtaaactttgagtattagcttatttgccttaacttgtttaatgttttaaataaaattgtagtacttttcaagtaaattcatttacaggattaaagaatcaaacagtactgttaaaggcttataataaaaaataccatttcaataaatgcattggggacaactacatagcatttgggaaaacacaaatttgggtttgtacatgactactgtgacaatgtaaatatcagatggatcaagattttaaaggtgaaaactaaaccacaaaagtcctaaagaaaacataagaattttaaaaataattaagcataacttttaaaatatattttaaactggaggtataaatagaaaaaagatagtatattttactgcatgagcaaacaactcctatataggggaaaaaataccccactaaactaaatcaattggccagctgggaaaaaatatttacaactcacatcataacaaacaactacatatccaaatatagagagaaattcctccaaatcaatttttttaaatcccaagaagaaagaataatatggcttttaaacatatgaaatagacctaaattcactcatcatttaaaaaatataaagtaaaacacctctgtgatactagttttcgcttataagattggaagtggtcaaaaagtttgatagtacactatgttagcaaatgttgagaaacatacctatacattttagggcaagtaggtatggatataatctttatggagggcaatttgatactgtctgtcaaagtttcactctaggctcattcatttataaaattacacatgtaccaggttgttcatttccatattgcttgtaatagtaaaaaaaaaaaaatagagacaacctagatgtctagctacagatgaatggttaataaagttataaaactttttatttaaacaaatataaaatgttcacattttttggcgtggcctggtggctcatgcttgtaatcccagcaccttggggggctgaggtgggtggaacacctgagatcaggagttcaggaccaacctggccaacatggggaaacctcatctctactaaaaatacaaaaatcagccaagtgtggtggtgggttcctataatcccagctatgcaggaggctgaggcaggagaatcacttgaacttgggaggcagaagttgcactgagccaagatcgtgccactgcactccagcctgggagacagagcaaaactctgtattaaaaaaaaaaaaaaaataaataaaaattcacattttaatgactgtaaatattgtcatgtgcagagctaagtggtgtaccttttctttcttgaatagtttgtcgtttgtttcggtttgttttttttctggcatttctaattctttctactttccctgttattgccttccatatttttcaaattttctcattgagtttcttgttttctgagagtatcattcagacctgctattccatctgttgtagggagctttctaagccatctgcagaattcccattctgtgactacctttatttttttctctgagttgattccactgccgcttgttttccttgtcatctccattcttggttttactccttcgtttatgtgaacatacctttatacaaattatggaaaaaatttgaaaggaaggtacgtcttctgggattttacacatctaaaaatgttttgttttgttttttcactttcacacttgattgatagtttatctgagcatagaattcttgcttgaaaattatttccctaagaattataaagatttttcttgagtgtcttctaacacatgttgctgctgagaagtctaatgcctatggattctttttcctcttgtgctcccaagaagagagaaaacaagaatactttcttctccagaaagtcttcattcaagaaagcagaagggagggacattttctacatttcctttctggttgagtagaactacacttacctctcctccttcacctgtgccgtgtgattcatgattgagccttatgatctatgagagcatctctatgtagtgatgaagcacttgatgtttagacattcttctcataatagagcctactttttcagaccattgtcttgtgtgaactcaacaatccttatactattgcaatcttaatcctcctaagaaaatggatgcttctggcagaaaggaggaaggccagtagaaagaagttaaaaagagacgatacttcaatctatatttttaaaacttaaaaaaaaattattacagcatggagcatttttctcctcttaaacgtttgattttcaacacctcactcaattgcaaattgagtgatattgtataaaccatcttcacagttatcagcattaaatacctaggtctttcatgtagtatgtgagtatttctgtactgatttattttttaagccaaaaattactagattaagtttcccatggtctagtcatttatgttgcataacccaaatgcaaaagttacccatgatattaaatttgaaattacatgtatatcatgctgcccattgttccaaaaacattggaagacattttaaaaccacatatgtatagattgttccttctgtctgcagtagaaccatgttcatgttttcacgtggccactgacctttggcaaagccaattcaaaaattcagactattatcatcatcagacaaatcattaaaatggagtcaatcatacacccacttgcataaatcattaagacagatgatacaaatggatttgacagaccatgacctaccaattttttacttgtcaacaaagcttagagttaactgaaataaaaccatttcatttagtaggttactgccaaaatataacaaatctatacaaagtttttcatagtcaagaataatttaaaagacaaaattaccaaaatatgaatgtgcttatgataaataagtgctagtaaacccagaataattaccaaagctaaaactacaccattaaaaatgatataagcattttaaataacttgattgtttctatttttagtagttaatggtttgtatagatactttaatctcttctgttcatgttgttttttcagaaaataagtacttaatcctaatcaatgtgagataaattaaggaacgcaggttatatttcttcttttaatgaagggcaaactcctccagatgtaagcatagcatctatttgcagtactgccacataagaagtaaaaatagcttggattattttggtatcaagtaggatttgtagatgaagaatattatctaaattggattttccatagctatggcagttaatattctaactgctgcagaagtaccaagagaaatgcaaagaatcagaatcttagcagtcattcatccattcgacacctactaactgcaaggcacactgctggataatatgcagtatggaaagtgaggacatacacaacttaaaaaatggaaagtctcataataggagcaaaaattattgttagaagagtgcttatgagaagtacagatatcacaacatcattccagattcacagactctatgttctattattcaattaaaaatgtttttagctttattggcttaaacaatagcgacagagaacaagttatttcaggacctatataataaaaagataagttttctgagttcaaaaaacatgggaaaagattatgattaaaatatattcctgcaaccacatggaacgatcatatttcattgtgtcccatgtctgaaatgattccaggtctccatatgaaattgttaagttttaaaagcactatgtgtaacctctaatttttaaatttttgaaggcaggataaaattgttcacccagttagggaactggtttactacaattggtaatgattgaatcattcttgtccaccctaatatttcacgagattttctttctagcacagctcttcctattctctcttatcagtgcttccggggagatttgtcaaggcctttattagtgtgtggaagagacgctagtgttccttgtttcacagatatctatttcctagtacacactgactactgattttgataaaatgataggcttttatacaaacatagaattccttttctaaacacttgtgcacccttaggaaaatttttttcttatgataattggataaaataacataacataaagctggtcaccctctaatttattaacataaacattcttaaattctacttctcagaactaatgtaaaagtcacttcctttctggctgctctagaggttaaaaaaaattatggcactaatagagaagtgaggaaagttaaaattaaaaaaaagaaaaattacttcttgagagtggactatatattatatttttacttatttgcttttttcttttataaaactcatttcctatcctagaacaattcattttcaagagaagaaagtgcacgtataaaacaaaatttcattccgatgtccccaacttaaaactttattcctgttattcccatgttaaaggcacaaaattttctgtaaaaacagataaattctgttttccattttattttcatacattctatttgaaacacagaaaatcccctagtagtagtttagaatttatgcagattctagttaatcttatgtttcaagtctatgaagcatattctaaagcaataatcataacacttaaaatacacttgcataacatttttgttgaagtgggtattaggtatcatatgcactgcaacattcctggcaagggagtgcatgtaatactttaaaatgaaacttccctttttcacttcagctccttttcttgattaagaagctgtaaatgtatcttgcctcttttcacaaatgaaaatgtgttcaaacgtaattaatctaccctattaactctacaaaacatctgctatatttgttaaacacttcaaacttctgttctgaaccagttaattctaagtaatttctcagttaaatatttacatgggcttccatgatgataagctctagcttgtcttaaataatcagcagattgtccagagagagctgtgtgaaatgtaacacattgtaatagctatccactggaacttaaaatggttagctggcttggactattttttgcttatttttatcttagccaaaagaggtaacagccttatgaattccattctttgtcaatatttttaatgtccagaattgtgttaaacggaaaatgaatacctatgtagacctatgcagatgtttaccttgtgaaaatgctaaatccaatctcaaatgtctctttcagaaaagtgataaatctgtatgtgtgcaaaattttagaaataactcaatttacagttatttttatagcagactaagtaaattaaaaagtagaaaacattgataggcatttttcatcagcaaattaaattgaagaagaaaaaaaatccacaggctatgcaaatgtgtggtgtgtacaaagataattaagactatgattctctaactgcacaaattatataaatctgtaaaatatcaggttttggtcaaaaattggaataagttccacaacagagatgctgttacaatggtaaatgattaatttgtaaatgaactataaggcaatttttctcatagacatcagagaatagaatgatcacttcagactgaggaagacagacaagattgaaagttctccaatgtggtaattaagtccaagttttgaaaataaaaatgattatataaagagcagatgccagttctccaacaccaacactcagtattgttctaactaggtgttttcttctttacaatatgccaaatgtttattgagttccttctataagtattgtagaggttagaaaaaaatgagcctgtatcctctacagcaggggtccccaacccccgggaaaaggaccagtaccagttcgcagcctgttaggaaccggaccacatagcaggaggtgagtggtgggcaagtgagcaagcttcatctgtatctacagccactccccattgctcacgttactgcctgagctccacctcctgtcagatcagtggctgcattagattctcataagagcatgaaccctattgtgaactgtgcacatgagggatctaggttgcgtgctgcttatgagaatctactgcctgatgatctgtcactgtctcccatcacccctagaagggaccgtctagttgcaggaaaacaagctcaggactctcactgattccacattacggtgagtgtataattatttcattatatattacagtgtaataataatagaaataaagtgcacaaaaaaatataatgtgcttgaatcatcctgaaaccatgcccccatcagggttcatggaaaaattgtcttccacaaaacttgtccttggtgctgaaaaggttggggaccgatgctctagagctcacagtcaactaaaaggataaatgaagcacacacataatgacctttacaaaaccagaataaggaagaactgtgggagggattctgagacaaatgctgagctctatccaagttcaatttacataaactggaggttaagtatgtctgtaattttcataataagtgatcgataaatccactgtttgactttactaaatgggaggaacagtgtcctggatcattataaataatcctcccagaattttaatttgttagtttgggaatagatattatttttctacagttgattgatctgtgttttactaatgataatattaaaattatttttgctttgtcaatttcaactaatgttcaatactcttctcaaaatgttctgaagattaggagagcatggctagaattacaaattggtcttggatcattcaaagagtgaatgattcatcaaggattaaaaaagaatttcctcaacttctaatcaaacccatagctgggtcctagacttagcaaaactgtggaggaggagatcagagtcatggtaacatctaggaggcccgtaagtgatttatgtatgtgagtttgtaccatatcttagtacttgagtctcgcatacaaaagattatcataaatattttttgcgtttgttaaatacattccaaatcaaatattatatccttgcattaggtagactttgctacataatttctttaaatagtaaagggagtagatttttgattatatgtgtctcagaattaagtgaactccctgatgtgtatgttttagtaactcatgtttaaaaacactgaatgagctgtcagcatttggatgaatatcaaaaatgttatatattagtttgactattcatgaaattataatagttttcctaaggataagagagaagagtttaatctagagccaagatcgtgtcaggcttataaaaaaatgacacaacctccctgcaattatattgtaattaatacttgttatatttgaatttcaaaatttgtttttcttataaacactaggaatttgccattttaaagttggcctaattatccaacattacttgattatatatcatttggcaggttttgttgtttttttgtttttaactacaaacagaactgattagtttttttcccttttttttcctacctaaatcaataaaacatagactccatatgcccctgtaacattaaattgctcccaaagtagataaaagaaatgagagtgataaatacataaatttcattcaactgttgtggagaaggagtaacaaagatttgggggaacagtgagaactgatgacatatgcagaattttttgtactaacactttaaaaaaattagttacaataatttatactgaactctgagaatattaatcaaatgaaagccatctgatttaaaaattaaaatacgtatattacttttttattcaaaataaaattagatggtgaaattaagcatgtatgacattcatgaaaatttagtaataaaataatttacagacaggcaaatgctgagagattttgtcaccaccaggcctgccctacaagagctcctgaaggaagcactaaacatggaaaggaacaactggtaacggccactgcaaaaacatgccaaattgtaaagaccatcaagtctaggaagaaactgcatcaactaacgagcaaaataaccagctaacatcataatgacaggatcaaattcacacgtaacaatattaaccttaaatgtaaatggcctaaatgctccaattaaaagacacagactggcaaattggataaagagtcaagacccatcagtgtgctgtattcaggaaacctatctcatctgcagagacacacataggctcaaaataaagggatggaggaagatctaccaagcaaatggaaaacaaaaaaaggcaggggttgcaatcctagtctctgataaaacagactttaaaccaacaaagatcaaaagagacaaagaaggccattacataatggtaaagggatcaattcaacaagaagagctaactatcctaaatatatatgcacccaatacaggagcacccagattcataaagcaagtccttagagacctacaaagagccttagactcccatacagtaataatgggagactttaacaccccactgtcaacattagacagatgaatgagacagaaagttaacaaggatatccagaaattgaattcagctctgcaccaagcagacctaatacacatctacagaactctccaccccaaatcaacagaatatacatttttttcagcaccacactgcacctattccaaaattgaccacatagttggaagtaaagcactcctcagcaaatgtaaaagaacagaaatcacaacaaactgtctctcagaccacagtgcaatcaaactagaactcaggattaagaaactcactcaaaaccgctcaactacatggaaactgaacaacctgctcctgaatgactgctgggtacataatgaaatgaagacagaaataaagatgttctttgaaaccaacgagaacaaagacacaacataccagaatctctgggacacatttaaagcagtgtgtagagggaaatttatagcactaaatgcccacaagagaaagcaggaaagatctaaaattgacaccccaacatcgcaattaaaagaactagagaagcaagagcaaacacattcaaaagctagcagaaggcaagaaataactaagatcagagcagaactgaaggagatagagacacaaaaaacccttcaaaaaattaatgaatccaggagctggttttttgaaaagatcaacagaattgatagaccgctagcaagactaataaagaagagagaagaatcaaatagatgcaataaaaaatgataaaggggatatcaccactgatcccacagaaatacaaactaccataagagaatactataaacacctctatggaaataaactagaaaatctagaagaaatggataaactcctcgacacatacaccctcccaagactaaaccaggaagaagttgaatctcttaatagaccaataataggctctgaaattgaggcaataattaatagcttaccaaccaaaaagagtccaggaccagatggattcacagccgaattctaccagaggtacaaggaggagctggtaccattccttctgaaactactccaatcaatagaaaaagagagaatcctccctaactcattttatgaggacagcatcatcctgataccaaagcctggcagagacacaacaaaaaaagagaattttagaccaatatcccagatgaacatcaatgccaaaatcctcaataaagtactggaaaaccgaatccagcagcacatcaaaaagcttatccaccatgatcaagtgggcttcatccctgggatgcaaggctggtttaacacacacaaatcatataaacagaaccaaagacaaaaaccacatgattatctcaacagatgcagaaaaggcctttgacaaaattcaacagcccttcatgctaaaaactctcaataaattaggtattgatgggacgtatctcaaaataataagagctatttatgacaaacccacagccaatatcatactggatgggcaaaaactggaagcattccctttgaaaactggcacaagacagggatgccctccttcaccactcctattcaacatagtgttggaagttctggccagggcaatcaggcaggagaaggaaataaagggtattcaattaggaaaagaggaagtcaaattgtccctgtttgcagatgacatgattgtatatctagaaaaccccatcgtctcagcccaaaatctccttaagttgataagcaacttcagcaaagtctcaggatacaaaatgtgcaaaaatcacaagcattcttatacaccaataacaaacaaacagagagccaaatcatgagtgaactcccattcacaattgcttcaaacagaataaaatacctaggaatccaacttacaagggatgtgaaggacctcttcaaggagaactacaaaccactgctcaacgaaataaaagaggacacaaacaaatgggagaacattcaatgctcatggagaggaagaatcaatatcatgaaaatggccatactgcccaaggtaatttatagattcaatgcaatctccatcaagctaccaatgagtttcttcacagaattggaaaaaactactttaaagttcgtatggaaccaaaaaagagccagcattgccaagtcaatcctaagccaaaagaacaaagctggaggcatcatgctacctaacttcagactctactacaaggctacagtaaccaaaacagcatgatactggtaccaaaacagagatatagaccaacggaacagaacagagccctcagaaataataccacacatctacaactatctgatctttgacaaacctgacaaaaacaagaaatggggaaaggattccctatttaacaaatggtgctgggaaaacgggctagccgtatgtagaaagctgaaactgggtcccttccttacaccttacataaaaattaattcaagatggattaaagacttaaatgttagacctaaaaccataaaaaccctagaagaaaacctaggcaataccattcaggatataggcatgggcaaggacttcatgtctaaaacaccaaaagcaatggcaacaaaagccaaaattgacaaatgggatctaattaaactaaagagcttctgcacagcaaaagaaactgccatcagagtgaacaggcaacctacagaatgggagaaaatttttgcagtctacttatctgacaaagggctaatatccagaatctacaaagaactcaaacaaatttacaagaaaaaaacaaacaaccccatcaaaaagtgggcaaagggtatgtacagacacttctcaaaagaagatatttatgcagccaacagacacatgaaaaaatgctcatcatcactggccatcagagaaatgcaaatcaaaaccacaatgagatattatctcacaccagttagaatggcaatcattaaaaagtcaggtgctggagaggatgtggagaaataggaacacttttacactgttggtgggactgtaaactagttcaaccattgtggaagacaatgcagcgattcctcagggatctagaactagaaataccatttgacccagccataccattactgggtatatacccaaaggaatataattcatgctgctataaagacacatgcacacgtatgtttattgcagcactgctcacaatagcaaagacttggaaccaacccaaatgtccaacagtgatagactggattaagaaaatgtggcacatatacaccatggaatactatgcagccataaaaaaggatgagttcatgtcctttgtagggatatggatgaagctggaaaccatcattctcagcaaactatcacaaggacaaaaaaacaaacaccacatgttctcactcataggtgggaattgagcaatgagaacacatggacacaggaaggggaacatcacacctgggtcctgttgtggggtggggggagtggggagggatagcattgggagatatacctaatgtaaataatgagttaatgggtgcagcacaccaacatggcacatgtatacatatgtaacaaacctgcacgttgtgcacatgtaccctagaacttaaagtataataaaactatatatatataaaagaaaatttagtttatatgaaaaaaattaaaaatgaatatatacataataagtaactatggatcatgataagtacatctggccttttagtttcaacgtagccatcactttttagaaaaaggtcatattataaaaatgaatgttaattatttttaaattagataacaaaagaatttcttctggaataaggggaataaatttacatttatttgcatttgtattatcagatttttcatttatttcaaaccatttaaggcatttaatagatgatgggtgaattataaatatttggaaaactttttgaaaattactgcctttatccaaaaacttttattggagtggatgagttccccatgtgaattgtcatttggccagtaacaggcacataccgtgatgaataaaatatagattctgttatagattagagcctggtgagagtaacaaatcattacatgaataatcacttaaatgaattagtggtaagtacttgagagaaaaagtgcaaggcactaggagactgaaacaaggcattgtctccaagtggtacatcagggaagatcaagcctggttttcttaagatcagtttggctgtgatgtgaatggatggaggaatgtgtagcttcaactaggaagctcttacagatgagcaagaatatgggagcagcaggagtggagagaaatggatgaatccaaacgtatcttgtagataaagccaacaagattttgtaactgtatgtgagagagaagtttaagagagttgaatgtggagaatgagttctagatttctggcatgagcatgaagagagtgtggtatggatttattgatttggggcatggtggaagaggatccagttctggagggaggatcctgagttcagcatttgatggggtaaactgtggatgcctgtgaggtagcagtggttccatcaagcacgtcgtgggtctgaatgcagctcagagataaactggagttgtagatctgggaattgctggtctagagaatccaaagcccacagatgtgtgagatcaatgtgagagaatgtggactgagaagaaaatgagacaaaaatctcccgcatttaatggttgattagggaagaaagaagcagcaggaaagaagtagtcataactgctgaagttttttttgaatggcaatatcatcatttttaatttcatgtggagtaagaatttctgtctaaaataagaatcaggagacttgactttcagattaatacctgggatttcctaggactttgttatgatctgaaaaaaaaagaatgtttattttccctaccactttatattattacaagaaagcagtaaataatatttttaatattaaaagttcaatgttatgagtaggcatgtttgaagccaacaccataatcatgcatttccttagaatatactttaaaagctactctcaaccaaaaatataattttatttatagagtttaaatgtataaagaggtatctttttctgcttgcaaatattgttaccacttatttatggtggtttgttgaaacatggttccaatcatatgagattcttcactggcggtgaacatttggtctcacacctggtgtgggtctgcctttttttctttctggagttagctacaaagaagccagtcaaagaagggcaattcatcattattaatatattatatagttcaaccttgaaagagctcaaattactttaaaagtttgttttaatcaacaaaataattattaattttcacaacattctttgtgaggcaggtgtacttgaaacagtgtattaacatgtgtctctttttcctcatagggttccctggggatacaaggcccccaaggtccacctggaaaagagggtcagagggtaagtaaagctggaacaactggtgggcattactaacttaggggatacttatttgggaacactaatgaaaatgaaaccgaaatagagcaagcagatgggcatatggagagtatcaattatccaaaggctgaaatttgagattcgagattttgacagaggttttgcaattcagaaaattctatatttttcaagattggcagcacaagtgtagagatattgtttggataaaatgaattagccctaatttgatctacactactttggtcatacttttagtttttgaattaagttgatgagtatctttgtggaggtctagcctatttattaattccataaaggttgtggatattaactacattctttatccaaattaaattattgacttcactggcttttcataactctcctttcattgccatttattgcctttaactgagacaaaatagtaagcaaataaatcatcgttggaattggtagtagagcaataacctcctatttctagtgcagttcaatttcatcattccacagtaaaacgaagccctgcagtgttatgacaactggtcagcttcatatgagcagtggggaccccattcttgtgttttactgttattattatcattttcaaaccattttaaagtctcaaaaaatcttgtgtgttctttctcatgtgcttatttatggcagtctttgtactaaatagtacaggtactgtcaacttctgttcccttgttgatgagcattccatgacttagagtttagatgatgtgcctaaacttgagcttctgactgtagtcctacgttctcttttattattaaccccaaatatgtttcttagacattctcatttattattcccagttctgccttctgtaaaataagtctctttcctcaactacaaatatttgagggtcagtggtgtattgtactaaggtttaccttttatcaagttaataaaattccaattctcttaacttgttctcttatcgtatggattctggactctccaacatgccaataatctttgtcagaaaacactcattggctttccagagttgtcgagaatgagactggatacatgtggtcttacttagggcagagtaaaatgaggcaagtacgccccataccacagacaacatgctactattatggcctaagattgagccaatgctcctttgtctggtattgtacttttgacttgtactacatgtggtcaattaaatgctcctccctttttattttaatgaaaactgctaagtcaggtcttcacccagcccgttgttgtacagttacctttttgaatcacagagtaggaactgatccttgttgttaaatttcatctttattgattttaatccctaatagcattctattctttgggggctttttgcttttaaaaaatgatttgaatcctgttttccagtgaaatatccctcagccttatgctactttaaaatttgataagcctaccttctgtcttcatttaaatcgttaataaatcctgaacagaacagggcctgacaaccctgtgtaacaccagcctaggctaccatcttttccaccattgatgtccttaaagtgtgacaatcaaatcatgtacaaatgtatttgaaccctaccaccttcccacccacatttcttgatttggcttgtaagataattatgacagacttgttagatactgggtgaactgaaaaaatatttaaatgaggctttttagaaataataatgcttcaaattaaaattgtaccctatcaaagcttgcatttcataagaaagtagattaaagaataaattaaacatgtattttccatgataataaagaaggaaatcagttaaattgtaaagttcaaccactattttatgtaaatttactccatttataaatgcgtatagtccagataattttatattacttttatcttctatcaagagtaacataatgtcagaaactaaaaaatgtaatagaacttatagacacttttaggcatagttcgtcattattgctactgctctttcccaaatgccctatttatcaaaagaagtagctagagcaggtattattgacattatccacatttacaaataattatatgcatttggattatatccatatatgctcagtgatttattctactttataagctacttgaatgggaaacaaatgaattttaaaaatgagcgttcttacatatttacatttaggtccaactgagtgccaccatttcttctcagctcaatagttaaggagtactcagctctttcagacatataaatgtatttgtacatgtatgcctgtgtatatacatatgtgtgtatacatacagatgcacattctgaaagctaagaccaataatttttctatttcactaaagtttgcagtagaaaacaatagtgagaaaaatctaggaatttaaaatcatttttatttacccaatgttaaaaacctcttgtattttaattgagtggttgaccaagaaggtattgactatcattaaggctatttaaatgaaacataaaatatgtgaagttttatgtactttattcctagacataatgactttaattaaagcagaacatttaattttaaacaaatcattaacttgttggttttcatcaatgattaaatacgtagtagctactactctaccaatatctcacaattatggtgagtttcaaacatgggtgtcacatttaaacatgctttgaaaaatatcaaacattatagaaacatgttaatattgctattattattatgaaagacataggattctgatcaatgaattctttttctttttctctttaactctttgtgtagtttcctataagcataatagcaacactatttttgcaagtaccacgccaaggttctgtttgaaattttgattagttgattttatttttttaattatcatttaagctgctaaatcttagtttataaagtgttcatttaataaaatgtagaagtaatgtgcttcttacacttaaaagctattcttaacaatgttctgtgacaatatgtatctgaaatttatgggctgttttatttctcaacttcctgattttcattttttggatcttttatatgccattatttatttatttactttgtcttcttgaagccctgcaagcaaaatatttggttgacatattttttagtcttacatcctttatggattcacacagtttttagaattcaatgaatgttgaatattgatcctaagctacagatgagaatgtttcagatcacgatgagggagaacagaatggcattgggggttgggggccttcctggaagttaagagggggtttaatccatcatgaggcagaaaaaggccgtacagaaccaagaagtcaacagaagagcggttctagattcttgaagggttcagcagaattaaaatttggaacaaagtaagtggagggatgctggataagagaagtggctggaattggtgccaggggagagaagttcggttgagtagtgaggagggcactggaaacaaaaatctcaagaaaatgtgtaaggaaattagggcatgagttgtgaggtaggagaggcaaacaatggagattgtggtggagggaaaaggacaggaactggatggaaacccagagaagtatctttgtgaaaagtggaatatttcaggtagcagatcatgttcatggatattaatgagaaacattgcaaaagaactggcattataaaaattccatttaagatgtaggttccttgcaggatttcttagtattcctaacaaacagactctccccaaaaataatgaaaacaataatttttatgtaaccttgaattttcattttatagtcacattaaatgcacatctgaataatctcaaggttagcgtgaagctaccctggtctttttaaaagaagttcctctaggtctctgaaaaaagacatttactggtgaatcaactagttactgccgcaaacagaagtttgtgtggttggaccaagatgacacctcactcttgcactctgttgctggatcctaattttgatcctgaacagaaactttatgttttaaattccctgtaacttacccctctatcctgccctgtcttgctctcaatttatcctctctgcctgtgcctgtcctttttcccctctctgggcaaccatcctcttgattgcctccttgcaacatttttgtgcaggttttactttcccttgaagtgcttgctccaagctggctttgaagctgtgtctggagtcaggattccttgcattctaaacagcacagagaacatcaacctacctacccctgcccccgtcaagatgtgtttctttgcaccagcccacacttgatggcaaaggggctgggtcacatttcctccatgagctgggagcctacaaaagtacaggagggcagggcaagcaacatgtccactttcatcttatggtgcaagcaacttggaatttagcatacaggttgcaccacagactttggggccagattgcctgaattttatttatttatttatttatttatttatttatttatttattattgagagagagttttgctcttgttgcccaggctgcagtgcagtggtgcagtcttggctcactacaacctccacctccccagttcaagtgattctcctgcctcaccctcccaagtagctgggattacaggcatgcaccaccatgcttggtgaatttttgtatttttagtagagatggggtttcaccatgttggtcaggctggtctcaaactcctgacctcaggtgatccaccctccttggcctaccaaagttctgggattacaggcctgagccacagcgcctggcccagattgcctgaatttaaatcccagctttactgcttatgagctttgtgatcttgtgtgaattcctcagccactctgcacctcacatgcctcttttagaaaatggagatgctaataacgcctaccccacagggctgtgatgaggagtaatgccatgtcggtgttagcctagtgatctcaagatgtttatagaagggaatgtaggtatacagcttcagaatattagtacttgattaaggagaatgtctaattgatcaagaaaaaatatttaagataaaatgacttttttcactactactctgttgaatctattttatttaaattttacctgaatcttactttacctagatgtccatgcccattttctaatgccccagaagcttgaggcccagtgttgatctaacttgataataaaattaagtatgtaaaaatgtctgcaaggtagagtagactattgccttttccttaaagaaagatatgaagattggtgtcatcactgtggagtagctgagacctcaaaatttgtttgatgaacaaattgtgctgatcatgtgtaaatttactgggattttcatgtaaaatttacacttggtttttcttttggtttgattctgaactggttgatatactttacctaagacagcacaagtaatgaattatgttattaataagtactggggtatattgatctcattaggtaaaaggacatcaaagtcattgcttctatgaaatcaacacatacaacaggactcacttaagcaaaattttccttaagcttatttgtttttacagggcttgggatatttttcaagtgaaattgtgccctcatagtctagccatgctctatgaaaactttgtagaacacagcaagacagtaatgcaggtcagacctgcctcacagtaaagtaaaaaaataataataatagtgtttcattgggcgcggtggctcatgtctgtaatcccagcactttggaaggccaagacgggcggatcacttgagatcagaagttcaagaccagcctggccaacatggtgaaaccctgtctctactaaaaatacaaaaattagctgggcatggtggtgggtgccagtaatctcagctactcgggagactgaggcaggagaatcgcttgaacccaggaggtggaagttgcagtgagccgagattgtgccactatactccagcctgggtgacagagcaagactccacctcaaaaaaaaaaaaaaaaaaagagagagaaagagtatttcttcttactttaagatagcttattccaagttaccaacttcacagctacaaagtgatctcattgttccaatgaaatgatttcagggtctggtagaaaccactaacaattgtctgcagttgcacatccttacacaggcttgaattttagagaggagtcttatagagaaaagaatggataattatgaatttataggaagtaattttgttagtttcacattataacaggtgatatgattgtcttcttatctttatgtgtcaaaactgacaatgacctttaaaatgcacgatgagtgtttcataattctgctctcactaaaacgatgactggtgtccttccaccaggaatttgtattactagcaagaaaaagtcaaaaattactttaaataatagttttaactctggtcgtaggtagaaaaaaagcatcttttttgcttggattcatctataaatataaacgtataccttaaaaataacacgttaaatgttctgtattctacaactattggttcatgcttattacttgttagaaaattcttggcatacagataacatcgtattttatttacttgctatgacatttcttcagaatgtctccatgaggattatcttgggagtttgcaagagataccatccttaattctgtctgacatttctagatgaataacagggaaattgggtaccctattcaggtccaagcaacaagtgcagagctttctccaacacattgtttgaatttacaaaaccaaatatgaaactcggtggataaaaataagcaaatctgcatttatccctgcatctctgtttgcagagctccatggtggactttggccgcttggtgtctcctaaaattggatcaaatatagttactgaagcaatgtagtaagacaggaaaaagggggaaaggctaatatatgttcatgtcaaacaaatgccttcaagggcgtagttgtgcagcgaggatagtcctttacttttgcctcatattctcttactggtgggaaagataaatcaaggaaaaagatgttggaaaacaacttctagcacaggctaattaaaatcagatgaacaagagatgtagcccagactttgtgatcacaggccatcccttagataaggttaaacagcacagctagttactgacagtgtgcctgtgtctccttgtggtaaatttcactctaactagtggtctctgcagtgcacttgagatagaagagacaaaacgccctggaaaggctgtcaatgagaaaaaaaaaaattgtaagcaatgattttgttccaataatacttatatcaatagtaaagcaacagtgagctgaggtccttacattcacttaaatgaagagctgaatgacattatttgtattgtaacaaaataacataataagttttctcttttatatggattagtaaaggaaaaatgttttgtattttcaaataggaccctgagtctgaatggtttatttatttatgtgaatagacccaagagctgttctctgatgtggaagaggcacatcatctaatggggactccttcaaactggagagattcagcctctgagccgagtggctgagagcttcagaaagaagcctggagaggtgagggtggacccatttcaggaacatcaaatcatcacattttctagctaaaggggtactatagtatcattccagcccaccaaataagaaaacagagacccagaaaacattggcaattctccaaggctgcagggctatttattctaactgttctgcataatatacacccattgtctattttgtggtatcacactgaaacccagatttgcatgttttaaaatagggatattgagaatttaaccaaatcactaacttttaaaaaagttacttaaaaatcactaacttaatttttctaattaaagccacacactagaagggacaaatataggtaggtacagctgatccctttatggtctccacacattgtgatgagcacacattctgtccctataacctgcaccaacatttgggaaccagcaatgcctggccagtgagggaccagggggagagtcagaactgctctttttttctcaggagagcaattggatcaatttgtgacttcagccaaatcactcaagactctagtctaaatttatctgttttatcataacttagccctcaggtatattatgggattaagccggaagcactttaaatgcactctggtgacaggtgttctatgaaggagtcttataaatattacctacttagccacagaaacacttaaagagaatggaaaaggagaaggcacattctgccaaagtggcgatatgctaatacacctgcatcaggatctttattcagaacattacactgaacacgttagtaactatttcatatgtttaccattggaaatgtcaagtagaaagttatttatccatttgggatggagcgaatatatgtgtggatggctgccaaaaccaagaattaatcacaagttattaatcaatttggaaaatataaacagataaattttcagaaatgcaaaacattcggagcatgaaacatttttatggcctaatgactttgaaagccagcaaattatgtttccaataaataagccctcaactttgtaaaactctatagtattttgagttaccttaggtaatggcacataattctcaaagcaactttaattttatagcacttttgtttttcttatacattatattttaattatcaagagagaagctattgcaaagtaaatgtgatgccataattctttaaaaagttgaaaatttatcttttatatgatgtacgtagattgtactgtgtttttatttctaaatttcttggaatggtagtattgagagtcgctcttgaattcttcagaaataccttagaaactactttttctcattttcctcaaaaccagtaaacttttacttggactttttttgtgtgaattattgtagattaatttgatatttatttgatatctctaatatgtccaacacaaacatatacatatatgtatgtacatgtatgtaagcattatccattgtgttttctaaattcacaacagtatacaacgtatgttgtgaccactgtattatggtgtcatttttggctctcaaatcactagacaatgcacttcttgaacactagaaaggactgttgtttgtatttcttatgtgagagatgttaacaatgtgtctatgcaaccgtgagaaagatgactgcagagtatctacaagtatatttaataccttgaatgtgcataaaattcaataatgtaaacacaatttatgtgcattcaatatttttattcattaataatgccactttaagaaaatcagtcttagaacatacaatgaaaagagcaagatatcattggaaaaaatctacaccttttgttctgccatattgaaggccgttgcttcacactctccattggccatgtgttttatgcagtcttccaaatcttttgcagaaacatttccatagctttgtgcatttattcaatcatgtttatagtttatttgtcttcgaaagtatttgagggtcttataaatgcaatcaaataaaaatctctacactgagagaaaaagacaagagctaatgaatagagagtaggaaagagaagaaaataagcaaaaacacctatactgagtgaggcaactgcatttgaacaaaaagcctctctgaaagatctgagggcctatttatttactcaagaaacatttgagtgcctgttttgtgtgacataccatggaagttggcttaagtcaggcttccctaaaagcagagcctaagatgggattcttgtataagcgatttacagaagaaacctgtaacagagtgagggaagcagacaagagaagagaagaatgcaggcaaaatgtggtttcaggagcatcaagtctctccctgatctcacaagacactctggagcacgacagaatttctcctgccttgaagcaaggggcgaggcttgccctcacagggtggggagatgggcagtaacttcccagtatctccaggccaggtagatcctgtagactaaggtaaccctccaggaatgggtgtagatagaagcttgtagcagccaacacccatggcaactgagcccaccctagcctggcaccaactgcacctgtacagaggtgaaataaaacacaatccttaacatcactgacacagaatccttgatggcttttgagtgaaagtgaagacatgattttaaaaagaactttgataatattaacctcacaggccgggttcagtggctcacacctgtaatcccagcactttgggaggccgaggcgggcaggtaacttgaggtcaggagttcgataccagcctggccaacatggtgaaactctgtctctactaaaaatacaaaaattagctgggcatggtggtgtgcacctctaatctcagctatgtgggaggctgaggcaggagaatctcttaatcccaggagacagaggcttcagtgagccgagctcacatcactgcactccagtgtgggcgacaaaggagactctatctcaaagaaaagaaaactattcttgtagtctaatcaataagtaataaagggcatgattataaaaaccagtgaaatggctgatgggagtgacatcaaggagattgaatgaacacagaacaggcaaaggacttaagtttcagaagtgattgctgacgtatcaagtctgaaatgatagtgcctttaaatgaagtagaaaacacttgaagaaaacattcttttagaagagatgagtcagtttgaagcctacagcattagggctacggaaagaatctgcaatcaaaagccccttaagatgtgagctgagtagaagaaccaagtttactgttagcaagtcatcagtttaagggtgataactaaagccatcacaatggggtgagggggcagtgtgcaagggagaaactagaaagaaaagaactgaaagtagaaccttgaaatttgggtaaacctatatataggaatggggtggagagatgaactagaaagtttaaagtatagaaaagtgggagaataagaagaaagttttgaaagggaggagactgcgaactgataggaaattcttcagaggtatcggaggatggaggttgagaaaaagccattggtgatcttgaaggaagctggtttcttagcatgtctgtgttgcacagaggcagacatgacactgcacggatctcaagagtgtagtagatattgagaaagtcaggggattatgaactattattctcaaaagctgaggtgtaaagagagatggcataagactacattgggagaggtcaaggaaaatctttgtttctttttttctcataagtgtatatatatatatgtgaatactcaactacgattacaaactgaagcaaagaagtctgtaaatagggagaaactgaagatgcaagcacaacaaacaataataaattatccagacataccggaagaggccaaaagggaaggcacaggtataaacatgggtcagcatctttaccttgaggacacaggaaaaggaaaggaggggcatggacactcactttgaggacaaagtagaaataaaggcttattgcatattcacattgcatatgcatattcttctcatatagaaagaattttttagtgtagatatgatttagtaaaacatttgctgtttataagaggcattaatcacaagattgttttcaggccaatagatacacctactactttcttccctcatgaacagcgagcccaacttaggtaaaagtagagagaaatatagaagtagaggaagtcaaactaaacgatggtgaaaggggcaggccttgggataagaaaaagtctattattgcaatttcagtttaatttcagttttgctaggtttttcaagctgctggggaaaatgtgggcatttcattttatcccttttatctaagactcctttcctttgtaaattaccagtggtatcttacaagagcatttctgttatcagacatttgtctgaattcatttattttgtttcacaaattcattttgtcagaacacagttctaactccttggaaaactttgttttattggtataatataaatgaggtcagggtaaaatattgtcaaaattaaattgttcttatctttattgcttttggcaactttcacgttttatgtctctgtgcacattctgtaaactgtcatttattttttctcaaatggtataaaatttctgaagcatgctaattatgtatcgtttccaagcgaggaaatgccaagggactggcttaccatatgaagagtcctgcctgtgttttatcagtaagtccttgtggttatggtgatacatttttgtatactctactggtaacttactatgggcttaaaaacctttttcactgggagcttatgcaagtgaatgtggtgtgtttctttgcagctgttgccatagaaataaagaccttttcaaagtaaaatgaggatggcataagaattacaaattcaaaagaagttacgcttctaatttaatatcaaaaatggtgcactattccctttctttttaattttgtcaaaattgcatgacctgagtgcgtctaatatacttttattagataatttctagtatcagaaaagctaaagccgaaaaaatggaatagatgaattccccacagcattcagtaggatgggctttaatctttaatcttttattcttaagacttataatatttctaattgtcttctgcatgctctacctccatactactttctatcttattttccatttaaatctaattacctataatgggctttcttaaaaacaaaccatttattttgctttctttctttaccacatcattttcaacaacaaggcacattttctagcattaacacacacagaaggatgaacaaatctataaaactttctcagattttattactgttcatgttcagactttgaaagccttgtagacttcttttgaaaatgaaaaaaaaacctgaagcagttacacaaattaaagtttataccagaatgtaaatcaacacacagctcccttcattgagaaattcttgctaaaaagaaatgtcagcagacctaaacaataggcttaatgacatggcaaaaattgtgaatttgtaaagattaatatgttaatttggagattattttattttgagataatgtggaaaatgaccatgcatgctgaggtatgatggttattgaggagaaaaattttatcaaaaatattaggattatagaattaattcattgtttctgcaagttaagaaaccagtttattcttacttttttaaaaataaaatttgaatagttttatagacttgcttatttgtctgttatcatcagtattttaaataatgtcaatatttctatgcaaagaaagaatgtaatgtgttttttaatggtaggaaaaaataaaagagtgaacactgaagtttctagagattgttacaatattattctcatagctttacaacagttatcaaagaaacaagtgatgttcttgatattctacatcagtgaaaagttatcttcaaatatttaacaagtttgataaaacatttcaaattttattttccaccaaaagaagatgcatatataggaattctagaatgttgaatttatttatttcattgagaggttgtttaactttaataaataatttatagggtgatttgctttaactgactactgatgaagaattgaagattaattttcaaaatacagcatcacttgctccatttttaaataaaagttgtaaataatattctgagagtctaaaattacttcaaaatttcttcttccatttccttcaaaatatctttgttaaaatgatttctatcttaatgtcattaaaacaaaataatgaagcacttttttaattaattaattaatttctgagacagagtctcactctgtcttccccaggctggagtgcagtggtgcgatcttggctcactgcaacctccacctcccgggttcaagcgattctcctgtctcagcctcccaagtagctgggactagaggtgtgtgccaccacacctggctaattttgtatttttagtagagacgggtttcaccatgttggcctggccggtctcgaactcctgacctcaggtgatccatctgccttggcctcccaaagtgctgggattacaggtgtgagccaccacgcccagccaatgaagcacttagataaaagttatcctctaaaacaatgatccccaaccttttttggcaccagggatgggttttctggaagatttttcaaggactggggttgaagatagggtttcagggtgaaactgttccacctcaatcatcaggtctagtttgattctcataaggagcgtgtagcctagattcttcgccatgagtggttcacaatagggttcatactcctatgagaatctaatgcccccactgatgtgacaggaggcagagttcatgcggtaatgctggcccgccactcacctcctgctgtgcagcccggttcctaacagtccacagaccggtaccagcctggggcctgggggttggggacccctgccctataagaaatgtcaattcaacttgaagtagatatgttaacaagcaaaaagcaggatcatgtcttacattaaaaactatataatagtgtttatttcttcaaagagtgcatataggtactttgtatgggaaatcactatttcactcatgattttttgtttcattgtaattacaaaatgataaaaagttaatgagtgccatagggaatctttatgtgccttatacacactttaaataaagtgtacagttttgtaatttttttcatttttccctaatttttaaaaattttatttttaaggcataattttttgtttgttgaattcagtaatatacactggaatttatacttcatatgtgtttatttcatttttttctagcaattcagctttgttatgttttataaaagtactgattcatgacagattggatattttaaaaaccagtcctttcccatagaattagagaagtgctgatttagtaggttgcattgattataggctaaaactgaaacaacaaaaactttatcaccagcagaaggaattcattttactgaagtatgattagttaagctttttaaaacagtttagccttgtaataattaagagaaatgtgcacttagccaggtcaattctgaaaattaaccagcaaaatatacaatgaattctcagctatgcaacatatgttaccaggacttagaacccaggcagccatattctatataaagcaaggataacatgtttcactgtctgttctgttttattcctggctacctggactagttctgctggagtccatatgcagggcaagacaaccagtagggctaaaactgattatataaatagaatttctgaaaaagtattataagaggaaagagcagtttcctccctcaactctttcaaccttttttccccccggaaaaaagataaaatgaagttaatggacaatttgtgaagaatagtccaacttacctttttaaaattggaagatcccttttacacaaagatttaaacagataatctattatatgaccacttatagctaaaacaccctcaagtttaacaaaaaggacagttatttgatagatttaggtatgtggacagccaaacaagcagaaaccatttaagataagataatccaggtaacggttggtgaagataactaactttaggatcgagtttagacttaatgttgactggcacgaggatgctgagatttaaagaagttaatatgacttgttcagagtcacaaagccagaaattggtagtcatgttcaagtctatggccgaattctgctccctcaatagccatatttttcaacccatgagttgtgatccatgagcaagtcagaaatcaacttagtgggtgacaatcagattttctttgaaatattaacaaatggccagaatacaatagaatatacaaaatggtttaaccaatgtagaggaaaatcagtgtcgtcagagagaagcctgatactgacacagaagtttctctgcctattttcctctgctcagcccgttttctgtctggaggctgccttgattcattcccctactaatcactttgattttccttctcttccagatgtacagcttgtgcagatgaatattaggtggtgggtagagatgctccctctgctgtagagtggctttggtgaagccaaccaacccacagaccttacctctataaggagggctgtttgttgtttgattagtttatgcctctgatgtatatctggttccttgaaatttttattaataaaatgtaaccctctgtataacctcaccaaagtaaaatctcaaaaggcattaattctggagtcttgcaaactcctgggtgagccctgcctgtgtgacccagggaatactacttagcctctctgagtctcagttcttcagttatacaaccgaaataatactaatggtacctaacccgaagttgatgattagaaaaatatatgtgtaaagtagccaatacagggcctatcacatgctaggtattcaataattgctaattattatatcatagttataatattaatttctaagtatttgaacataataaaatcctctagcactaaaaccatggaaaagatttagtgtttcttttggaatccgaagacttttctggatttgttgctagcacagttgcccaggaagaagtgtgactagccagtgggtgtttgggggtgaaatccagcctgtgccctgctaactactaacactgtacctcagtgtagagctgcagctaatagggaaagcactgtatctgctaaatggagctctgtctcctgagtcattaagccagttagcactgtcctacagaagcttggaagtgccagttagtagacttttccatttagtaaagtgctgaataaataaacttttactacaactggtttctttaaagtgtttgtacttctaatgatattctagaacagttttgaatttttttctctttgtcatcacatagatgcttgtaaaaccagccgaatatcaggaataaactatttataacataggttgacatggtactatttgaaatgttttgtggactgcagatgtttcataaggattctttattctttttccttccattccttgatgttatggaatatgtcagaaggcttttttaaggtcaccatatatctaacctcttgaaaacgtatactcttatttcaaagctctaagaaactggtacctggatcactagacccaaatttaacttcagcttgctcagtttacatcttaaactccatttaaaaattgttattgtgctattagagaaaagtcccatatgatacccaatttgtattttgaaattcagctggataaattgaaatgctgaaagtgagttatgctattgcaacactcaccatatattaataactgaactgatatttgcgggataaggtttttctatcagagaaaaataaaatgatgttaaactgctagattccttggatggttagttcttttctggggtgaaagacttgagcaacactagaccccagtatacacaacctcaaaaactaattgaggctttgccctataatataataaatggccctatacttttcgtatttctatattttactactctagaaatatttccatttggaaatgttacctatccacaacagaattcagcattcacagcagttaaatataacaaactatacacacccctgccccacccccctgacacacacacaccaaggataaatcttaaaaacaataatattgaatacaagaaaaaatacataagtacatatatttcttttttaagagtacatgaaacagaaagataatgtaaactcgtgagagtagttatcccaagaggaaggtgagggaaaaaggactacagatggtcaaaaagtatttccatttaatctatgatattttgttgattaaaaaattcttgaagaaaatatctcaaactgttactagttgttaatgctgtgctgtgggaaaataatcatttgttatgttactctttttacatatctgcattttaaaactatctcaacaaaataatttcaaattttttacaaaggttttatctcatgttatctacagcaaaaacaaaaataaaaacaaaaacatcaccagatcttaaagaactttcaaggcataattagtttcatggttttgatgtcgatgctcatctcaaagtatagtaatgaatgcgatcacactttttctcattagtacaaactcctcatttgtctagtacctttcaaaaagttacgtttacttccattttcattgttagctcagtccaaaaacaagaacaaatatttattgagcacctattgtttgccagaaactgctgtaggcagaggataaaccaatggacacaatagactgggaatcagcagactacagcccttgggccaaatctggtgtaccatgtgtttttttttaaataaagttttattggaacacattcatgcccatttgcttacatattgcctttgggtgcttacaatagcagagttgagtagttgtgacaaagactatatgtctcacaaagcctaaaatatttactttaaatatttcttacttttcacaggaaaagtttagtaacacctaaaatagtcaaaaacctctgccctcatggaacttacattctattatggagacagatggccacaaaataaataagttttagtgtggttgatggtgatacatgcaaccaagattaagaaagcagaggaaggggatatgcagtgttgtgtggaagtcagagaaagccttgctgccaagctgaccgtggagcaaagatctaaaatagatgagggccatgtgaaaagctgagggaagctctttctaggtaggggaagcagcaggtgcaaaggtctgaggcagaaatttcaaggaactttaggaggtcggtatggctagaatggtgaaggaagatgagaggaggtcagagagtccacacggaaaggcagagcacagccttgcaggtcattcattataaggagttcagcttttactctgagtaagggccctcatttgtctgttgtaaaatctagactgttcatttcatttagaaacagaggccaaagctatagatactgactccttaggtcaaatgctattcaagtctgaaaacttcaattctaacctcgccagcaatggtaaggatcgccacactgccagttcttaccagtgctaccaggggaagaaagcaagaaaactggtgactatatgttgccacaatttgaaaaacatttctgtgacacatctatcccataagttatccatgatgacacactagtgtcggcactagagagcacatgctatgtaaggttttatttcaggccagtaggttggcctcaataacattaaatttcaaactgaggatttggggtatatttttcttagatatttgccaagaatgtaattgatcactggctctacatctgaatgtgttcagccaccttctacgtgcccctaggcagtttaattcctctgggaatgcttgggaacttctgcacagaagaatgggtagacctttcacagagagttcattccgtggcagctaccatacctgccctccagaatttatagtctaatcatgaggaaaagatcatagaaagcccctttcaaatgtatatatttctcttaaatacctctcagatcttcatatattctagcccactatctttaggcaggtatgtttttattccttttttttccctaaggtagaaattgctcaggctgagagattatgtgactttttcagattcacttaattaataaatgaaagaggatgtactagtggtcaggtatctggcttctcatacaatgcacattttttttctatcctgttttttaagtcaatgatcaatttgtgtcataaatatatgagttagaatctgtatcacctcaatataatatacacccttctaaaatataaagcatgactatgggtaacaagtattgaaagtatgccaaaatagaaatattgctgctccaatcatccaaagccactatgtccacgtttaatgcagacttataattcttgaaaatactggtgaactactattctcttttgtggatctatttaaatagccttatttttttgtgcagaacaaaacttatattgaggaaagaagagaaatattctaataccagactatgagctcctcgagggcaagatctgtgtataatttttctctttactctccaacatccagcatataataaacacttaataaatatacaaatgcttatcattgatacaagactgtctttatttttcccattcatttgtgttcctaagtggcagttgatttctcattaaagtagtaaaaaatctgtaacttcgattgtttccaacattagctcctgtagttttagttattgttgatttttgaaagatttaaattaagggtctgtcttcaggagctcaaacatctaaatgaacgtatgaatattgccatgtaattttatgtttgaatcccatagacaagtgactggatttttctctttgcctctggagatcttgacatcaaatagatttcacctacatgtgttttctcttttgaatggatttaaatcatatttcttcaatttgactttttccaaataatcatctggtaaaaatactttattatgtgtaagaaaaagatcaatataactttacttaaatgtatagttttttctcagttgttggtttgtcagccatgatccaagataagggctttttttctttcattaacccctcaaggctctcatttgcaaagtcaatgggacagttaggcatgtattttttagggcatctttgtagctttgattctatattttaaaagatgcccaaactatggcattatttcccataagatctctaagttattggttgatcaaaatataaatgagacaataaactacatttgcatatttctgtggatgagtttaaacatccttgtttctcctgcaaggtctttcacttgagttaggccagccaactgacatattgctcattaatcatacatattaactggagtagttaatgcttcaaaatccaacttaccattctgtccacagggactggtttgtgttttctaaatgtgatgacatatgcttcagacactgctaattaggcctttcccttgaaaattcatcctgacatgtttcaagaacacttttctcccttgagtacaagttcattaaattattaatatccttttataagtcttgtaggactacttacacaatgcagctttctctgttttcaaaactatagtttataatgaaggatgaaatagatctcacttccttatactgtatatctttttttccagtcaaaaacaatgggctgggtaaatatcagagaataatagatactatattcagttacataaaatgttaatgtaagattaaaaatattttttagcctgggcaacatagagacacccatctctacaaaaaaattaacaatttgctaagtatggtggcacatacctgtagtcccagctacttgggaggctgaggcaggaggatacttaagcccacgaggttgaggctgctgtgagcaatgatcacaccactttacttcagcctgggtgacagagcaagactcttatctcaaaaaaaaaaaagatttgcacatggaaatggaaatggaaatgttatacggtcagctgtttgtatctgtgggttttacatccgtggattcaaccaaccatggattgaaaatatttgaaaagaaaatatggttacatcttactgaacatgtacagacatttttttggtcattattccccaaacattacaatataacaactatttacatggcattttcattgtacgtattataagtaatctaaagatgatttaatgtatatgagagggtgtgtgtagcttatatgcagattctataccattttatataagatacttgaatggctatgaattttggtattggacagtggggatctggaacaaatctcccacagataccaagagatgactgtacatataatcgactctacacacctgtaaggaagtgttataagcaatctaaaacagataacctaaaattagttctattgagcttctgtattaaatgatgaatttggtggcaattttaccttctggcctattatctacctaagcaggtgcttataccaacctatataatatgacctttttaagacgaaactcctaacggcttcacatcacaatcacagtaatgaaactcagagcactcaccataatctacaaggcccagcctaatctggcctgcctgccacccaaccacacacttgctcttctctagcaacctgtgtttctttctattccttgaagaatttgttcttgctgttccctctactggacagctttccctggatgcacctggatgctctttctcagaccttgcatgatccttggactcactttgttcacatttctgctgagggcttccctgatttttctatctaaaacagcacaccttcctgtataactctgtactgccttaccctgctttatttttctgtatttcctatcactatccaaaattcgtatctttatttatttagttcttagagatgcaataagtatagcctagtggtaatggtcagagatgatacagccaagttgcctggattcgagtcttaactctggtgtttactggccccataaccttgggcaagttatgttgtcactaatttgcctcacccttaaaatgggaatacctcaaatatattttgaggattaaatgaataaatatgtgtaagtttctttgaatgatatttggcatctattactattattgtccccactggtatataagctctattgagacagaattcaaggtatttccagagcatggtaaagcatctaacccacaatagggacttcgtaaatacttcttaaattaatttatgaacaattctgggcacatgccagctgaaagtggggaaaatatcttataaaaacacagcgaaaagccagcaggtgaacaaataaagagtttaaaagtcataatggaaattttatgtagttgagaaagctgagttggttatgtgagttttgtaaatgtaaatgcatatgtactagatgtagcaagaatgaggggaacaagatgtatttagggtttctgcctttaggatacttccctagaggtgaacagagaaaaagtcaaagaacataaaaagaatctggcgactgaccaacaattgctgccggcaggaccaactgggtcaccagctttcccaggaaaccctaaccttactttgggaaatgttggatctgatgggagctgagggaaggtaaattgtaaagcacagacttcaaattacttttacccagttacagcttcaggtgacattggatgttaagtttaaggaagcgaaaagtagtattcaaataaagaaaaatactctcggttttgtacaatagtatgtcccaagtgttcagtttttaaaggtcatcgatacattttccaaatatttaaatcaatcatgcaagaaaaagaagtggtgagctgggaaatgccgtctgaacacacttgatctaaagcctggggataagtatcagaagagaagagaaccgaagagcgcacacacgtctaagacaggttaccgcaggtgcatccagggaaagctgtccctgtttgaggacttttcaggggatataatgtcccaggttgttgctgaggttatgtaaatgactttttctacccacattttcctcctatccccatgatccctccactccagagggaaactggagtgctgaggtcatctataaccaaatgaacaagtctgtctaaatgcctgttgcaaataattgtcccttctcttccaccatgaaggcaagctctaggtcttaatcatcttaatatattttccccaacacagcaggtaaaacagacagtaaatttctgccaaataaaacttactcacatctttttgatagggtttttttctgaaatcagcacttaagtatcaaaatgcaatttaatccattaaattcacttcaattaatagagaattacataaggaaaatttttccatttcaaaattgggtgacctttatagttccacctcactgatcctctagagttctcttcatttgtcagacagttattgaatgactgcaaaatgtagttctgtgaacttattttgtactagtcaattcaatcctggacactgaatatgtagctctaaaattctaccccttgagtatatcttttagattatgtaactcagaaatactgaaactatgtcctgtcactttaccttaattgaaatcaagatatccaaatattactaatgattatttgttccaatgctcactggtgatgctgagcttgttcctgtttcacgggcttagcctctgacctgtctgaagtttgtagatgaacttcactacactgtttttattttaacatttctattaaataagacttatcattttatatgcattatttgtccctctgcatgtcaattttgttgactctaaacctacaaacataacagttcccataataaaagtgaaggagaaaagtcttcattcatgaggcattgtgaaagtggaatgttttagagatgtggaagcctggcagcataattctcagacaggaaggcaatgtatataaaggccaaattccccttctccagtatgggagtgtgctgcctgtgaacatccaaatatggaggaaagaacgttttcacaatgagctttcagcttccaccagcttcatgtggcaccaagatgttaaaatacatcacagtatattcaggaaattgtttagccataccctaccactgccccatccatgatactagaccaatgaagtggcttggcaaatattggcaatgacaggcctagaaaacagagccagaagttgggccttagagagttggtggtgtggcaaggcagttaggcattccaacaaatctaaatggaaggtttgggttggcctcagaatcagggtagagagacgtgagggcaagcagaaatcaggcaagcagaggagaactaggaagatccacgttccaaagggaaaagcagcaagtaaatgggacatttacaaaatctgacttggtagtgagaagaagagaagctcaaaaattataacagcaaaataacctaaattgtgaatgatcgggatactcacatcaaggaaacgttaatcctgttttaatgttttaatgaatcatttattcagattatcatttattgaactgtagctcaagaggtttagataatgatgtcacaacttctaacttgttttgaaaagccacattagttacagatagagtccatctaaggggggataaaaggaaaggggcagagagatgagtaaatactggaatgaagtaatttaaaaatgttaagatcccagcctcaataatgttcatctttccttagctctgaacctatttcaagtcatttgttcatgctgaattgcattttcttctcatgtccttacgagagtcacttgtcagatccctgaagtaatgagacctttatgactagtgttgttactgtcatagatacattttaaaatatctattaagaaataaaatgtacttaacatattatgtcttcctcagtaagtattccattctcatttttacacatatcattgagttcaaaatgtaattctttacatcaggcataaatcttatttcctttcatgaagttaaaaaagaaaactaaacttcccagatagtctgtaatgttttcctgtgtaattaacacctcattcacagttgtgtgtgccagtcaaggccctgtctcctctttcctaacatttccttaataccttgttcaggctgagctgatgcctaacagtgtgcaaaatacacatatggaaacaggggaatgttagagagaagtcagctgaattaccgtgacctgccagtttaaagagagtacttagacacaggtttcattttgtgggtttggggtctgtgtgccatcccttaagtccaattactgctgtaacctcatcttcttcatcatcatcctcatcaacaataaaaaccatctgtcaaatgaataccaatagtccattatttgcattcttctcttcttaatgcttctaagagggccaaatgtttataaatcaagtgtctaatttaagatacacgttctctgacactgcaagtcatcctggaagcattaggttatttttactgttgaaaatttgtagatgtcattgatttaaatagccttgtatctttttttcttgctgttaatagtgaccctctgtgtccttgtgcacagaaaatgcaagtggaatcaagctttagatcattcaaataaaatcattccattgtgggaatctcctggcttcatttttaaaagttatattgaaatttaacatacattaagaaaaatgtgaatgtcataagggtacagcttgatgcttttttataaaatggacatacttatgcaaccaccacatagtccaagcaacagaacatcatcaccccaagaaactcctctcatgctttctttcagtcactttccactctcacatgggtaacccgttataacttctaataggatagattaggtttgcccattttgttctttgtatgatttgatcaacattatgtttatgagaaacatttatattgttgcatgtagttcaatttcattcattttcattgctatcaaatatatacttttccattgtatgaataaaccacattttttttatttctacctctaatgggtatcttgattgttattttagattttttaaaaaactcatatccacagttaaaaggtgattacacttttctaaaggatgcacactacatattttggaggttttcctagagacattatctaacatttttatataaaaatggagaattggagagagggtagtagaagggcaatgaggaaaggaactaatatttattagaactaccatgtactggacattttggtaaaaatagttgttttcttttgaattgtggtaaaaaatatataacataaaatgtaccatccttaccacttttaagtatacacttcagtagtgtcaagtatattcacattgttgtgaaacagatctccagaacattttcattgtgcaaaactgaaactctataaacattaaacaactccttttttttcctcttccttttcttcagtcactggtaacccccattctattttctgtcctatgaatttggcttctttagatacttcatataaatggaatcatagagtatttggttttctgtgactggtttatttcacttagtataatgtcctcaaggttcctccatgttgttgcatgtgacaggattttcttcccttttaaggctgaaaatattccattgtatgtttgtacaacattttatttatccattcatccattggttgacatttgggttagttccacctcttgtctattgagaataatactgctatgaacatgggtatgcaaatatcttttcttaaaactgtttccaattgttggagtatataaccagaaatgggattgctagatcatacggtaactctatttttttttttttttgagagagggtctcactctgtcacccaggcatgagtgcagtggtgccttctcagcttactgcgccctccacctcctgggctggagtgatcctcccacctcagcctcctcagtagttgggactacaggcatatgccatatgccaccatgcccagctaatttttgtatttttttttttttagaaacggggttttgccatggtgcccaggctggtctcaaacttctggcctcaggcaatccaccctcctcggcctcccaaagtgctaggattacaattttacaatcccatcaaccttgcacaagtgttccaatttctccatgtcctcaccaacacttgttttcagatttgttgatagtagccatcctactgggtgtatgcagtaggaattttaccagtgatctttttattcctttaacaaagttgttgcaaagtataagtaccattttacatcaatgaaatcttagcacaaaaggattctataagagaaaaaatggggcacagggattttccagtccaggtgctcttgaacttgacaatgagcattttattctcaaagttccacataatcacaaaacaaattgaattcttttgttctgagctgcaagatataaggtgctctacaggattgcctgactttaaatatgaaataacagctttagttttagagtagtggttctcataacatggtccccagaccagcagcatcagcattactgcaaacttggtagaaatgcagattctcagatctcaccccagacctactgaatccagaactctgaacagccaagcaggtggcacacacctgtaatcccagctactcagaagaggggctagctctattaccgtgacctgacagtttagagaaagtacttaaatacatgtttcatttgtgggtttggggtctgcatatcatcctttaagtccaattactgctctaacttcatcatcatcatcctcatcaacaacaaaaaccatctgtcaaataagtaccaatagtctattatttgtattcttccctttttagtactcctaagagggccaggtgtttataaatcaaaagtctaatttaagataaatgttctctcacactgcaagtcatcctggaagcatcaagttaaaaaaaagagctttttaaagctattttttattgagacaggatccatgctggtcttgaactcctgggctcaaatgatcctcctgaggtttcctatgactgatttattttacttagtataatgtccttgaggttcatccatgctgttgcatgggccaggattgtcttcctttttaaggctgaaaatattccactgtatgtttgtaccacattttgtttatccattcatccattcatggacatttgggttacttccacttcttgatcctgaggaggattgtttgagaccagcatggatcctgtctcaaaaaaaaaaaaattctgcgagtgaggctcagcaatctattttaaaacagccctccaggtgacactcatgcatgctcaggtttgagccctcctgggtttagatcattaggcagatatctaaattattgtctaataatctccacactgttgccaaacagaaaactgacatattgagcactttcaggtttccagggcaacttaatagagtaaatctgtgttttgctctttataccacagttttcaggaaaatgttggattagcccagttataataatgctggaacactagatctctatccatctgaaagttcacccaaacactaatttatcagagttgcttctgaacaaatggccacctgagaatagccaccctaaccaggaagacttattccggctcagcagatatctgacttatctccaggattttcactccacccacacccaagtccccaccttttgtctcacttttgggtctagagagagccttgtaatgaatggaccaaaacagccagagatagaagtgaaagcaaacatgcaaacattcctcccattggcatcaggagccttcttcctgtacctactaccaaccgccgcaggccctggccccagctatcctcaaccacttccccagagccctgcaaagaaaataacaaagattcacagattagactttcctctgaaaagtgggggaatctgattttagtcctaggaagggagttgtggtttatgccttttttcttggcctaattattaataaaatactcccccaaagtatcctagcttaaggagtaaaattcaccctaccaaaaatctacagttagctccttttttaaaaaacagaacatttattgtgtgactaatcattgaaattcttaagataaactggatgctacaacagctgccctcttgggtttagatgttgttccttctcagaatccacgcctgaatctgcggtatacaatattcaggtgcctcattcgaccagtcctggtattatttcatctttaagccttggcacttcagttatacttcctcttgcacttagcagggtagccacatttgccacaggatgacttctgaaggtggcaggccttagagccacagtggtggcacaatgtgtgcgtcttactgcaacacttttcaaacgatggcgttcccttcagtatcttgcttctgtggccaagaccaaagagtgttgttagctcttaggtaggcttttgcctttccctaatgcttttaagtagaagatagatgatccttcagaggaacaggagacagtgcggctgtattcggtgcagcttggggccttgaaggagggaaacaagacaagggagttaattcctaggggtccttggagagaagaacaatgatgtctgggagtaggcatggactattgtgttgatagaaattgcagcccctaagaaaggtgccatggctcacacctgtaatcccaacactttgggaggaggccagagccggagaatcacttcagtccaggagttcgagaccagcctgggcaacatagtgagaccctgtctctaaaaaaaaaaaaaaaaaaaaaaaaaattgagaaaaaaagagattgtgccctgcctggacccatagctctgttatgctctaaagcttccacccacatttctcatccatccacccctctcctctatcctccacaagtcactgatacttgagacttaagtctcaagagtttttcctaaggtgaatcttgtttctagtacagattgagcatccctaatctgaaaattcgaaatctgaaatgctccaaaatccaaaactttttgagcaacaacatggcaccacaagtggaaaattctacacctgacctcacatgacaggttgcagccaaaacacagtcacaattttgttttatgcacaaaattatttaaaatagtgcataaaattactttcagactatgtggataaggtatatatgaaacataaatgaattttatgtttagacttggggcccatccccaagatatatcattatgtatatgcaaatattccaaaacaaaaaaaaaattacaaaacacttctggttccaagcactttgggacagatgataatcaacctgtatgtatttggtggtaagcctaacaaaaaggtaactgcactgctttgtatagcacatctttaaaaattgttcaaatctgatttaaggtgctaatagaaattcaagcctagaaactacatttaatgtgaaaatatgtgctggccaaagttgtgtgcacacaatatgttccaattacttagcaacccccaaaaatattttacctgcatgtccactcggcaaaatcagccttctctctgccctcttccagcatgcacactgacactctgacactctgacaatggcaaggctggctgaaatcagcagtgaagtgcaggaatctggatgcttgccctcaccatatcctgaatcttggatgctttttactcctcatcttaacacatgccaatgttatgttacaatatctgacatttggtttgtttcaacattaactctgcgataaaagttaatcaacagtcagcttcattttccccgcttcctgcccaaatcaatatacatgactcctttgaagaaaggggaatgtaaactaaagttgatcctatggttttaacttacctcaacctaatgtatgcttaaggaaagaaccaatcacttacctagataccattgatttagtttctttgtgttgttgtgaattaataaattacagtgtttccactttctaagtaaactttttatcattgattagtcctcagaggcgaatttacttatatttactaaaagaccaaatatactgattttcagaaaatgtaaactgcaagactagaacatggtgtacatgtgtataacttgttttaagtatagagaatattaaattatatgttcatttcaatcttacaatcctccaaaagaactgcatggtttagatctataaaatgaaagataagagaaaacactactattaataattatatttgtgtttttaattttttttttttttttttttgagacagagtctctgtctcccaggctggagtgcaattctcccgtgttcaagcaattctgcctccagagtggctgggattacaggcacataccaccatgcctggctaattttttttgtatttttagtagaaatgaggtttctccatgttggcctgacctcaggtgatccgcctgcctcggcctcccaaagtgctgggattacagttgtgagccaccatgcctagcctatgtttttaatttttaaaaaattttaaatctgttctgtagatgttaactagggctatttatagaaaaggctgctgttttcatataaagtctttgatggtatcacctaatttcccttcaggaacaatggacacatttctcatccaatcccagcattgtatttgcttgtttatctctgaaaacttactctactgtttcaactggcatttagacctcctaccccacttcaagactagatgaaaatcagaggaatcaggcaactttgcctgacattttcagagcaagaaaattggtgaataaaatgggcctttctgtgcctacacttataattctcccccaaaaaagcattgaaaagatcaacctaatatctttactttataagtatcaataaggcttaatatgtacagacagtttaccaatgtgataatcaaatagaattgttagtaacaatgaaatagagtgaccatatttagaaaacatatgctcataaatgcttctcattcaaaatgtatgctttcaatacctaagctcacttccctcttttaaaaatttaaaaaataaaaaatgtttaagaaaataattttataataaataatgaaatgctttttaaatgttattagattcacgggtacttagagaggttagcacaacatcttgcgattggaatttagctagttgtgaacttgggagagttaatatttggttgtaatcatgaagattaacatgcaagaattatacattttacttcacttataaaaacagcttaaccatctaaagggaagaaaagagctaatgtgcttcattcagtatatgtaattacaatagggcttagggcagtgctttccaaattttagtgagcataaaaattatctgaagtagttttaaaaatgcagattcgtggctccgacccccgggattctaaaccgtgaattctaggatgaagtccaggaatatgcatgtttaacacccaaactcaccctcaaataactcatacaaaattagaattcagacccctcttggacaacaccaacataagatgacagatgtacttgttattgcatccgaaaccacagaatcatcagataaaatacccatcttagaccatctttcatatactttatattactttgctaaagaaccaaggtagatagcatttaaagggctgctgataaaagttaaggtttattcatttcaggtactatacttctcattatggtccttaaaaattggcccacagcttttaaaattgatatttaaaagtcatgtggaattggaattgtttcttaactttctgttcatttttactgtcttcaatattcccatttaatattgtttgatattaaaatataatggagtcacagtatttatcatctattcttctttggtttcaagggaagacgagggaaaacaggacctcccggaaaaccaggacccccaggaccacctgtgagtaagcaatacaatgactgtccctttaaagagtctgtctttatgtctgtgtgtttacctaaggattattttactcccctgtagataatgatttcctttattctactgtttagaatgactggtttcagcatttggatgagtagttcatactctctatattcctaactccatcatcaccacaaaccaagagatgagggaggctggtaattgtccatacacctcacccacttctttattacacaaatggcaataacagtagtgtctgcttgaacatcccaagccaagtgtccagatagatgaatcctgttctgaacctacctgaacaccatcttctagatttcttaacatccaggctgttagaaaatcagacatctggggaagcatatccacttttcttgatatgaaactattttgttagtataatttcatgatttggtaaaaagtgctataaagatcatctaaccagttagcttatctggatcctttaccccaagcttctagaaaaaaaaaatattcaatttcttgtagttctggtaactctgcagcctatgagagtctggtttgtgtccaagctgctccactgacactgcactctctgtggtcaccaacaatctctgcattgcagattccctgagcacttttcaggcttcttcttactttactgctacacagaaatgtatactattgactgctctctccttgaaactccctattctgttggtttagcaacattgggtttttttctcctatgcctggggccatctttttgtctccattaacagcttttcttctaccccctacatgttggatggattaatgaatgccagttttttatttcaacccagacattgttgctgagtcccaggctggtacattcctttattttttagtatctccacttggaagtctcctagctaccacaaaagtataatgtccaaaactaatctctaaaaataatcctagatttttttgttcttcatcctcttcatctaaacagtctctaaatcatatcagttctacatcccagtagcccacaaatcctctccgtcttcactgtcaacggccttagtttagacctctgtcaatttgaacctatatttttgaagtcatctgagagctggtctcattgcctctaccttctccaagtggagcaaaacctctaaatcatgacagcatctaggtgggcttggatggcttaaaattctctaaaagcttaaaactatttgattttaaattcctcaatcgcttcttttttcttcaagaaagatggattccacatcctctacatgccattctgggcccttcatggtttgccttttacctgccttggcctatcctcctctatgcccttccttcttttgtaatcagtaatcttcgcttactatttcaaaaatgccatcacttgcaaatgttctccagtaggcctatatatgcttctctctatcttcatgactcagctcaaacatttctcctatagaagctttgccagtgctctcagcatttgaggtttcctcccatggtcctgtatcttacacctcggacagacacggcatgttactttggactcttattttcctcatctgtctgaccactgcactgtgacttttttgaacctctattttctcaccattgcttagaacagtctctagcctatagcatgtgattattgtttatttaatgactgagtaacaaatgaatatattttgtagacgaaaaaattaaaaccaggtaagtgacctaaagaccaaaaacaccctgcaccaccactagagggcctcaacccagtaccctaggaatctcttaggatgtgctcacctgccaaaaatgaacatgattgctgtcctgtcattgatttcatttcactttagccattctagtggattgtcctattaacaatgcattggtgccaattgatatttgttatataaaagcacattgggggaatgagggggtgaggaagcatgagctgggtgtctgcattagtccattctcatactgctatgaagaactacctgagactgggtaacttataaagaaaagaggcttaattgactcacagttccacaggttgttcaggaggcatggctgggaaggtctcaggaaacttacagtcatggcagaagggagaaggggaagcaagcacatcttcacatggcagcaggaaagagcgagtgtgaagcgggaagtgcacttttaagcaacctaatctcgtgagaactcactcacaagacagcactagggggatagtgctaaaccattagaaaccaccctcttgacccaatcacctcccaccaggttcctcccccagcactgaagactacaatttaacatgagatttggttggggacgcagagccaaaccatatcagtatgctagaatctagtcttttaaaggcatcagttttgttgatttttatttcaaagttttaggcaaaacagagaacacattgtaagatctttaaaataattgtttcatgctttaaagaagaaaagctggtgaatgctaacaggcaagattagaccttcgtgtagttttctaaacctatgatgctgcttttaagacaggctaattgttgtctcaaaggaggaatttgaatgttgaaggcctttatgacaagcttgccaaatgtgtaggagagaagaggattacaccgaattctggaatgagttctcaactatagatcaaatgagtttactgaagaattcagaagattaaaaaacatgtgactgtatgataggatttataatattcaattccgcagactttagtttgttgccagagtgtttgggggagagaggtgcttatttttatttcaaatatagatttagaacttaaactcagctatgggtctgacacacagtgttcattaaatcctgggaacataatatttgaaaaaaatggtttattaactttttaaatataataaaatacccaatttgttagaaaaattaggaaaaaatctatgcagaagacaaagtgtttactttggtggcatgatctcggctcactgcaccctctgcctcccagattcaagcaattctccagcctcagcctcccgagtagctgggactacagctgcgcaccaccacgcccagccaatttttgtatttttagtagagacagggttttaccatgttggccaggatggtctcgatctcttgacctcgtgatccactcgcctcagcctcccaaagtgctgggattacaggtgtgagccaccgtgcctggccagtattcactatttttaaagtatcagcagagcacttgttatctcttaggatttcccagggagctatttgtattttattacaatttacaaatagcttaagagatgttcccccttaattgtggacatttttagatcaaaacattattgtttttcatttatatttcttttccaacattgaaccctttatgacatgcatcttactttatagcaagaaggaagtcaagaagagaacaagagacgggttggtaggatctacagtttttctaattgttactggagttagtatatacctcgccccagtggccagtatgtgagaatcctgaagcatgtgttagaatatcttacgaaaatgtgaaatgtattttttaaaaaattttaattttgtctcttgtcaaacagtaattaaatactatgtaatatccctcaaataagtgaatattttatatcatttaaacattatgtttgagcaattagtctttaggaaagttggagggagactttattctagtcagcatgattgtctgcaaagaacaaaggaataggaattaccaggaggcatgatttttttatttttttaataacagcatactttataagaaaatgttcttccctttgggggtttaagatgtttctgaaatcaaacatagtgttgttattcgggggagtgtcagtgaagactttaaaaatcttgaattgaagggactctaagtccccaatggcctgaagcaattcaaataaagtgttttaaccagtccttctacttgattatttgttctgaagccaaattagtatattctcagtttcttacaaaatgtttgtaccaaaaggacaacttgtttaccaaaataatttctgacaaatagctaagtgtgtgcgtgtgtgtgtgtgtgtgtgtgtgtgtgtgtgtgtgtaagaggacaacgttttgtcccctgagacattatatctcctagggaaaaaagatttctaataacggaaaatttactaacactagttttattaaactaacattattaaattatctttgtgaatcagtgtttcatggaaagtcatgtatatcactccaatttagcttaactattattcaatagcaactttttgtgtctttaggacttatttgaaatttatacacatgcaatatgcatataatgaaactattcttaatcagagtgcttgtcattgaacagtgactaacctggttaacagagctagctacaatgtatttttgtaaagtatttgtccaattccttgttaaaaaccagagctgatcttacctatacaaaggaaaaagctcccaaagtgtcccatgtaacttctgctatcttgtcctaagcgaatattcttcattggagggaaactattacatagagatctcttggatttatttcaatacataaagattacgactgagaacagtttttcagtatgagagggctaagcatctccctcgggaaggaaatagcactaactcctgaggaaacaggttcagaggaaagagggatgaagcagaccaggagaatgtattaccatcacgagctctgcattaagtactgtatttccagtgtcttagggaatccttacaactgtcttgaaaagtagaaattatcttcattttataatggggtaaatgatacttggaaatgtcaagtaacttacccaagatgacacaagcagtgaagacagaactgaaacacaggaactgatccctaaacctttattctgccagacttcaggtgtgaaagacaagcttctagtttacagttcaactaagattattcttcctcaaacatcatacctagaacaatgtttgagttttccgttgcaatcaatggcactatcctgactccagacagcgagatggtataggatagcataggatggcggtgaggaacttagtccttctcctcactagcttgtcctggaacaattttcttaatgtttccttgtctccattttcttttctgtaaatttgaaataatagcacctaccccacctactttttcccacagtggctacaagagcccaatgtcattgatatgaaagaactttcttctaaatgtaaagctctatctaaatgtatcttagttccactgttattattctgaacacccattcacactgtagagagaagagattgtcttcaatcagtaattaaaccaacacttcttttctctctttacagttctccaaaaatctagttaacagaaatttgaatgtctatcaatgaattgctgaaataaaagatcactttgcatatgtcacacttattctagatacgtcatgaagagatccaaaagttattcccaattaggtaacaataacaaccaggtctaaagagtcagtgatgttttttctcccgagatttacagcctcttccttgcttgtggggcttgttcctttaccatctgagctgttgcattttattagttgtgatgttctctaagtctcaactgtccttcctcacactccaataaaagcttgtcttttttaaaaaccttccagttatctgagtagcataagcagtggaaagtaatagacttatgttatgataatgagacttggaaagtctcaagacttggaatgcctttgtttatttcaaagtattctggttttcagttcctttagaaaagagaggaaagcagctggaaatgaggcggagcaggagagaaagtaggagaatttaactaatgagccattaaaggaagtaggtattagcccatccatttgacattaactttacttctcattcatcattactggaaaaagcgtttattaaaaaccacactaatttaaaattgtgttattatttcttctgctacaggcaagactttttattttctttctttttttcttctggtattgtttttatgcattgtttcattattgcagtatgagaattgagcagtgggctccatttgtcacatttgtgtgcatagcaatttcagttgaaaacagaaattcaaaaaattttgtaacatggggcaacagctccatctactgtttccataggaaaagctctagtcaaagaatgacaatagctctttgaaggatgtcagaggaatggaaatttttcgatgtttgaagcttataaatccatatgatttttaaaaaattattttcaggattttgttacatttatgcttaccttgaaatttaaatataagtgctatttcatcagcagtcattttcaatgtcaacttgatgctcttttgaggtaaaaatccatacctacttcatggatctctaaaatgcccttctattgtacaataccaataaaactctgcagcattaatttttgggagcttactccaacaaaacatatgcttcttttctaaaacaagtctgatttgaaacatgtacattcatgtttctattttaattttaacttcagtgtagaacttcttctacctttaaagcatgaatcattgcacagtcctgaaagttacaattatacatcagtttgcacaattaaaagagtaaatttagggtgtaaaatttaatttatttactaaacaaatacttatggcctatctactatgtgttaatcactattacaaacattgaatatacagtggttaaaaacacaaagcaacaacaaactacagataaggtctctacctttctttataacttactgtctgtggtgaggcagtacaccaatggttaataagcagttaaataaatagacaaaacaatttcggtttagagtgaggtgctatggggggaataaactgggtaatgtgataatgatttggaaggaggagatgttcttctcattaccatctaattgaggtggtccagggaggtgtctctgagcagaagacattccttgagaaggagctggccatgtaagggccagagcaagaactttccaaacagaaatatcaggacttgcaaagagcttcaggtggggaaaagcttgatgtattcaataaacataaaggagctaagaaaagaatagtgccagaaaagatttgggagctgaatggcttcatcatatagggccttataagaatggaaaagaagggttggggggcaagtggagagatacacgtagccatgaaataaccagttacatctccgttttgtaagtgtgtgtgtgtgtgtgtgtgtgtgtgtgtgtgtgtgtatctgcagcggtttgatttttttatgtgatgaaattactgttcctactgattcaaataaattattctgaaggtaatattgtttttagcccattatctttagtctttgagtggacggggaataggcttgtttgctgaaagaaaacaaaattgacaaaggtttgattgtagcccatttaatttcagtcttgtctgaatccactggatatcactttggtcattagagatggagaatttcatcacatctaagtcttttctttttccccacagctaaatctgatgtttcctttctgataggctataggttgagtcagttgaacagttggggcaatgaaaatacataccctcaaaacgccatagaactaagtgccttccggcacttgtgcccccttatccatcgctgttctcaacttgagtatcttccgtctccaactttatttactatgcactgaaaactgaaaggaaagttattattttcagcatatagcaggacccacctctaaaacaatttagtgtcccaaaacacatttttggactgctgaataaagcagatgacaaaaactgtctcagtgaaacatttgatcacttgttaaaataccctcagaataccttgaatgtgactacatgcattttgaagctcatcatgtatcaatgggaatccaattcaaattcttaacatcccttctagaagcttgaactgatcagggcttagtcatgttgctcagttttcctttcagcaagagaaccacaatctcttctgttaaatgactaaagtctgtgcaatgtaatatcttcagagaaaatgaacctaacaatttatttgagtcaatgggaataggaatttcatttcttaaaaaaaagtaagatgacactttctcagatttaaaaatatagacacataagacctataaaatggagacatggctagttaatcatgtttattgccacttgtccctcatgggggtaatggtcccagacaaaacagctgttcccaacattgctaaaattccagtgtcaccttgtgtgaccacagaatacatagacatgcatgtgaggcagctggggatatcaggttgagattttgaaaactggctctcaggttttattttctaattatttctctttttctctccctacggacagcagcagtaggacattattagtcactttctgacttcctgtgttttttactaatagtggtaacattatggtggaaaaaatattatatttgtacagccactgactgcttgtttcatcttgtattatgttcttgaaaccaactattaagacatctggactgacatgtgttatttacagcaacgatgagacagactatttgaaatccttgatctgtggtcaccaaacttgtaattagttgtgatggtgcctggattcaacatcatttctttgtgttgggtaaacattaagatttgagaagtcaaaggccagtcagatttattagaaccttaattttcagaacgggatatttgtttcctaaataatcttatagtttgcatttgatgatatagtttccaagaggatctccatactgtatgtaattttactgctgtatatctttgtgaggtaggcaagaaaagattattttcatttaataagaatattctaggtcctgatgaataaggagctcagctcaatttttgcagtcagttttctctgcacatcagtaactatagcttagtatgatcaaagtaaagactgaaggaaattatataactagagaagcaacaagttttcagcattgtctaggggacctaaaacatggaagaaaagttggcagaaaataagatttgaagggtcttcagctatgtctgtaatgaattcattaaaaagtagaaagacccaaagcaaatatcgcaaaattgttaatatttgacaacataggattttggactcattgcaatttatattattttctgtacttttcagcatgcttagaatagttcaaattcattttaagaagcaggaaaaacattctatgggattagtaacagttaatatcactgattacttcttcactggctgatatcatcagtatcttctcctttgactgaaatcctttgtggaatggggccacgtgttttaaaactaaaattattaactattttttagaactttcctgagcacactgtctataaccatggtgttcagctgagccaagaattgtcatttgtagatttatcattagcacaacctatagataagggagagaccttaacatcacacatttgagttgaaagtgaggaccacaatcacccaattattccagagctgcccagaatgtccccagctattcaaattgtgcacatgctcttggcctctatgtaacttggcagtgtataagctagtgccaccagcctggttatcttaagtcccagcagtgtgccttgaaacttgcattttcttaactcaggaagagttgtcattctaccaacacttttaaagagaatgaatgttatcacctaattacagtaaatggaaactcaaagcattcataggtgtgggctgcctgtggggtccatgtaagccatctttcctccagattttggtggcatattgaaaaattcctgaggtcaaacaaggggatggaggcacagttgttcctaaggtatggtttttgttggtggtgatcttttgaggacaccactggatacaaataatttgtttcacacattcccctccttgctagttttcatgcccctgtggcttttatcaccttgtactgggtcattgatgttgcatctgtgggtggcaaggcactctaaagattcctgctgctccttatattgcaggacactgacaaataatatttttcctttttcaggacatactggggagagatgagtatgaaacattttatggatggataagcagaatagcagcattaggggaggaatctttttttttctaactatcatgccatggagatcagtcaaaatgtcccactctatcaataaggcagtgggctttacaccaattaggttgatatctggggaaataagtacctttaaatatatttttttctgccttagaaaacaaagtgttaaaaaatctacaagcttcctagcataatttagaaaatctgcttttatgaaatgggttaattatgcccattgaatgcattcactgtcacagtctcatcctcccacttctgttccaaaatgacaagtgaaaccagggactgtgcaattttggaagacaatcagatcacatattgagtattttgcttattcatacaaccataaacggcctatgcttgagttccctcaattacacagctcagtatgcaggccagaagcagacaagcccagctcaagtgagcactttcctggaatacacgggggaacgagtttgaaaaatgtccaaagtggcagatgtgaaaaattctcattcaacatccagagctgcctttgctgcaatccttcacctgttaatcgcactgcctctgaacttgtgaaccagggatgctagcgatatcttagactgagacacttaggagctatagatctttcaaggtatggtgccagtatatgccaaggtgggggaaaagctagcgagacaagacaagatcatggatcacagcactgctcagaattttcagacattcaccaagaataagcatgtcgctgccagcttccaactaaactgttattatcttttgtaggggaaattcccaaaagatgtccttgataaatgcttaaaccattgtactgtatcacttaaattcttcagactcctgcaatgctaatacacaatctctcctccacaacagaatacaatggcactattgtagtcttaagtgaaggatatttcattttccctgagtgagacaactttcccacaactgttatccactgcaatttcatgctccttggagtttctgtgcaccaaaatcatccccaagcaatatactctcttgattagctagtattttattccacctcctttgactatatttattttttcttttcttccaccatcttataagcgcgaaggctccttgcccttcatttggcattattgaaacctcaaaagttatttaagatgctggttgagattgttaacttccttccttttccatctcagcctaactctgatctttctttctcctgctctctttctagtagaagccctccatgattttgaacttccttgtgtctctgtgttgttcctctctcttatccttacccctctcccattctggtcactttcctcttgactcttcttgtcatccaagtctttcttttttttttttttttttttttttggagatggagtcttgctctgtcactcaggctggagtgtagtggcgtgatctcagctaactgcaacctctgccttctgggttcaagcaattctcctgcctcagcttcccaagtagctgggactacaggtgcacgctaacatgccctgctaattttttgtattttagtagagacagagtttcaccatgttgcccaagctggtctcgaactcctgagctcaagcaatctgcccgtcttggcctcccaaagtgctagcattgcgggtgttagccactgtgcccagccctttcaaaaggcatgtctacaccaagtctcagaccattcttttcttggcccttagtgattgtatacctcattaatcctgtgatctttcaccacacgatgccctgctcgattgtttaaaaaccagctttaagatgattggtattttattttcccatcatccttctcactgtgaggtggtttaggggaaagagttaaaagatcaaggcagtggggtcagacagacctgagttgaaacctagctcttgtctactatttatatgaccttgagtcagatatttagtcttttgttatgtgtaaaataaggaaacaccacctcactgggctgctgtaagagctaaatgcaataatgcatgtacctcatacagttgtcactttcaaagggtaactattgttatttattaatatttttgttatcattatcctcatttaatcattatttgccatcttctcattatttttgtctttctttcccaggatttaggaactgacatttccaaagcaaaagggttgatattttttctcttttattatcacctgcatgtaaatttttcttctatctgcttggctcccctccttcctattttcctctgttaaagtctttatagagaaacttcatccatctaagaatgttggcctaaatatatgcatatacatattcatcatctggaaaaactcattagattctattttcaatgtgaacaaacacacttgaaaacatctcttttaaattgagagcatttaagtttcataactgtattcttttgtattgaccaatgaatgaaacaggtccatcagattagcactgaaacatgaattttccctgagcttatttccatttgagtccccaccacttacaatccaagttaacctgaagacttggctcacaagtcatttctcaaagcctctttccagaaagtgaaagccctcagcctaacggtggtggaggcagagatgcagtctgcagagtcctcagcctccctttcctacttggtactgtcttctcctgtccttagcccccaagggccatccctttattcttctcctttcctgtcctacccgccttgctcttgggaaatatgtaatgaacaattcacatgaatctattagaatggaatgattttggacttggttctaccattcatgtggtttggggaaaaatctcttggttttcccatctgttaaatggaaaatataatactacccacttcagttggttattataagaatcaaataagataatgcattttacagtcacattaccctaccacccaagaaaatataagtgaaaatacttttagaattatccagagctgtgaaaacatgaacctttagtattatatctcccaggaacatttgcatttgatctggcagtaaaacctaacatcaaaaaaaataagacttttgttaggacattttgggcataacctggagagcaggcaagatatttgaaggaaaaagacctcctcccaggaacctttaaatttcacctatatgtggcccatgttctctagggtgacccatttaatcccaagtatgagagcttgaggtctctatattgaaatgtaagaataatataaatactcactgaatctgctcttggctttaggaatcacattttatagttcaagagtttctagcagttgttgttttttttgttttgttttttggtgttttgtttttttttttttttttggtggggagaaggtgttggtatccctttagtcactaaaaattctcaacagaagcattctcagaaaaaaaatccattacaattataactgcttaatttatgtaattaaaccccaagagacactgaaaaaaatttcattttgagtaaatattaagacagagaaaaggatgtgtgtcttttttaaaaaaagaaattgagtcccccaatattttctatctaaagaacattattgattttttcccccagaattactttacaacttatatgttgtaattctggtccaaaaatccatccatgagctcttttctacttaactggagctcactataactatgctttcaattaactagccacattcttaggttaatctaaatctgttggtcttgtcttttataaatttggaagaagcaagccctttgctctgtttgataccatttctaactaaaaccaaaaccaacaaacaaaaaaatggctttctccacagactttttcttataaaagcaatgattctaccgaattcaacaaacattgggtgctggtgatgggagacagatactgcagactgtagtgtgctgagtttaaaaggatcaaaactccttgccctcacaaagtttttgttgcaactgggaatacaaacatgtacataagccactatactcaatgtaaatgtgctttactaagttatgtataatgtgttatagatggaaacataaatgagagaaaaactcatttgacattaccttttccaaccattattattttttcatctcaccattcctatgtctgaatttaggcttcctaatgactgtttttttttcttgaatacaaagggaaaaataattactgatctctacttttttacaagccattagaacactggaaatgtttcttgaaaattagtccaaaggactttccaacaagcattctatctgttcttacagaaaagcgattttttagcacttttgaagagagttggttagtacaacttccttcacagaggtttttggtatttcaaagattgttcttgaatttaactgaaaacccacagggccaaaagcagctgtgtgtaacctgaaaacatgtaattttgaatccagaaaaaagcttccaataggagattgaagagctatggtgcataagtggcatctggatggctcaaggagactcagtcaacagagatgaagaggtacagggtacttttagagaaaagggagaaaggaaaatagttcaagattgaggatcagagagtgagcaggcgatttgactaaggagccacagagctcctgattcacaatgtgcagagtgtgctaaagctggatcagaaggctcaagctctgacttgcacagacagcttatggcaaagaacagtgagggaaaaaaaggcaaaaatattgctctttaagctaagtataccgggtgaattggctaaaaagtgaaaatgcagctaagactaggactaaggactatggtttttaacagagaactcttcccaacttttaaactttgggaatgtgcagccaaaactgaaatctactaagggaatgataatgcaaatagctcatcatttttacactacgtgtctgacaagtccggtggcagacatcatggtatttctgttttccacctccagcaagatttaagccaaaaactatttaaaagctgctagaactattgctgagagtatatacttcccaaattgaatatagctttaattcactttatcacacctgctgtagttctttgcagtaagaaacgacatcaggatctctatccacaccaggtttataggcctctcagataattatgaatcagtacagttaggttcagaacagttgtttctccctggagttcattagcatattttagctgctctgtaattgtatactcaccacattaatccagatgtcctatatctcccaatcccatacaaatagagtgaagcaaatctccgtaaaaaacagacattgtataggcatgacttgtgtacaatcatgttgtgggtcactgttataagcaagatattgggacatttttcctttccataaacctttaaccacttttcctagcagagctcctaagagcataagccaaggctgacatgccctctgcagttggcctctcttcaccactggacctgggtcatctaagtgtcttttgatgggtccttgtaaatgcaaacctcagagaaagggttctgtcaactgccctagagcatctacaccaccatgtgatgccgagagatctgtcacttaccacaagtctttaacttctttcttggagttgattggtagtctgcaggatagacaactcttgctaaacttggcgacaactccttggatcttctccagccatatttcataccagaatagaagatagaaaaatagcacatctcttgggatgtggctggtaggatagccaccaattctgaaaccccaaggttgtgttccaactgtaaacagagttgacttttgcaatttaaatgcttatagcttattaatgaccactatctttgacagtgttagagcaaccaagtgagacactgcctcactgactatagtcagagtagagggggacttccagaagactctaattggcatctctttctagtctctgaagggttccttcggaccgctaggagagtttgtataaagtattgcctgcagggtagacggttggctgtaaatttctgtcacattaaacttgcaatttgtggtacccaaactatcccagtgactaaaaaagtgagaaagaaaatgtcatcataaatactcatgatgagattaagtggtagaacctaaaacttcagatcaaacccatttcgagtactactttgaagataagacattttgtgacaaaagcagaacatatgaaaatgtagaagtaatttttatgggtttattaatcttgtggatatttgaataataacgttcaaccttttctgtagcctcattgctcttggcattgtttttagtgagttgtgcccttgcctttgtttttagagggagcagctgcactgagccgtgcatattctcccaccccacccccagtggtaagctcagcagcagccagatcaggatcctgcatgagaagtatatactttgcttatgaaatacagctatcttctgtgtgcatatgaccagtctgtaaaggatcatatcccatttcacccaattttttacaaatcattatcattctattgttttttactgttctcacttacactgctacctgttttattctgtgcaaaccctacaacacatttgctttcttgcttcttttccttactgcctcccagaaccctttgggaggcttcacacttcttgtatctcagaccacctgctctcccaacctctacaaacaaagataggatacatttgaatacagtcacagactaggagaaatgttttgtaatattcagggataatctccctaacatgggttaagagactgtatgaacatagatgggagatacaaggagtagataaagaggcctctctcaactacacggtatgactacagctaaaggtaatgtgttcactttcccgcctcctgcaccaagcactgtgaagtacctggcagaagtgctacgtagaagttttgttgattttttttcaatttcagtaaagtaaatagaacatagaagagtgatcacccagtattctctagggtacacacatcatcatgataagaaaattactgcaaaagtgatttttggctgagtttgcctttaagttaagatagtagagtagacgagaactggctttgggcccaatgctaatgttaaatattagccctgccacttaccagtggtgtgaccttggaccagttaaacatttccaaccctcattttctttatctttgaatcagagagaatgatgggacattcctcctgtcattgtaaggactaaattagttaattcctgctgtaatgcctagcacataataagcactatataaatgtttgctattggccgggcccgctggctcacgcctgtaataccagcactttgggaagccaaggcaggtggatcacttgaggtcaggagttcaagaccagcctggccaacatggcgaaaccctacctctactaaaaatacaaaaattagccaggcatggtggcacatgcctgtagtcccagctactcaggagactaaggcacaagaatcccttgaacctgggaggcagaggttgcagtgagctgagatcgtgccactgcactccagcctgggtgacagagtgagactctgtctcaaaaaacaacaacaaaaagagtttgctattattatttgactgattctgctactctatttgggagactgtattattaatttttatgctatatttaagagttctaataattaagaccctctcttttaactagattgaatatgtatgaagttaaatttacctacttcatcactgttctttgatctaatcagccttgtcatcaacacacactcactgaatgcctactatacatatacccctaagccacctcttaatgctactacatatggtgtctaaaattcctccttgcctcattatatgtttgcagaaggatcaacatgtatggaacttcatgtctcctgactttcaagaataagatcttaacttgcatgttcttggctagatactttgtgtaacaacccccccactcaatgattgctttctttctttacttcctctaactgacctagaattctttacacaatgctggctgctgaaaagttgcatgaaaaatatataatgccataagaattctcttcttacaatagctccgttattgtttcagcatggtaacagcatcgtttgtctttccaatcataggcaacaccattacttgtgaggcccattattttctcaagaattataccagcctgcttctaagtatccatcacctcattcttgtgccctttatgtttagtggcacaatgcaaaggttttatattagaagagatcttcagtcacaagctgctcataagaaacacctggtgtaaatgttaaccaacattaatcttttctgtatacctaaggtgttacctgcatcagtgagtgcagctaacgattgcttcttaaaatttttctccacttttcaaagctttcattccctttgaaaaatattaatctttgtataatggtgctgtttgattttggctaatcatcttccttctgtgtcttatcttataaggtaacatgttaagaacttggtctctataatattttctctcctcctagcttttgagttctggatgaaatgtgcaatctcttttctgagatagttgaacctatttgacttgaattacttaatctaaaataatgctaatctttgtgtttttttatggccctcaccccaaaatgtaatccctgaaaaacctggaaaagtcttctttcctttcttcctagaagctttagggacagccaaatgtatttgcttctttcctatccactccaagcccagcatagtgcttactgaattatttccaggtcaactgaaaactatcaatatttaaatttcttaagcctgagattttatagcacacatcttttttctggcccaaaagtccatgtgcatcccattttcttacaactaattcaaaaaagtaaagcaatagaaaaacattttttcccaatttactaagttaataacatgtgggaacacacagttctatagtacattgatcaaaatcctgtgagaagtgccaaaaataaactgaagagttataccctcttctctgggagggtcttatgggtataattcctttcaataaagaatatgctgagggctgaccttctggtaaaatgttacatgctcccacttaggacctctttttggattcatgcaggatttaacctagaaatatcttaggaacctgatgataagttaatgcccgtgtatttctctattaatcagaatatttgactaaatagacaagtcctttttcttcactatatgatttcaagagttcttagatatgttatttaaatattcattgttttggtaaatgtgtatatatttgtctttgatttgtttataatacagggacctcctggaatacaaggaatacaccaaactcttggtggatattataacaaggataacaaggtatggcttcttttttcccataatttataatacatagaaattttatatgattgtatttttgaaaaaaaacttattaattcctaacttctcagacttttatacatgatcacatgtatttaaacatctttccatactgaaagctatgttttcaaaaacaaaaataaaaaaagtattctgttcagtatcttacaaatctagggttttatcctaataagttttttaaaaattttgttcaaagattgttaatgcaaaacattgtgttccaccatcaataatatcatagatctagcctctctgagggcagaaagaaattatttgatactttgaagctctgggtagcacaacaggtgatagacttcttatcaaaaccaataggtgttgcgccaaaatctcaagcaaatatttgcatactacagttcaagaatgagagtccccacctttcatggggaattacattcaatttccccacggtttttttaaatcacatttgggataggcggaatgctgacgtggaagtatccaaatggcaaaagcaagggagttttgttccagattctacaaggagcataatagagtggcagccaagagaagatctaggtgagatcattgattgattcatcattcaatgacaaatatttggggtctgatcactttgtgtgaggcattctgtccactgattaggataccttgtatacataatggttcatcattgatttcttgcaccacagaaagaattggagacacttccctttatgtctttcttttccatgttcttactttcccttcctgtaattttttctgacagctgttactcctctttgtttagaaatcccaaagagaagtgtcaaaaaaatttgttaaatgactagctaattataaaatcccagtttctctctcttcagaacaaggtcaacataaagacttagataatttatggttgacaaatttaaaatcaaatatggaaagttttttatactttataaatttgatagtgatgctattttaaattatctcctttatttaggttttccagggagtattatattaggaagaatgtttgggatatatttcatgtttccttattaaacacttctttaatttctcaacctactcatctgacaaagggctaatatccagaatctacaatgaactcaaacaaatttataagaaaaaaacaaacaaccccatcaaaaagtgggtgaaggacatgaacagacacttctcaaaagaagacatttatgcagccaaaaaacatatgaaaaaatgctcaccatcactggccatcagagaaatgcaaatcaaaaccacagtgagataccatctcacaccagttagaatggcaatcattaaaaagtcaggaaacaacaggtgctagagaggatgtggagaaataggaacacttttacattgttggtgggactgtaaactagttcaaccattgtggaagtcagtgtggcgattcctcagggatctagaactagaaataccatttgatccagccatcccattactgggtatatacccaatggactataaatcatgctgctataaagacacatgcacacgtatgtttattgtggcattattcacaatagcaaagacttggaaccaacccaaatgtccaacaatgatagactggattaagaaaatgtggcacatatacaccatggaatactatgcagccataaaaaatgatgacttcatgtccttgttagggacatggatgaaattggaaatcatcattctcagtaaactatcgcaagaacaaaaaaccaaacaccacatattctcactcataggtgggaattgaacaatgagaacaacacatggacacaggaaggggaatatcacactctggggactgttgtggggtcgggggaggggggagggatagcattgggagatacacctaatgctagatgacgagttagtgggtgcagcacaccagcatggcacgtgtatacatatgtaactaacctgcaattgtgcacatgtaccctaaaacttaaagcataataataataaatttaaaaaaaaaactaaaaaaaaaagtggtttatatacacagtggaatattatttagccataaaaagaatgaaatcctgtcatttgcagcaacatggatggaactggagatcattaaaaaataaaataaaataaataaggaaaaaaaactgtactggctttttcaaaatattaaggcttagcacaagtgaaaaaaagaatgctgaagcatgtttaaatttaatcaatttaatgacacctgtaatgacacctgctgttataaaataggatttatcataaatgcttcaaaataatgagaataagttggctctgatgtcacagtgtcagctacaaaaacttaaagaacacactatattactatcgcccttggtataaaatatacctagttgctacttagctacttaaatatttgctatcccttgcaaaacttttaaagctcacatctttacaggtctcccaaccctacttctctatacagtttatcttgctgatgagtcagttttcccttaaatgaagatatatggagcatttatattttagagtctaaagttgagaatgtaaatttttaaactttaaggttatatttcaaaaaaaaaaaaaaaatgggcactgaccagagcagctgagtggaaaatcttgctagtaacaaaccagtactttgaacttaattattaactcacctaaaagaaccccagttattcttcttgccattacagaatagaggctcacaggtatttagtccacgtgttctctaaatgtgactttaaagctggaatatgactggataaacagaaaggagtatagctgttatcccaaatgatgcactataaccatttagcattagaggctttagatccatctgtgaattaagagacaataacttaccaaacactttattctgtttcctttgggagtagttagagcccttacaccaaggccccaccaagaaggatggaggtggtgggacccactttcccagcacccacactgccccatgcttctgtattgtaaccacctcctcctcaccctcagcttcataagggaaaagccaaatgtgctatgatgagcacgatgcatgttttccattggcattgtctccaccacctacccctgtctgtttttggacactgagattgtttcattttgcaatttgtagtgtgccagatggtctgactgtagcaaataagcacagagaagtggggcctgagtgaaaccttcctagagattaaataatggaccatgtattgagacatagcaagtgacactccaaggttaaaataatcttcccttttaaattggcattgatttatgtgatgtctgcactggagccctagacctcagctcttcaactcacagtggcttcaacagtcacacagcccagattctgctgaagcaactacccatgggagaatgagtaacagactactcataaactgcccctcctcattccgagctcagagagcccatggttcattttccggtcccaggatcctcacttgccctctggcccccatataggaactgatcttttcctctgctattttccttatgtcatctggagggagaagctcaggtatgagaaaccctctctcctcacagcacaaatccaaaaagggatggagaaggaaaaaaaaagcaaatgaggaagaaaaaaaaagcaaatgaggaatagagagacagcctaaggagtgaggtcaggaagatggatatgagtgtgtttatgtggatttttgcatgcctacttatggatgcaaagaataaaaggtagatttctctctctatcacaaaaataatgtgcaaaacagctgctcccattctgcaagattgttcgcaaagaagcaacaatgctgagcatattcttcccctcaaggaaaatctgctcatgttccagtaaactgcacttcattgtttccagctctgggggttttaataaaaatttgataggctctgtcaactactgaagccatcagacccacagttccttactacactttaaatggagaaaaaaaaatacgttttatctgcggaggccaagtgctggtggattttatatttgatgttgtttttaaagctccatattgaaaatgcagagttgtgttatcttacatcaccacactcggtctcagctgttggagatttatgctgtgcctcccagcaaccaattcttgtattcatttctccaaattattgatccaaaaaaaaaaaaaccaatttgctagcaaaataatctatttttcttttcacatattaaatcataacttcactttaatatccacagactagaaaggacagaaagcctttatccaaaatccaatagacaaggcctttccaagcagtgagttaaacccaacgatggcatataaagtgtaggctcccttggagacactgcaggcaaccttcctgggcccagaagattgagaaataaagtttaggttctaacttcattgctctccttctctgtgccccaggctccactggctttgaggaacgttgtggacttaggcacagacatatggactttcagatgttggtttgattacagacagccccccaactcacctgagtcttcccttcctttcatgaccctccacacttgcggctggtgaaatggttttttgcagataactaagaggttcggctttgagccagccttaggccttattttcaagtgagcacagctttcctagcccacatattatgttttaacttgctagggctgccacaacaaaatatcacaaactgagtggcctaaacaacacaaatatatcatctcacagttctgggggccagaagtcaagatgaaggcgttgtcaggaccacgttatctccaaaggcactagggaggaatatcttccaggtctctctcctagcctctggtggttccttggccatcttcacttcaaactatagcaatagtgatctgaatgggtacctctgtatattttgttgtctaaatatttctgtaccttttaagttttctatcagcacatgtatttttaatcagaaaaataaacttaatggaaaaaccacatgattagagattactggctcatttgcccaacagatatttattgaatgccaggggaggctttcatgaatggcatttcataatagttgagacttgattaatgactagtttctggccagacaaaaaggtgagggcaaagagtggtgatctggaggctgagatgggaatgaccttggtcagtttagggagctgaaaaaagaccatgacagctgaaacttctgaggaagaagagtgaccaacatgatgctggagagggaaatgagttcaggtcatgcagagatttgaaggtgatattaaagttttgagaaatggaggccagaatgtcttttgaaggtatttctctgatcttatgtagagaatatgtgtgtcaggaaagcaagagtggattgtaaaaggccagttagagactcactgcaatcctggcaagacatgatggtgggctgcctgggtataggcaggttgactctgtctcttaagagaagagaaaacatttggggagacagagtcaaccaaactggatgactgatcatatacaaggaataaggatgagggtgattatattagtctgttttcatgctgctgataaagacataccctagactgggcaatttacaaaaggaaaacgtttcatggactcacaattccatgtagctggggaggcctcataatcatggtggaaggtgaaaggcacgtctaacatggtggcagacatcagaagagtttgtgcagggaaacttccctttataaaagcatcagatctcatgagacttattcactatcatgagaatagcatgactcacacccatgattcaattacttcccactgggtccctcccacaacatgtgggaattgtgggagctacaattctagatgagatttgggtggggacacagccgaatcaagtggtattgagaatgacactcagagaggaagagttcaggttttctttctttccttaattgttttcaattgtagaatggaattcctgctcaatttaacaagaaaaactccagagatacattagaaaaaactgattctttttctcccatttctgtactaaacaatgttagcagcgtgatgtaactctattttgttctctcatatgtgtatttgttgcattttttgtttcagttttaaacttgttgactatgaattgcttctagaatttacaagtacatacatcaagtagaaaattagatatatgggtctaaaattcctaagggaagtatatgcggggaatataaattagatatatgggtctaaaactcagaagggaagtatatgctgggtttataaatttggctgtgtaaatattacctaagccacaaaggtaaataagagtgctggggagaaagtgttgagtcacaaagaagaaaatcctgaggaaatccaacctctaacagatgagggaagacgaagtcacagagataggaagaaaccaggagagtaagctatcatacaagccaagagagtgacaagtgtagcaagaaggtcgattactgaagagtccattagagtaagcagcaaagatattattattaacattagagggccacatcagtggactgatcggggccagtgtcaaatacatatgtgtttaggagtaaacaggagttacataagtggtgtcaaataaaaaattgcacctgacaaagttaaacaggcaaggaagacattattcaaggctattgcaataggagagagaaggtagacttagtctgagctcaattccactgaaacaaagttcaggagagtttttaagtattgatgtaagaaagagaacacacttccttgtgtttgctaattggctttacccaaaggaagagtaaactttctcatatctttgtgacaggaagaaggtttacaacttggcacaaggctgaagttaggctcctaccctcccacagagcctggaagatagtggcactatcttctccatgattacattttaaagggatggctcccagatccttgagaaagacgttcccagattgtaaaactaacaggaggcttttagaaagatttacatctcaaagggatagtgaaagaacttacaaatacagattttctaaagcgattggtctagaaaaagagagatcagggtatggaattaggaacaagcctgtccaaagttgattccagctgagggaaacattaaggctgtcttggtcagtggacgcaaaaagcactaactacccttttgagaaaattgtccagaaatgggaggaaagagagtaacttaagggaaatgtgtgctggggaactatatgctctttgtgtgttaagtttaaagaaggtagaataggtaggtagtcagagagagaaagagaagtgttaaagaaattggccaattttagctacattttacttaactttaccaaattggccaatttcacctgatagcaataggtaacattaataaggaaaatctcctaagaaggcagaaggcatgggaatcagaggatttatagaggaaacagccatgataagagatgagacagctcattaactacacccagatgtgcatgcacatgggttggtacattcattggcaggaattagaagtggtgactgaagcctggcgcagtcgctcatgcctgcaatcccagctcttacggaggcagaggcaggaggatagcttgagcccaggagttcaagacctgcctgggcaatatactgagacaccattctccacaaaaaggaaaaaaataaaataaaataagtggtgcctgagaacttgcatttttttcagtgtagttacaggcaaggtcacttgcccaaggactgtagagtctaatgtagtggtctgagaacaataaagaagacttgagaatagggagagcagatcagagatgctcagatacatggagaggccagttgaagtggccagatgtggatttggagtagtgagtatttatccccagaggtgtgatgtttctccagaagcaatctccttaagaagtcacaaagaagatgcatggggtgtccaaagctggaattatttagaagaatatttaacaggaatatttaacaacaggcgagagagacaaagatgtctgcacaaatgacctagtatccataaaaagcggttacagaactattatctgactgcttatactgttacagattgaatgtgttaaaaattagcggatttttcttttgtattttaaattgtttttcacccctagggaaatgatgaacatgaagctggaggcctgaaaggagacaaggtaatcagattttttttttttagatggagtcttgctctgttgcccaggctggagtgcagtggcacaatcttggctcactataacctccacctcccaggttcaagtgattctcctgcctcagcctcccaagtagctgggattacaggcatgtgccacctctcccggctaattattgtatttttagtagagacagagtttcaccatgttggccaggttggtcttggactcctgacctcaggtgatccacctgcctcagcctcccaaagttatgggattacaggcttgagccactgcacccggcagtaatcagattttcaaagtgaatagaagggcccagtattttatacggacttacacattcccacgtagggggcagccccctggcagcagttgggttgcatctctgggagggtgtccagcctgcagtgggcaggggcctccgcctgcctcctgaccaggcagtaggattcgaatctgcttcagggtccagcaaggactgctgagtagcagttggctataagaaagagaacatatcaaggggaaattactgtaataagataaatgaaatcaggacacaagacttgttttgtaattaaatgtgaatccgtgtaggtggcaaaaacaatctgaagacccctttggcaaaatgcctcaagcccaggctcactattttgtgtcttcctaattaccaaaacataagctgccctggcagccatttttggtggggttttatactgtccagtagtggtttaaccaaataattatttcaaaatagttttaaaactaagacactgataaatttccgttgcattccccttgtcatttgcaggtttaattatcatagctgtaaagatgacagattcacttccccattcaataagatgtttcactcctgtttgattctgaaattgtaatgaccttggattccatgtgaatgtgccattgtcagaaaaaaaatgcacattaaatctacaggcagagatgagtagtttgaaaatactctgagggaatgtggcctgtgagtgctactttcattcattcacctgtaaaaattctctagattgagggcaggggattttgacatgaatccaagaaaatatgacttctgtgtcttataaatcagtgcaaccaatccattcaaaaagtcgtacacccatcaccagaagttactgctaaaagatagtctcaccagaaactaggagcttcttacagattgatgattgaaaatgaaattttctgctaaataaataaataaaggcttgacattctgaaaaagacatccaaaaattgattatacagcaatgataagtcatttgtgtgagttagattttattgctagtacattaacattatttcctgtaacctaatagctaacagaaaccatacgccaccataaccaacgcattacattttaagcaatgacttctggacatatgcaggctaaggggaaaaaaaaggaaaagaaagccacaaagcttgtcacataggacagctgagcaaagaagagtgttgtgacttttaaagtatttaaatgatgattcatttcttgaaacaaaacagctgggttctgttttgctgtgttcattaggaaacatatgttacttagacattcttaagacctcactgatgagaaatttgattctgtaaaacaggtgtgtttcaaactctaaggaccttttctattgctcaaaatcttttctaattgcttcagaatcttaagtagaattaggaaaagccagtggcataactgttccctcctctcactcaaataaataacacagaaaagtctacagggaacttgatgcagtacatgatataaagagacacataaaaaaacttttaaaaagcgtgattaacaggaaattgccaataaacaatgcataaaataaacaaaaattacaggtggtagctcgcacctgtaatcacagcactttgggaggccaaggcaggaagaacctttgagcccagaatttagaccggcctggacaatatagtgataccccatccctacaaaaattaaaaatattagctgggcatgctggcaaacacctgtggtcccagcttcccagggaggctgaggcaagaggatcacttggagccaggaggtagaggctgcagtcagctataatcacaccactgcaccccaacctgagcaacagagcaagaccttgtctcaaaacaaccaaccaaacacaaacatgagcatagcagttgctggaagggtgaaatcaactctacctatgtaagtctacttagtatctcttctgaatcaatacattagtttttaaaattataatgtaatttaatgtaatgtaagtcaccacagtgaaaatttaaagctccatcaagctgttctcagagatctctgttgcacctgtggcgaaccccagtgcttctgaatcctggctgcacattggaatcacgtggaaagctttgacaaaatacccacactcaggctccatccacagagactccgatttagggtaggggtcttatctctatttagaagtgtttcagatgactctaatacacaaccagggctaagaaccactgagtaataggaagagcatgagctttgggacaaaaagttgattgtggcattaacagctaggtcaccttgggaaggccacttcatttctctaagcatgcatttcctcattcacaccatgggcagaattgtatctacacaaagagttgatagaaggattaaaattaaataagaggaagttactcaaaagcgcaataactaaaacacatataaagccctcactaaagatttgttcttttctattcacccatctcaatctttccttcctctcatgaggtctcatttagcacttttgaggattaattgttgttctcattcttagcacctggtcttgctcatctttgtatctcccaccataattttgacaaagaagggactcagtttgtgctgtagaataaaatatttaaccagaagaataattaaacacataagtgattcaccattcctttataatatgctacttctcaatgcactgaccagcaaaatagaattactaaaagagccaaccctttggaacccgacactacaatgaagcaccaggacaagcacaaatagcactggaatatacacaccagtcacccctggtttagcagccacatcctgtatcaagaacactacgatacagggagaaccacgacttgcagtaaatggccatggagaccatccacatgaccagtctaccagtgtggaaatgaacgatccctgctctgtggcttgactgagactgacaggatgtggtgaagggataatgtacttgcaagttacttgaggagaactgctgctttatagagacagtagaacaaaatatcagaatatcttagccctcctgagaaaatagcaggtgtcttgtgaggaagactgtcagggaaaaggtggagtcactacagcaccaagctaatagcatcgaaagtgtcaaactgaaggagagtctttcctaatgcaaagtaacttcatcacttgtgtttcaactcatctctacagtgataaatcactgaacattcaatttaaataaaaaatacaaacccatatgtgtctaaggttcaggtagaaaatgcttttgcttgcagaattttatgaggaaagaggtctctaagatttccttccagcccaatgtcatccaacgactatgtggaaagatggactgcaaccccttttttgtcctgcccctgtttacctgtagagcagctatgaatatacttacttttatttcaccatgtacattgtcctccccttcccctttgatattggcagatttgatttttacaagcaattgctagactccttctcagctttctacttttattttattaggcaagtctaactagtaggcatatttttccttcacacctatacaatggaaactgtagcacctaccagatgggtaacacgaaggtcactctgtacaccctaatgcctatacaagtctaattgtttattttctctatcaaaccaacaacaatttgttcctaaatgtatcccccaacttctcccttgccttaccttgaatataatttactatgtctaggaaaaaaaatggcttctcttataatgtggtaagaataagactgatgatacacaggatgtttagatactaccatagaaaaaaacaatacttacgtagcttcctctgaattaggaaaaagcctgtatacagcacactaaactttaaatttgatggatattgcttcaaaaggcacattgaatatttaaattaagaacgtgagtgaattcagagaaaaaataagctacatatatataggtggtatgtagacatagcgaatattacacagttgggatgcggatgactgaactttgggaaacactgctgtagaatatttgtactgacaggtctgcaagttggcttcttatccatttggttccttggctctccaacagggccttactattactagctgaaagcctaatggtataaaaaattagtactgaggtgagtcagaaaagcaaacacttctttcctagtatcaactctcacagcacaaaatacttctatgaccaaatacatgaatttttcacacacagcaagcaagcaatcagttttgcaacagacaccagctgattgtcttctaattccattcaattctgacactatttacctggtggtagcaacagatcccacagattgagggctcaatcccacaatgctgccttccacttcatatgccaatcgaaagccccgtgttgttttatctgtgcttttgaccaactggctataaatcggggtccttatgaccccgtccgcggcactaatttgctggaatggctcacagaactcagggagatatttacttacgctcaccagtttattataaaggatgttacaaagtttacagatgaagaactgcataaggcaaggtatgtgggaaggggtgccaaggttccaagcttccatgccctccctggtcatgccaccctccaggaacctctaaacttcagctctacagaagctctctgaacccagtccttgtggtttttatggaagcttcattatgtaggcgtgattgattaaatcatttgtcactggtgaccaagttaaccttcagtctctctcccctccccagaggttggaggtgaggctgaaaagactgtaatcaagccttggtccttctggtgaccagcccaatcccgaagctacctaggggctgccagctaccagtcaactcattagcatacaaaaagacgcttattgctttggggattccaaggattctacgagttgtatgccaggaaactgggaggaagaccaaatatgtattttacaatattgttatcaagcagatgggctcactgcccactgtgcaccgaagccaataactatggcaccagcttttcagaaaagaaagattgtattgcaaaatcagccagcaaagagaccggaattgggcttaaatttgcctcctggatttggggattggggcaagttttaagggatcagagggcaagggacgggatttagggatgttagtttggcagaatctgattggacagcttcaaatttgaccatttatggtaaggtatgttgaggcagatttttgccctggatattccaggctaatggacttccatgcttctgaaagagttcaggttctggtcatgtcccggtcttcttggttccacccagggggtggaattgttggttccagctgttgttacaagtcaaagctttttctgttatgcgtgcctaggctgcatgacttgcagttttgggctctgttataccttaaaggtaacttgacattttgttatcaacagagtaggccctgtttgggctggttccacagttatactatcacatgaggttttaaaattttagtaaaattaagattaaattaaacaaaacgtattccataaatctagaagactaattaatacaaacatgatcttgtctatccattacagaaaatcacaagacatggattaggatatacatataaaaataagccaaagattttagggctgtagtaaatttatacttgaagcactttttggtagctgtttgaggcttcaaaatgaacaattaggcacatccacaggggtcaggattagagatgttcactgcagccttgtttataatagagaaaagctgattacaatcaaagtgcccatcggtggggctgagataaacgctggtttattaacatgttagaatgctactcatctgttataatgaatgaatgagatcatatgtatcaatagagatggatattaaaaacaatgctgagtggaaaaaacaagtcatagtatgttatttatgagataaagctatttatggaatttgtttcaaatattcaataatatattgtttatgattccacatatgcagtaaaagtacaataatataaactgaaaatataaatactaaattcttgagagtggctccctctgggtggaaataggaaatataggggatttcttctttgtaaattttttaatttctttcattttgggtacctggtacatgaaggcttggtgtattctactttattatgttttctgtatttattcttttgaagtaaaaaaataggccaggtaggcaaaaacggtatatgctcagaaatgtaatggtgaacatcattttgcaaaaatgctcttgaagttagggaaaaaaaatcagcattacatatcttctagagactatgtttaatttaagaattgtgtaggtattcagagatcttggtaaacactaaaaggatgcacaatgctgagactcctctgaagtctcattagtgatataactcctttcttaagtattacttctcaaattatattttccaaaaacactctttatatgtcacatacagatctctcttcaaggtttttgaccagaacctcttagacatttctaagctactgctgtcaccacatctacaagaatgccttatttgcccacagccaatcatctaagtagcattataaaccctggaaacagctgagagactcgttttgcttcatataactgctgactctgcccacctaaacaaagaaaaaagtgcctgaaataaaatgagtctggattattgtgccagttaaacagtctgatgtctttgagatcacacacaaaaaaaattggttttggcacaccagaacaaaattataatttttctcctctagatagatattctttcctggaaaaataattaactttgtttcacattacatttaagtatcataatgaaatatatggatttctaaaagacataaagccattgtgaagtactgacaaacacattatcataaaaatagcctaagtagattcagaactttgcattgtctgttggatgctaatagataaattgtatagttagcaggagagcaagcaatcattctgtatctgacagtcacaataatgcttctctaaccatctgcaaaatctctcttctgctttgtcttgaaagggtgaaactggactaccaggatttccagggtctgttggccctaaaggacaaaaaggagaacctgtaagtattttagctttgaggacagaggaagaatatctaaaaaacgggattaaaaatacgtttccaaatcagccccaattccacgtgccttggttgatcctgtcatgggaaacaacagatcagatcttcaagcaagtactagctacgctatgcactaagtctcttacatgtatttacacacttaatccataaaaagtttccataaggtcatctattatcacctgcatacttcaaatgatgaaagtaaggcataaagaggttaaaaaactttgcccaaagtcacacagtactaagcattggagctgtgaatcacacctaggtgagttgattctagaacctaaagtttaaaatcacaaagctcctctggtataactaaacactgcagctaaaataataaaatcaatgtatcaaaagactagtacaaatttatccaaaagaaattggaaacacatctttctgctcaaacaactgttctcagtgtaccttctgaagttatttttctttcttgatttttgtatgatcaaagtggcttcccaaccactttttggtattactgtggccagtttctttcaaaatgtagttctttttgtggggaaaaagagaaaaaccctacagtatcatttatattcaaataggaccacctaaagtgattagagaaatcataggtacaaaaaatgacttgttttaatgcttcttttaaaaaagcagttttcaagaatcagtgagaatcaggcttaacaaatgtttcatctttgtttaaagaaaagtaatacatcttattaaaccactctacccctttctttacgagactgaataaaggatattggtttatcaggggataaaacatgaagaggtcactaaattgcctgcatgacaaacaggaacattatttaaagtattcagtgttacaaagccaaattttccctatgcttcagctttaaaaaattaacaatgacagtaatttttgcagctttagaatcagtctgtggcctatgtaccccagttcttctaccttcaggagtcgtgcttgcccttagtattcagttcaagccttcttacacaactacaggatttggcagtctttaatgaggttctccaactgagtatttgcaataatgtctggaaaatctcatgtctcagaaatccagcctggtgcatgcccctggtacctgccaactctctaggtgctccacacttggaggttcctcttaccatctcttagctgcttctctaggtctccactgtcttccctccaaacctgaacactgacaccaaccttctcttaatttccacatgatgcatggaggaccctgcagtaagattaataaaaattttactggaaaatcgaggatttttagagcagaaaggagaaactttcagtgagttagagcggtgcttctcaaatgtgaacatgcacttgaatcccactgattctaagtcagtaggtttggaagcaggaccagagagtctgtgtttctcataagctctcagtaatgctggtgttattggtccatggaccacactttaagcagcaagggttgaaggagttcatagttcctaggagtcataggccttttcctcctgcagggatttcctctggctttctttctggctaactttcaagggcagtccatgtatctcatgaggactgcctttagccctgttttccttaaatagagcttcttttcctcctaactcttctccataccaggtccctattcatcccttaattatcccaccaccccatacatctttacttgccaccttcctctacccctacattaaaacaacgcaaattttacattattacggagagcagtttagctttttatggtctcaaactttctcttccagaacaggatgtagactttactttgcataataatcagaaggcccaaacagaagagtagtattcattcaaaggtaaattctgaaccactgatcccgaatggtaactaaaatggcaaattttcccccaccataggacattcagaatatggtttgatgtgtaacacatcagagctaaaatatacttaagatcacctagttgaaccccatgattttatagataaagaaaggggagctctaaaagattaagtgacttgcctcaaatagtagccattggagccaggactaaatatcaagtatctagacaactaggctcccgggtttttctctttttttttttttcttttataaccagttactttagtcaatgtggccactaaactttacagtggctgtaaataagcaatgacatgagcagtgtcatataagcaaaaacaagcagggaaataagaatataaataaagccttgatctaatatatagaaatcaaccactattaagatagttcatcatgttgggtagatatgggtatatagttgtcccttggtatctgtgggggatgggttccaggactctcagaggataccaaaatctgaggatgctcaagtccctaatataaaatggcctatttttatttgcatatcacctatgcattctcctgtatacttcaaatcatttccagattacttataatatatattacaatgtaagtgctatgtaaatagttgttatactgtattatttttaaaatttgtataatttttattgctgtattattttttattgtttttctttttcaaatattttttatccacaattgcttgaatccatggacacagaacttacagatatggttaacctcttcaagtcattttcattaaagtaaaaataaaaactaggaaactatttttaaaataatgagtttgtatatttaagcacacaattaaccaactggaagaattcaagtgaatgtctttcccttcaacgtttttatcaatttcttgctgtcattcccatttcacattcaattggatgtgtgtgtgtgatcgttttctatgtggactaggcaataggaagctttggccttgggcagcattccaatttgtcagccacttgggattttataaatgatgttagaatgattaactcattgttcatttgggaatataaaggagtttttaaattaattatcatatatttcctttaagctgcaaagacagactgtgtgacactctgggtatttttggaggtctgtttgcaatgggaatctgagtttggcctatagggtttatccacaccccggtttggagagtttatttctaagagcgtttaattctattttctaccccttctccttagggagagccttttacaaaaggagaaaaaggagatagagtaagtagatattttatcactaccttgggttttctacttcattgatttgtttctctctgattttctggtatgtttactttggagtctaatagatttgattaaataaggtccatgagcattttactttttcctctgtgatttttaactcttttattttgataaataagaaattttaagccttgttaactgttgtcatgcaaggagacttcaacattggtttgagttttctaatacattgtttaaccagttactaatagtgattggacatgaatgttatacaagacatccatgtaggatatcaaaaatataaaattaaaataaaagatacatttttttccaaaaattctgttaatggcacaaagtggatttatcaaatatattaataagtcacagaaaatttaaaaagcaaacttattatagccagtatcatcctcttttgtataaccttaattttgttgtgatttttttcattaagcacatataactaaccattaagcacatataactaaaagtagaatcaccaacacatattaccttaaattctactctccctcattctttctctgaagttttaattctctgggacatgagattagttggtgtcaaattataactatgtcagctaagtagagaatgcagtgattgctaatgggacatgataattagtgtcaaaaatggcattgggggaaaaattattataatgaagaaatcaagaaagtattatttattagtagtaagtattttgaatcatgttttagaatgaactctccttgattttattgtgtcttccataatttccctttttattgtatgttaattagtagaaattcaattaaagtatcagagatgtccatttccatctgaatttaagcattacccttatagtaattattttatttacagggagaacctggggtaataggatcacagggagtaaaggtaatttcctggcattcttcaatttcctctccaaccttaatgagattatgaaaattaaagaaacattgatctttccttccccccacgtgtttagggtgaacctggagatcccggaccccctggtttaataggaagcccaggactaaaggtatataagaaataactaagatttcttgggaaataatttgggaattgtagccattctgtgtaaaacatggtgctttggtatgccactcattttcttcacaaatgctctccaagactttatcctgtttccatggtgattttccccactggctgcatttattacacgcatagtaactgtcttttggttttcacaataggatttctatactctttttcagagcatattcacaatagcatccctaaaagccttaagagtaaacaatgtgagctaaatctacgaccttgagctatattctaaaaggaacagaattcaagtttcagtttctaaaccaaaattatgcaacgttgagttgcttgagtttcccaagtgggattccacaggagtgtcccaagagagcagcttttggaaaatgcaggagaaattaatgtggtgtactcccagacaatgggtagggcaagttaccaggtatcacctgctggtgagaacacataaattaaaagtatctggaaactatcttggtaatcacaaagcacatttcagtattatacagataaagtgggaaagtgggatggtggaaagttggtcttcctatacatgaagatcacactattctttacaaatactcaggtacaatctatctttttttttcttttttagcaaagctaaagtatataccaccttttattttagggtcagcaaggatctgcaggctccatgggacccagaggaccgccaggagatgttgtatgtataatgtctttgatatttctggaattgaaattgagactaggacatgtttttaaaaacatcaacatgtgttcaagtaactgagttatccctcatttcccaaagacatgggtcatctatgccactaaaactgatcatacctaatgtcaggagctattgggaagactagacccttcatataatcatgtgaggtccttttgagtatcattagcctaataaattggtttttggagctcaagttaatcaaattgtcattttggacatgcttgtcagtgctgtaccagcagtagaggagattggaaatgtcaaaagaaataaagaacaccaaaagagaaagcaaacattttcaatattcacagtttttagttcaagtctccatctaaggaagacatttcgaaagcttctatcattttctagcaaaagccttccaaaaaaagcaagtcttttggctaaaagtatgtctggaggaagatcgacagattgcattataacctagctttagtggacttaaaatactcaatacacctttctattcattatccggatcagctttttgttccttggacaactttctagccttctgacaacttgggagctgcgagctctccatcagttcacacttgagcaaaataagaaaaatccttggccataactccttggagactgatcactatctgactatgattagagttccctccaggcaactcttaggatctctccttttttcatgccctgggaacagccccttaacctcacattctattctccatgctcaccgcttgagcctctcctgtctactagtcggtgcacatattctgcttggtactttgaacacccagtttatagagcaaagcttttgatcactcccctatgccaagtaatgggccactgtagataaacctagtggacagatcttatgaaaagagagataatcctggtggcacaagtggagccacaatgctcaaaaactgagactaagtgatagtggccagagctataaaaagaacaaaatctaaagggaaagagccactgtttctaaaacatagtaaaaacatatttttctagttgccctagagttctttggaatcattatgtgatgctgccaaccaccatccttcctcgatggcaataatatgggtgagacgttcggttcaattcgactttagtttctttcctatggcatccaggtggcttcacttgaaacaacaaaccacgtagaatcactaatatttttccaggtcttaaaggccaaaatcaatccaactccttctattaataggttatatgttaaaattctgttctcttgacagagattcacagatatagggaaatgttattgtaagagatgttctcattactctttcctattaactctgagttttctagggattgccaggagaacatggtatcccaggaaaacaaggcattaaaggagaaaaggtatagtttacattttcctcattttatatgttaagtagataggaggaagagacagaggatcataagggagatgaaaggacagcccagggcttctgggattgtacagattgtgcacattaactacaatgtaaatggcaccccctagagttgtgcatttggcagccctggttctggcacaggaatgccatgtgacaaaatgaactgacagatgaagatatcaggagtctgaaagtcaagctcagttaccaatcctggtataaacctaagaagtctcttaatcttgcaggatctgtttcttgatatctacatggaaacagtgcattaacgttgaaccattattggagaataacttaaagaaaacataaagatcgtctatagaaatttattaatagatatgcccttttgtgcatacacatgcatatgtttcatgatactgctaacataactaactgcaaaatctaaatgcactgaacaggcatgaattaggtactcaataaatattattgagtgagttggtgagtgagtgagtgagtgagtgaatgaatgaagtttgactggctatgatgacaacttaaaacaatggaaaccactacctcctcacttcccaccatgaacctgagcatcaaagtaagaatcttaccttgttttctacagggagatccgggtgggatcataggccctcccgggcttccaggtccaaaaggtgaggctggtcctccagggaaaagcctgccaggggaaccagtaagtattagcccttttgttaatatttttcttgcaagttcattaattactacttgtgggttcctagtttcagatcacaagtatgggaataagtttaggtctgcaaaaaaaggaaaaaagaacttaaaacagaactaccatttgacctagcaatcccactactgggtttcttttcccaaaagaaaataaatagttctacaaaaaagacagatgtattcgtatgttcattgcaactctattcatagtagcaatgagatggattcaacctacatgcccatctacaatagactagataaagaaaatgtgatacatacaaccatggaatactatgcagccataaaaaggacaaaatcatgtcctttgcagcaacatggatatagctagaggccattatcctaagcaaattaatgcagaaacagaaaacgaaatactacatgtcctcacttataagtgggagctaaacattggttgcacaccaacatagtagagatgggagcaaaagacatgggggactactgatgggggagagttgaagggaggcaaggttgaaaaactgtcaggcactatgcttacttccttgggtagtgggatcattcacacaataaacctgagcaacatgcaatttactcatgtaataaacctgtacatatacccctgaacctaaaataaaagtcaggggaaaaaagaaatattcatctattcatcttattgtttcttttttttttttttttgagacagggtcttaatctgtcacccaggctagagtgcagtggtacaattatggatcactgcagcctccacctccgggattcaagtgatcctcccaccccagcctcctgaatagtggtgacaacaggcacacaccaccaagcctggctaatttttatattttttgtatagatggggtttcaccatgttgtccatgctggtcttgaactcctgagctcaagtgatctacccatctcggcctcccaaagtgctgggattacaggcatcttactctataaatcagagataaaacctcttaaaagtttgataagcaaagggctttcttctgaagaaaatatacatgcatacaacattttgcatatgattttggaagattcctaggtcccctgaatcctaggcatgaattctgtagagatctatggatcccagtcaggtacactggttttaaaacataaacgttcctagggcagtattgtaaaacagaaaaactacctgaaatttctcttccagaggttttgcagatatcatcatggtttgtcatttgcagaaaatgtctttgtgacccagactattcccaggacattgaaaactggactgccggaaaatctaaataaccaatgtttttaaaatatgttttatatgcctttgtttttcatctcctttgaactttttatgtattaaataataataatatttctcaatatcaggtgcctcattttataaataaaaatattttatattttaaagcaactatacaaaatctataacatattgaaatttttactccccgttccttattcttttatagaaaaagatttattcaagcaagatgaagagtgatgaaacatattttagttataacttctaatgtgtttataacttttctagaagaagatatgtattcatactttttttcttttagggattagatggaaatcctggagcacctggtccacgtgggccaaaggtatacaaatattatagttaatttttaaggaatgaataattaacaaaatacagcagaaaaatgtatgtctcttgagccttgcagtaacagaagcctttcatttcacagggtgaaagaggacttccaggtgttcacggttccccaggggacataggcccacaagggataggaattcctggcagaacagtaagtgaaattcattcgagtccttgttgattccaacattgtgaaacaaaatccagtgtcaaattttaacaaggagaaaagaatagaaaggtcagagacggaaatacaaataaacactatccagagatgactgatcagcattgaggttgtatcacttaagcacagagacagtacccactgtttgtttattaacttacagatgctggtcacacatacactaagtttggattagaagcagtcatttaacccttatacctctattctatatattaaaaagcacaaatacatgtttgtaagatagtaagaatgcctaatattaggtcaatatatattacagcttgtttttaattaagttaaaacaagaaattaatatttaaactggatggagtatgcataagtgaaatgacaccaaaaaggtctgagtaacgtcttcagagtgaagagatgatgttttcaatggtaaaaataaataatgagaagtttttaaagtatttaaactataaggacagagcctagaacagcccctattaataatgaccactatatccacacttgtagatcaaataatagtaaatgtacaatttttatttactatggaaagacataaaacgtttttgaacaagaaaagtggaaataaatggttattctaatgacattaatttagaaaattggtctgtgtggtgtaatacaaaaacaaactaattgttttcatattatgctcttaacattcaacataaatacaattctgacaccagctgtgtggggttttttttcccctactcatcaattccccaatggacatcaactgaatgttctattagtcaattcatgtctgacactatctacctggattaagagtcagatcccacaggttaagggctcagtcccacaaaactgacccctacttcagaggccaactgcatatctggaccttcatgacttctgtccaaccagctataaactgggagcttccatgacccccacctcaggttctatagtttgctagagtggtccacagaatcaagtaacgctttcttacgtttactggtttatgatatcagtaaaggatatgataaacgatacagttgaacagtcagaagagatacaaagggagaggtctggaagggtccctgagtgtaggagcttcagtccccacggagttggggtgtgtcactctcctggcacatgggtgttttcgccagcctggaagctctctaaactccatattttgggattttatagaggcttcatcatgtcagcaagattgataattaactatatttccagcccctctcccctcttcagagaacgcggggtgggctgaaaggcaagcttctaactgtggcttggtctttctggtgatcagctcctatccaggagcccaccgagagtcacctcattggaacaaaaggctctcctatcacccaagaaacccaagggattaggagctctgtgtcaggaaccagggtcaaaaaacaagtattagaacaggactttatgttagcaacctattgttaaggaatttacgagggttttaggagctctgtgccaggaactgggggcagagaacacatattattttatcacaatatcacatccttatattgaagttatcatgaaaagttaaaagaaagcataagcagtgaagggttatgttgtgaatgagggttgtctgatttgccagggcaagaatgtaaaagaacattggagatggaaattaagccaagtaaaaacttgtatcagaaaattattagaggctgggcctggtggctcacacctgtaatcccagcactttgggaggccaaggcaggtggatcacttgaggtcaggagtttgagaccagtctggccaacacagtgaaaccccatctctgctaaacatacaaaaattagccaaacgtggtggtgggtgcctgtaatcccagctactcaagagactgaagcaggagaatcgcttgaacccgggaggcggaggttgcagtgagctgagattgcaccactgcacttcagcctgggtgacagagtgagactccatctaaaaaaaaaaaagaaaagaaaattattagggaagtgatggtggtcgaggaaaaaatcactcagggacacaggataaataggaagggaggaaaaagtagctttggcaagagcagtgatatgaatatttatttatttaaataagaaaagaaaaatcagtgagcagttactgaagtcaactgctaagaaaccagctcttgacttacttaggtgaacattcctcatgcagaagttcatggttacctaagagcggtacaactaccatcgttaagttccctgataatctcccagcctcattttatttatccgaaattctaattttctaaaagtagaaaaaaaaatcattgattagtgttttacctcctactcctgtcactgaacactgtttctggtgatttattccaagagataaatgactcaaagttgaaagcagaaaagaatccctgagccagttacccctgtgggtggtcagtttctgacaggtggaatttggatgcattctttgtgccctcatgaatgtgcagtgacagattatggtaatgatatagatgtcccaagtccctgagcaaaatcatgttgatgtttccagcaacaggtatctgattaagtattcacctacgacctgaaagtcttggccgactttgcagttttccacgtgtgtacggtggcaaaccctgttgttcctctaagtaaactacaatgcttagtcttttatgtcacttggataatttatggacattcttggtggaattttaataataaaatctcatttgtactcagggcgcccaaggaccagctggagagccaggtattcaggtaagctatttaactaattttttagcacagcaaagccagcttgcttacttgggggaaatgactgaaagaccatcctcataagtaactgtttttatttccctccttttccagggtcctcgaggtctccctgggttgccaggaactccagggactccagggaatgatgtaaggactttctttatctaccctcccccattttaatctgcacctgtgccacgtgcaaagattgaacatggatacctctgttttcagggagttccagggagagatggaaagccaggcctgccaggccccccaggtgacccggtatgtagacaaaccttgtctgatttatgtatcttaaatgcacccagaagccaaacagcctaccaagcaagttttgctgtccaaactaattagaatgctcggtgactgcttggtgattttgtttatccccattattttgtcgagtgaaaaaaaattcaggctggatcagcatttctgtgtgtgtgatgaatacttatttcctaagggcataattcaactgtacaattttgccccaggctgagccttggcatataatgtctcaatcccattgaaaattgagataaaatatattgccacgatttctattttttctaatgctagtggctaaatgaatttcatttttctaaatgaaattttgcaggtaagttgcctacaatatggtatagatccattgattctgtagctttaaaatgttgcgatgattaaattatgaaaactggcttgagtaggctcttagaaaaagggttaggcacaaatgtgtgtttcaaagttttattttaggttaaaccttgctttgagcaacagtgaaacccctttaaatagcctcagactcggcagttataatttgagaggccatatggtacatgacattgtattaagagtcttgtataataaaatccaaatctggcttctcagttctaagcctcacaaatcctttctacctcccacagtgtttgggccttatgtgcctttataagctatgtgtggaggcatattttggcattactttaacgccactgttgagtgaatcacttgtgcatttttctgggaatcttgcaaaaatgttgcttgggtttacacagtgtctctctgaaagaacatctcaagacgtgtggccaaaaggtagcccaagttccttcagtgtttgtcttgcctatcacttaagccaactgtaggttctttgaacttccatgagaaataactttaaggcaaacttatctggtacttttcatatttctcaacagcctgatagtgtgttcgccagaggaatgatttccttttaataaataatttatctttatgtattatttaaaaccaatgatataccagggacagcataaaggttgccatgaaaatataaaatagggatgcacagtcaaaactatgatatgtgtgtttgcacattcaagagagaagaatagtgaacatttttcaaaatttgttctgaattctatcagtgccatgtgcacatttctttatacgaaacataatgttaagccagtgattctaaagtgagacaccagaagcttcatggcattttgaggaaaaatgtctacattatactgtatgtttatattgtattgtgttcatatataaatgcatgtatttggttttatcttcttaaccacagattgcacttcctctcttgggagacatcggtgctttgctcaaggtactctattgctatgtaagaaattatgtgttaatttccaggaaaaattagaaagaaaaatatttagcagaaattgagtcaattgcttagctggaactaaaattcaatttttaaatggcaggacatctttaagataggaaaataaacatgtatcttatatatcttgtgccatttatcctaattctttcactctcttcttctttaccagcctctcattttgggtggggcaggggtggagggcagctggtaggatagttatgaattggctacagggaaggaattatgtcattagcactctggagtagattattctctcctctggaggaacatctttctcttaatgggtgttgactcaccctggctcactactgtgaaacctaatctttctcgctatatctggcctggtcagtcccaagatgaaaatcagtgctgctctataaatagccacttacaaggctgaattttgatgtcataggattttacaaaattccacagttgacaagtgccctaatacctgttactctgttcaataaaaatcacctctacctattatcgtctcagggaattaatcttgctacctctttttttttttatctctaacacttccctgtattttatcagtaaaacaggtagggggggatgataatggcacatatgtaagggtatgtatttgcatgtttctgcctgatatgctaagattgagtgaggccacatgaaaatcaggcccttgacttcatactcaaacacagtgtgttgtatctgtctttgtatgaatggacgttgtgtatgtgtacacacacacacgcacacacacacagactacagttatatatatataatttagtttgtatttctagcatttagcccagtgatttacacaattatttgcacaatagtaagcaggcagaaatatttgtttaattgaattcaaaagactcgagttccggcatatacatttgtaaggtagagttttgagaatagatatataaacataagtgtaaatatgaatataaatataaaaatatattaaaggagtttctaagacctccaaaaccagcagtttttataagccagagaagaatatttgtggggatttcaggaaaatcttatatttattgagttaaaattacatgccactcaatatgccactttacttatatcatcttatttaatttccttaataatcttatgagttcaggctgttgcgcattcccactctatagatgagagaccagaagttctcagcagttaagtaactttttcagtcatagagcaagtaaatgtaacattaacacaggaacataggtcctcagacattaagtcctagattctttacaagacagtggtgctggaaatagcaggattgccggagttatatcatttcagaatacttagggttctttaaggatgagaaacttgtatgctttagtagaaatgaatatactggtagaatatgggatctcacagaacagataaaaggaccatgaataggctctgacgggaagtggaaccagggctctcagaagtggaactaattgacaatctcgcccgggaatcatccctctaatgagtgtgctctgccattgcaccaatccctgcatcatttcactaaggttctgagtccataacgagcaggacatcttgactgatagtctccacaaactgtatacaatagaagaaaggggaggtatgtagttccccgaacaaaatccaaatacaggaatttagactgtgggttggatctgtcatgccaatgtaataacatcatgttaaatcctgatcttgttaccctatatgttaacactatctctctctgccttgagtctttagacaatttgatcatcctgctttctgttcgcaaaaatatctttgattaaagtattaaaaagaactggcataattacaggcaccttcaaaggccttcttctagattaatcagcatatcaatccctctttgaacgactttgtgtattggttaataattgatgcatctttattctttccatgagaaaatcttaagacatttttccaagaatgttaacaaaactcagttatttaaatttgccattctggtaaccctaacccaaagaaaatgaagtcagtttcaaatgactcttaaaaattatgtttatcataatgattatcattttttaatgtttcacttaaacagtctattgaataatctattctaaaatgttgctccatattgatatgccaaggttttgctccatattgagatgccatgtttgtgtctgcagataattatctttttcatactttttgaaatatggaaatcattttgtttttcttaagttctcaagtgtctctttatcttcatagtttttcaggtgtcagtaatagttctataaatatatatatttaactcccctgccaacacattaccacctgtgaaataatccaggtggtaaaattcatctgggaaacattgcatataaccctagttcccttttatatattcagactctaagaaagaccaccatgaagagagctttttcacccagcattttttttatgtactttaagttctggggtacatgtgcagaacgtgcagctttgttacatagttatacacgtgccatggtggtttgctgcacccatcaacccgtcatctacattaggtatttctcctaatgctatccctcccctaccccccccaaccccccacaggccccagtgtgtgatgttcccctccctgtgtccatgtgttctcattgttcagctcccacttatgagtgagaacatacggtgtttggttttctattcttgtcttagtttgctgagaatgatggtttccagcttcatccatgtccctgcaaaggacatgaactcatccttttttatggctgcatagttttccatggtgtatatgtgccacattttctttatccagtctatcattgatgggcttttgggttggttccaagtctttgctgttgtgaacagtgctgcaataaacatacgtgtgcatgtgtctttatagtagaatgatttataatcctttgggtatatacccagtaatgggattgctgtaacccagcatttttgagatgatttgcctcatgtattcatcagggttctctagagggacagaactaatagtatatatgtatatatgaaaggaagcttattaaggagaattgactcatgtgattacaaggtaaagtctgacaataggctgtctgcaagtcgaagagcaaggaagccagtagcagatcagtccaagtctcaaaacctcaaaagtagggaagctgacagcgcagccttcagtctgtggccgaaggcctgagagcccctggcaaaccactagtgtaagtctgagagtccaaagctgaagaatttggagtcttatgtttgagggcaggaagcatccagcacaggagaaagatgaaagccagaagactcagcaagtcaaccccttccaccttctgcctgctttattctagccgagctggcacctgattagatggtgctcacccagattgagggtaggtctgcctctcccagtccaccaactcaaatgttaatctcctttggcaacaccctcacagatgcacctgggaacaatactttgcatccttcaatccaatcaagttgacactcagtattaaccatcacaccttgtaagcttttcagtatcgtgcaaaattagtgttccaaggagcccatgtttgaaaatcagatttacattgctattcattaggtcaaaaatattgaatttgaatagccatgggctttcttgccagcttcttatcaataacaagcttcacttctttttcatgtttaaagattcttccctttagggaaaaggatggaagaatggaaacttaagttgtcctaccttctgtcaactgttaaactatctcccccactcagtggcccttattctgtgcctttcttggtcatattcttattccaacaatttatttaaaaataagcctatatagagcttttcacacacactttctttagctgtgtgatgagagttatgtttatcttatgagctcagacacttgaagtcaagccttcccagatcaactaaaggttgcagagaaggcaatggaaaggtcatttcacttagatttcctattgtcacttggatatgacctaggagtcaagtttatgtcagtcaagtaattatttctctcgagtgcctccactgacaaaatgttagtaaactgtatgtagttggagaactaattttgctcccagaagaacaaatcctttcttcacaattttttctgttgtttttaaaatggtttatgctataggttgtttgaattctgtaatcttgctgggttttctaaactttattaccactcccttttaaaacattctgctaaacaattgagcctcagtttttgttcttgacttatgtgtcttttccttatttatttggaattttctatttaagtgtcattggagacctgttttaaaaataaaagttcatcaatatcataaacagatatcactgatgagctttgtaaacagtttttgcctcacaaaaattaatgtttttaaattggatacatcaagtgtctgaaagcagaatgacctatctatatcactcatctccagaggttccaaaaaaacttcacatcacatgaaacctcacctttatagacggcttttatgactccctcagtaaccttatctttatactcattagaatttctgtggcaactgccaagccagtgtcccagggctgaaaagcaacaaaggagaagaaggaggtgctggtgagcctggaaagtatgattccatggcccggaaggtgagaagcctggctgaatgtttacgatccctgtgggttacatgtagtgcatcctctcagttctgttcttcctctgtcttctagggtgatatagggccacggggtcctccaggaatcccaggaagagagggaccaaaggtaagaaattctctcctccactttcccctgtgggaacctcaatttagtatgaaaaaaagaacccgatttgaaaatagacaacttttaaaatacatactatatatatatatgtatgtatgtatatggagagagagagagagagagaaagtgatgtaaaagtcacttgcaaatgttgccatttatttgttccctgaccctgtccaaattacatgccccaagtgttcttagaagagatttttttcatttccaaaagataagaaaaatgattgcatgtgctagctgaatgtattgtctttttagggaagcaaaggagagcggggctaccctgggatacctggggagaaaggcgatgaggtaacagattcttttctgattatatagtcctaatattgattctctttacgtggctcaacagagtaaaaatgttaatttttctatagctcagatctgatgctataaccaataaaaacaaagaccacttagagcttttaaaatgctgacagattttaaataacatatttatgtttattaccaagggtccggttttagagacaaggaaattaaggcacaaagttaatatgtcagttataatttttctgttttcatttaacagataataattccagctctctcaaaataaaagtaagggaaaggaggaagggaaaatttactcaaaagaattccaaggtagctaagagatttaaaggaatagtagttggacaaccagcctagcagtaagggcagctcaagaacccagcagagcttccctgggtaccactaaactctgattaaacttcagcaaccttggattgtctgtgtctttgctcagctttcaaattcttgggagaaaaaaaaactgtcagaaaaatcttcttgttctagtttacatcagctgctcacccgttggactaaggttccaagtccaatgtgcttttgagataatggtataattttctgactgtaagccatggtgatgctcaggacatcatttttttcttacataattcacattaactcttagaaaaaccaattagaatgatgaattgctgttagtttaaacagttttgatactactaattcttaatgaaagtaagtaagccatctggcatatattaaccttgatgttattgtagaaaatcataactatataaagaaaatctatttttctaggtggagttatattttacattaccagtaatcatcatgtactattgtttctaattaatattgcttgtaatctagaaaactttgaggtttgattttttcccaagttaaaaattgaataccaagtatattcaatatttattttcatccataaataaaacattatcttcaaaataagttattgtgcttttgcttcctcatgttccacagaaggttttactaaagtacaagcacaataactgattttcatagtccaacagctttgaactacctccacccaaaaggtaggctttagaggcaattgagaaggtaataacaaaaagatcaggaaataattggaattcaggttttgtataagtaactctaagttaaagtcactagaagttaattttcattgattctacagggcacttttctctcttggtgaactgaaatccattgctaatattcctccacactttagcgggctttttcttcggtacccctcataaattctgtaacacagttcacaaaattgtacacaattctcattacatggggagttccagcaagttcaggagattcttttccattgtttcttcacactacgtgaataatatgaataaatctgaagtaaactattgactcctttaggccttgtagggggaataaggtggtgcagctttttctttagcagatgggaaataacggatataatcttgtcttctacttggtctcagatattatttgaaattacaatttgttgatttgtcaaagtgaataaaactttgaccaaaaacaagtgcatttccaactggccaatgaactataccatttcaacatacagtatggacttgagatctaatcttatgaaatctcaaatgtctattgtactctaagtggaaaagatacagagggacaccccatctctttgagacttctaattattatgtctttcatctgtttggaaaatgagagagaggagttgcctgcttgtttgttactcttagaaaagcaacattttcttccacatttttcacagacgttgttgcacagctcaaggtagcaacttggaagatgctaatagaacacatgctaacctttgatggagtgatttcttgcttgaaatgcaggtcttcctataatatcttgggataataattgataaattagacatgaaaaatatcatcagccagatattatagcaacagaaaatattcttggtagcaactgagctaggatttgcaaaatgaaatatcagagcagggtaagaacatagctccaatggtctccaaatatctctgcaataaattttaatttgtattttagtttggcactgtatgttaaattgactgtcctactctttaatatgtatttgtcttctttaatgatcatcttgtcttctaaaattatcttattgccctttatgcatccatagtaactttcacttttactacagaatttcagctttttcagagaaaggctgatgggaatgattttttatttatggactgaggtttattttaaagtttaatgtggtcatcaaaggttaatgaatcccaagcttataaattagactatctaaaaactcactcaacatctctggactgattcagtgttgagactaaaagtagcaaaaaaaaaaaaggaatacatatatacgtatattttatgcatgtacatatagaaagaattttatggaaatatgggtattttgaggtaaagaaatttatggtataacatttataatctccagtcatttagaggtgccattatcaatgaaaatttttttactttgcatctataaacctgcatacaagttaatgttaggggaataaaaagaatgagtaccacataccgatatgtagagcctgcacatgcacacatgcccatgtatacacacatacacatacacacacacacacacacagcactgccaatgagattgataaaattttgaagaaaaatatgtcaacattctttaacaccaatacacacaagatttggcccaagacttatgaggaattctagcatgttcaagtagaatttttaagcccttcttcatatcatatcacatgaatagacctgaagtaacacatgatgccatttggcattgaatggacaaacctagaagaacttggtccttgatcccactgatgcaaagaaacttgatccagctcacagtcctatagaatgctgataatcaatatgcagtaatatttccatggccacatcatctaatatttataaagtatatgaaaatgcatatatcataatagtaaaaggtaaaggaattgtatgatgacaaagaatggtatggcaatccagaaagaatattttactcagtaaaggagactaaatcctgaaagaatggaatcattcagtctagaacttgatgtatcacatggttatctgaaataacaaaagcatattttaaaatagttttttctcataatagaagtgatctcagtccactattgaaaattgggaaaatacaaaaatgcactaaaagataaaatttctccctattcccactacccaggagggacttctggcaatagtaatgtcatggtccacaactctattagtccattttcacactgctataaagaactttcctgagactgggtaatttataaaggaaagaggtttaattgacccacagctccacgtggctggggaggcctcaggaaacttacaatcatgacagaaggtgaagaggaggcaagcacctttacgaggcagcaggagagagagcaaaggaggaacttccaaacacttacaaaaccatcagatctcctgagaacttactcactatcatgagaacagcatggggaaaaccacccccatgatccaatcacctccctctctctacatgtggggattacagtttgagatgagatttgggtagagactcagagccaaatcatatcaacaacacctcatctataaattccaaaaccaaagcctctgaaaaccctggaaatgtttcccaagtttggctttgtttcccaagcaaattcatttggcagcccaatctggcctaactcacacggagcttgtctattccactctgtcagaatatcatgttttgccacagaaatatttgtgtgtttattagagggcactgcctcaggcaccactgcagtgtgatataatattcagtatgtatatcatgttacctgtgaaatgaagtgataatccagaattctaaaacacatctaacactaaagtttctgataaaacttatctatttgtcgtgataaaataataaaagcctgtatgtatcattcccatcttttaggaagtacatttaaaattgtttaaaaatttagaccctgtgctatataagatttgtgactttatttttacatgttttctaacttttttaaaacatgattttaataattgcaaaatatttcatgttataaattgtatgtaatttatctaacaatattctgttgttggcaaatgtatcaaagtaacaaaactaattacataagttagctaatcttaccatttcttccttgatatataaatgtatcagcatcttaaatcctatccggtataattagtgctattctacaaatctaaggaggggagggaggggaaatctattcattattatgcttaagccattaaagcgttccaaatttaaattcaccagtgagccaaatttcttcttataataaactgacaagctaaaataaatattatatcataaaacatattccatttttccctagctgaatggagcttaagtgtaatcatctatttcttcaatggcattctgccaatctaaaatttgtatttccatgttttaccagtacgagattcttagatactactgctgacggagtggccctataaaataagaaatgctctatgaatcaccagattaaattatgtttgcttcagattccatgtcatggcattttagctcacccttcttactctttaaaactgagtattcacacatattcttacttataagtgagggctaagctatgagtacgcaaaagcatacagagtgatataatggacgttggaggcccagaagtgaggagtataggcgaggtgtgaaggatgaaaaactacctattgggtacagtgtacactacttgggtgatgggtgcactaaaatcgcagacttcaccattatacaatttatccacataaccgaaaatcacttgcacccctaaagaaaaatttttatttttgaaattaaaaaattagaattaaaaaagtatatttgtatatgacaaacattatgtttctcgattagctaaataagtgtttaatgttcaatggtcaaaatatttgattaactaaaatgccttcttcccaatgatataacagattttatgatgggaactatcttttccagggtcttcaaggaattccaggcattccaggtgctccaggcccgactggaccccctgtaagtatttgttaaaacgattgcactcacagcttatatctgctggtttgatgcaaggtgaattaattttcttcattgccttttgttctctgtgcctctatgtagattgtccagatattgcctggaaaagtagcctcatccaagctctcagattttcatttagtattacttaaggctactcagtgtcctggggacttgcctcagaattccaccagaccagaaagcagtctgcgattaagctagtgtgtttgaaatagaaattgcatataaaagagcattctattttttatttataattttttggcactaacctttagaagagatagtcaaatggcaccacaaactgagaatttattttctaaaggaaaaaaaaagtgtgctaaggattatcagatttcatttatttttgttcctatgtataaattaaaatacctctattttagtcaaggctttcactgcccctcaaacacaccatcaaagccttcgtgtctttcactgtcttgttttcctagaacagaatctcttttgctttatacttgccaaacccaatctctcattcaaacagtttaattctagagtcatcagataaaatatagtgcatgcagttaaatttgaatttcagataaacaaataattgtttaatataagttcatcccaaatattgtgtttttatttgctaaatctggcaacccagcacatgcttcaacttctccacctcatcctttcttagagttcctatgccaatagagtctttaccacaccagtaggaatgtaattatatattttaatgttctgaaataaggattttccataattaaagttgtgtcatttatgcttccgccacagttatacagaacaaacctggctttaaattgttcactaaaattaaaaacgatgaaaaagagttgtgaaagaaaccatgaaaattatagctaactctgttcccaaaggattaaaattaaattttatttttcagtggtaaaatgcagatcatagaactcaatatgcacactgttaattctgccgccttgaagtatttaaaatgttgatccctaccaaaactatagctcatttagaaaggcataatgttatgtaaattgccatttaaacagcaagactagattcttaagtgtatcaaaaggttccaattaaggtcattaaatgtggttgacgaaggtgaaaaagcgaccacaaatacaaattttacccttccaagggcttatcagcaggatacagctgctgtatcagccagaagaaacataagcttctagggcttatttaattaggatcaaatgaccttcaaaatgtgtaagttttagtaaccaacttccaataccctttggccatttaattgttgtttctgtaacaaacttagttttgtgttttacagggcttaatgggaagaactggacatcctggtcccacaggagcaaaaggtgaaaaggtacaaaggaaaagcctcacttaccatccaaactggggcttgaagtgggagcaggatgagactcttcacagagagagccataaaatcaagcaaagcctaaaagtagaaatgatggtagaaagtacctattcttgtagtggatttggaagaacacaggtccaaaggttattctaaacacgggagatattttcctaggagaaaggataaatagaatattggttccataaaacaaaagttcaggctggattcagaatcctgggcaaccatctatgtggaaggattgggtgggggagcctcctggaaggatgcaagtaatgtggtgtctaccagggagttccagccacaggggctgtcagttttctatgacaaaataccatagacggagtggcttataaacaacaaacatttatgcatatttctctcagttctggagtgtgggaagtccaagatcaaggtgctggcagaatcggtgtctgacagagtctgccttcttgttcatagatgtcacctactagctgtgtcctcacatagtagaagggtgaccaagctcccttgggcctcctttataagggcactaatcctattcatgaaggctccaccctcatgacctaatcacctcccaaaggccccacctccaaaagctccagacagcagactggctctcaggaccaagattctggtaaccaaagagcttgcagagacagtcgagaagttctgtccctagacggtcatgggggaaatttactgaagaaccaggatagcttgtttcctggggagatcagttattggacagatgggttgccatggtcagaaaggaggaccagcattagatgagtctcagacaggacaccacacagttttacatgtttaccccatttaagatctaaactggctctattgtactagtccaggcagatccagcaagtaagtggaataagcctagctatttagatcggggaagtaagaatcaagagtccacatgagccactcaagcagcttccacccactcgtcaggacacaagttccctgaccaacgtggaacataatgacatcaaggagcaaaggaatcccaacacattttgaaggaaacaatgactttattctagatagtctctgcacatttttttctgattttatcccaaggagcttgcccaaccccactagccttttttctctgttctctatggaaattattcagtcatagacttgcctttgaagttaatgggaattccacactgagatgagctttggggcacaaatgagagtgaatatatgacttttaattgtgccgggggaaaaaaaagacttttcagtaggcacatatttttccttgtttgttgactcattagaactatgacataattctttgaaggacactgccagttgtcagcagaatgtgacatgtcttagagagatagccacatcaaagcagtttgggaaaagaaacaatatgcttgttctttgttatatattctcaggcagaagcattgcaagaaaaactttacagtttatttttattgataaacatgaacaaaagattttatgatactttcgttacaaaaaatggcagggtattggaatgaagtccttgattacatttatgggaatggactaaaatccctcaaaattcttggacattgtgagtagaaattttactctatctgaattcttttttaattaaccatgtcttgccatttcccctgctatagagggacttaagagattttatgaggctattattctgagagaaaagcagagttataggaagaactgctgagagacaccagagggacttcaatagctctgcttattatggaccgataaacatctatggtttataaaaatagaagtgaaatacatttttcaactttcaacttgaattcattttcacaaattctattttcagtctgcttctcctgtaagtctaagactgtttaaattgtagtgactatttgctttaaacagtactataccacagttgcttctgctcaggaagatgtgtctgacttgggtgtaaagtcagatattaacgtaggaaatggaagatgaagtttccctcctgcagacacaacacaggttgtgatttttttactttcgtcaaattatgtggatgtcccctctggttcccaaaagatgaaggtggtagaaatgaggctcaaagtgaaggctgactcagagccacaatcccagagcccactgcctgcttgtaggagagttccacattgggagagttcctccagctgcactggaagtccaggacatgagcacctgggttgtctggctccatctaaaaataagcttcgtttctagagctcacacagtgagagtcagaatgggtatgggaaaagacctttacctgtcctgcggtctagaaatgtatttcctgggtaaaggagagcccagctgaataagactacaaggctgaaacaacatggcaagtcatatcgatttcagaagatggctctgtgattaatttcagaagatagtttgtaaacctggggtagaaacgtctacgccgctgatatgtctatatatcccttgcagggcagcgacggaccccctgggaaacccggaccacctggaccacctgtgagttgttctaggcttaaaatttaaaattcatgtgtttacttaagacttttataactcagaggtaagactacatttagatgttttcaaagataaaagtcttctgaatttcgtgtataaatataaatgatagccaatgtagctttaaagagacctgatttgttctccttttggttcagcctcaatgtgcaatgctcagattggcatactgcgggtctccccatcttggatttaggaatctgggtttgtgctccgactctccacttcctggctcggggcccctgggaaagtcatttaaccttaatgtgcttcattcacagaaaggagaagggccagaaaaatagatcctttccgctgatgcgagttggtagaaaatctgatattatgctatatgtgttcattcccattcatgatgtctgagatgcaaggaaactctatttatgtagctcttagtgaacaaaaagtacaagaggcatcgatgttttcattattgtgattgagacagatgcacgctccgtcagggaaacggtggagaggagaggagcctctctccgtggcaagtctgccctcatgtggggccacgctcgaatcgcagccgagccgagctgagatatcacgcaaaacacccttttctaccccacctcacaggaatactttaagaaaccaaactcaccatagaaagggcagaattgaccgtgactttccgaagacaatgaggattattatcagtctgcgtgcagttgcatgctttgtacacgtaaatgaagagattagcactctatttcctaaacttgtttcctaaatctgttcatctgtgttactgaccttttcccttgacaagaaagcaggacggaaagtattagggttcaaatcctaaaattcactccttcccccgtgggcagaacagcaaatataacatgagttcatgaaagggacctataattttataatgcacttaagatgtctttgtcttccctctgaattctccaaaaccatccatccttcaaaacacagtttaaatgttttcttccctgggaaacctcctttggaaatctcagatgaaaatatcctttgtctctccaggacgtagcacactaaaatatggcagacattcagtcgctgtcagataaatgagttaaataatagagtaataaatggatggagcgtttgtcttccatcactagtgtttggaagatgcatgcaaattgtcttcacagaacactactggccaccatcatacagaaacaatgaaacagtgacttcttcaactctgcaactgatatgtgaaaactgcagaaaggaaaaggcagatttgactattgattctatacaaatgtttaaaaagaaagacaaaagattctaactaaaatttttatatggaaatttttcctaaatgctaaaatgtatgatttttttaaactatagaataagttctcctttaagtgttggttactctaggacatgtcaatttttttcaagatgttcttattctcttttatcctaaagaatttatttttgtagaaacatccacacagggttgtggataatgtcatctccccatttaccttaattttctatttggtatgaaaagactgtggaaaaaaattacttttcagtagccaaattgttccctattcacatcttcatcagcactatggcattatagcctgcaggttagcaggctgtaaacagttagtataaattgacaattcagaaactgaattttaatgagcaaatattttcctccaaatgcattagtgtctcatctgtcaaacctgaacattaattaaaccccaactgaaagtatccgtgtgcttcaggtgtagctcacactcccttttcatttccctgcatttgctttggaaaagctaaaaattaaaatgtattattttacttagagtattaaattccctttgtaaaatagaatagaaaaaagtaaaaaatagaataggaatagtatcatttggtaaaatgataaaatgtagagatgcaaagtattaacttccaagaataattctgtatctcacctctttcctaagggtattccatttaatgaacgaaacggcatgagcagtttatataaaattaaggtatttatatttgtaattatttaaaatccagttatagactgctgtaaattcgtctcatctttctctttttcttttcttttcattttcttttgaagggaggtgtgaatgttcccagttacccagggccacccggtcctcctgtaagtacagttgtttatcatcaaacacactttagctgaacaaccacaatgaaaaacaaacaataaaaacctcttaagttcactgaaaaacgcatgttatgaatacagccaaattttacagcagaaggaaataagtaaaaccaattataataaaattgagaaaatgtatgcagccaaaataatggaaaacagcatttttcatggtggtgtcacttttttcattgcaaatctaagaactaagtcaatgtccaagcaatcatttttatgaaatttccatcaagttatatttattcatcttattcttcaaattcaaactgtaattaaagcaaaacttgctaatattcgtatgtgtattaaggcaaattggacaacagtgtttcttattctgtaactgctttggtcattatttgaaaaatgactttccatgtttctcttacagggcccaaaaggcgatcctggcccagtggtatgaatgttcccatgttttgtgtcatttagaatattggtctttgttaaattttgaaagaaaagcatcgggcaaaatggcctgccttcttaggtgttcatcaattaacatgctggtggtgacaagcaggccacaatataaatgccagcaatatgttctctgtttctgagatgcattagtcctgatgttgtcactgcccttgaggtttgtctctttccgtcagtgtgtttttaaaatcatcctgtgatggaggaagacacatataaactctgataaatggggcactttcttctaatagccctcttctgataattgattcaattttaagtagattgtggaagagaaatacttactggaaagaaatcccttaatatatctgccatctccccaacaaaaaaaaaaggaactgtttatttgctttaaacgtcttaggcaattattttgcaggagatatgttttgtcataaggctgcttattaggaggaatgtatcaggaggttatgctcagcatggaaggagatcatgtcctccagccgcctaaaggacgataattgttctcagcatctttctgaaccatggagcctctgtaaaagttctgccaaattcaattagatgccctttattgctgggcattttctcctgtcatgtctttttcaagcatatccttcatgtttcatttgtatatattttaacctttgggtatatacttgaaactcaaatgtacctaaagctgaaataaattttcaaaccactttccattgccatgtgaaaaaaaatttaaagccttttcattatagtacagtttgttaaaactcaatgaataaattttaaaccagcaaagggacaagtcataacaagtaatgtttttatgtctaaaaacatattttaaagagatgcattaaagagctgtttgattttgttattgggcaatatatattaaaagccaaattgttatcccctgaaagcattgtttcaactagttaggatcatattctgtaattcagtttcctttgttttactattcattcaccctgtctaccctatctttacctgaaaccaactatacgcttcattctaattttaattttcttacatcttgttgataaaaatttcctcctggtctttccctctcatactcatacacacaaaacagcttctctgaatcatttaaaagcacctaggcttctcactgactttttgggaacattctttgaagttcttgcattaataactgcagattaagataagaactttttaagtattataataaaggataaattataatttactggcattgaaaaggggctggcaacaaaaatgtagacctatttgagtagaatttgaagagattagtcttcaaatttcttagctacaacaaaggatgaagaataaaaactgattgaagtgtgttccttgcttttagagatgtgaattgagtgagtgaagcacagaaacagaaaaatgcaatcatgaaatgaaatacacatttagtgtacacattcagcctcatcctggatgaaactttgaagttactcttttgggttctctgtcagcaccaccctgcaactctcatcatctcccaccagctgtcctgtagggaaaaataatagttcctgccatagaaataatccaggaatgatagaattgtagatcacagagcaaaaacttgagaagtctttttgaggttggaaatttactcttccaacattcttcaaatcccatgacaatagacctgcctcactatttctaatcttctccataaacctttctagaggaatattacccttaattgaatttattatcttctgaggcgctccatttcattcctttggtattcagtttataaatgatgtttaattaaatatttaattattgctactttcaaacaaatgttgattgattgagcacctctgtcttaaggactgttgagaatgtaaacaaggagaatcaaagagtgtgtttcctttgtcagcaacctagggcctcttatacagaactttatgcagaacagaatctgaacttttttttttgatcagttgtcaagttacatattaggggacattttaaaagatttctgaaacatagaaagcatatcagttcatatgctcactcactaagtattctgtaataagggcaatgttataaataataatgaagttatatccctggtaatatttttgaagcagattggaattatgtatgcaaaaacacacttacagagaacacaatttgaaagctcttgtttctttgtgattatgtctaaagcatccggtgtcctaagaaaatatttgcagtgaacattaatttattaacaagaaggcatcaaacaactccccactttatctcttttttaacttaaagccctaatgcaagcttgtccaacccatggcccatgggctgcatgcagctcaggaaagctttgaatatggccaacacaaatttgtaaactttcttaaaacattaggagatctttttgtgtgtgattattttagctcatcagctatcgttagtgttagtgtattttattggaagacaattctttttcttccaatgtggcccagggaagccaaaatattgaacaccccttccctaatgctttttttgttcagagttagcaacttccttcaccacagcttttcccaaagtgtttcttgaggatctacaggctccagctagcctgggaccatacactagaaaatgtaaagatttttaaaaatagaaaacactaatctacccccttccagtgactcatcaacttgagcaataacttttagtgttattggagataatgatcctggggtcaacttcttaagcattcacaattcttgtccagctgcagagaatacttaaagatgataaacactgctttgagtgctccatcttcatctactcttaaacagtttattcttattctctgaaaatctagcagcaccaggtagctcacaaattggcaaactttattaaagccccatctttcattctagttcttattgaaattggagttatcactgagtagagggattcattctgattagattctcaatcagaatgaaaatgattaatcagaaaatatacctctctggagaatagcttttattctcaaactattttcaaacatcaaatgcaataatacattacttaaaaatagggcatatcatttccttgctaaattacacatcaatgtttggggtgggaaggttaagcaaaaaaatctttgctttggaaaccaatgcttaaaaacattttgattattgctcctgcatttcttatgttcatatttaacagggagagcctggtgcaatggggttgccaggattagaaggatttccaggtgtaaaggtaagcacagaagttagaaatgtgttcatttattcaacattcaaaattgtttactgagcacctaatgtgccaaaaactgttttaggttagggatatataaaggaacaaaacagacaaaaatgtatgtactcatgggacttacattctagcaaaaggatatagaaactaaaagaataaacattttaaaattacatcttattgttggggctatggaaagaaagaaaaagtagaatgggttaaggaggatcaggaatgctgacggggtaggagggcagtatctgagcaaagacctgaaggaggtgagagggagagccaagtcccctccagtctggaggaataatgttccaggaagaggaaacagcaggtctaaagagtctgagacataagatttcctgatgtatccaaagagaccaggggagggagtgaggagatagtcgtaggagatgaggtcagagaggtgggggtggaggtgggaagtggccttgtcatatagagcagtactactcaatgtatagccagtggagaaccagtgccagtctgcagaccctttgttatgggttcagtggcaaggttattacagagactgagagtaagcacctaaaaacatgtccagtaatttgtctaaaattgtctagcaagcatgtgatggtagaattatctttgttcatgatatgttagaaaataaataaaagattgctcttttaccacaggaagtttgagaaacactaataaaaaggcttaacagctattgtaaggcctttatctttcaatctttgtaaaatgcagagccatcggtgatttctgagtagtggcatgagggaacttgcagccagagagttgcaagggtggaagtagggaagccagttagaagatatccagtaatccaggtgccagttgatgctggctcagatcagagcagaaacagtggagatagtgagaatgcctggatttggatatattttgaaggtagcactgataggattttcagattgattgcattattagagaataaagaggagtcaaacacgaacttcagttttatgacctgagcagtttgcaaaatagggcggacatcatctgaaatgaggacagctatgagcaaggcctattttgaaggggtggaattatcaggagtttaattttgtacgtgagaccaaatttggagatatctgttagacagcaaagtgaaggtattgagtaggcagtctgatataaaagtaaggaatgtggaaaagaagtctaagtggagatataaatttggctgttctaagcatagagatgctgttgtaaagcggaagactggataagattaccaagggaatgccaatagagtttttagaaacagaagagtcaaggattgagccccaaggccctccagtattaggagatcaagaaaaggagcaaagagcaaggaagactaagaagtaaccagcgaggtaggaggaaaacttggtatcctacaatccaagagagaataatgaatcaaagggaaaggagtgatctcctgtctcaaatactgcaaataggtcaagtacaatggagatggggccaggtagaatggtcaagtattgaacattggatttagcaatgtagaggtcatggatgaccttgaccagagaaattattatttcactatatggtaggaacaaccgtggacttgaatgggtttaagagagaacgaggaaaaaaaatagagtcagcaagtcagtataaataatgctgacagagttttgctgcaaacggtagcgaataaataggccagaggctgctagaggaagtagggtcgaggttttataagatagattttgaagataataaaaatatcagactgcttatatgctaaaggaatgactcagtagagagggggaagatggggatgatgatgctggagagaaaggagagagtgctgggccaatgtctttaagtagcctagagggaaggggacctagtgcatatgtggagggtttggcttcagagaggatagtttatctacagtaaaaggggagaaagcagagtatggggacagaggctgataggtgggaagatgtattggatggagtctacaaaagttgttttctgattgcttaaattttctcagataaagaggaagcaaggccattaatctgagagcaaggtagggtaagaggttggggagaaggtccatagttcagggaccacagaagtgtgatgactgctcagccctagggaccctcttgaggttcatggtcatgaactgaagtgagacctctcaacaagactatgtgtgctggcaaggcacagtggctcacgcctgtaatcccagcactttgggaggccaaggcgggcagatcacctgaggtcaggagttcaagaccagcctggccaacgtggtgacaccccatctccaccaaaaattagccaagcgtggtggcaggcacctgtaatcctagctactcaggaggctgaggcagaagaatcacttgaacccaggaggcagaggttgcagtgagccgagatcgtgccattgtactccagcctgggtgatagagccagactccgtctcaaaaaaaaaaaacaaaaaaaacaggactacatgtgcttttccagccatgttcagacattcaggtaaagacacagaataggaggggagttggatttcaacaatgttctgcttttgacggtgagtactggacggaagaatgggaaaagacccttactggcttactggtatacacaagggaatgattctaacaagtaaccatggaattttaactaggcaagagagagggagaggccattgagggagtgaaagataacaaatttgtaccatcaatggattagggtttaggggttcaaggtactcaaagagtgaattagaatgatgtggaatggtggtccaaagttggaacgcatgaaattgagattatggatgggcagcaaatatttttactgacaaagtgtcaggtgtaactatgaaaataagaggtaagttcattcgagaatagtggttaaggaatgagaggcatgagacatgcaaatatttcattgaatgaaaagttctagtatattaattttaaaaatgaaaattttgtaattcaaaaggaacagagggaaattgatgtgtattgcctgtttatgtcctttacccatttttctatcagttatttttttctttttgatgatggctatgctccatacgttaaagacattacttctatctcatgtgttggagttttcatcctagttgatctttgcctttcatttttacgtttaatcttattgtaaatataaccttaatgtagtcaaatctaacactatatttctttatgatttcttgttttggttttatgcacaaaatgacttctacttttattttcaaccaaaatcagaatgtcactaatatattctttgagctcttttataatgtatattattttatttttatataaatctatgtggaattcatatgggatataatgtaaagagaagaagcaaacttttttcaatgaaattatccaattattagaactgtttgttaaataaaatcctattataaatgccggtctgtttctgatatttctgttatagtattttgatatgctgcttaatcttatgccaatattccattatagctttatttattatatgtttaaatgttggtattactagtatctctttattattattcttttaatttttttatcctctcagttattatcccaagtaaactttagtatcatttgatcacactgcaattttgtaagaattgcattaaatttataaattagtttagttagcaatgacacctttacaacattgtcttgctctccaagaacagagcatatctcgtcattcattaaatcaagccttttatgtccctgagtaaagttttttaaattcagtttctgcccccaaaaattgccattttattatcccatatatatagtcgttagtatttttagcattgtcagctttatctaaaatatcacattggctcttaaaaaggagttgagtcactctgttgttcagagcaattcaagggatcttctaattggccaaatgagaactacaaatcattagttgtagatcattttattctaactctatatccaatgagacaaggataggaaaagctttttggaagacactcaaagtgcttaatcttttaagcaagagtaatgatcttttgaacatgtagaataaaaatattgactaatttaactataagtatgtaaggggacattaaaataggtcacagaaatgattatgcttgctttcattaaaactattatttactttagttttatggaaaataaaaaagctgtaacgagttcagttgtcaattagctactcagtttgctatttttccatctacacactagcttcaccccatctaatatcaataacacttatcagatccaaaggaaagctttaccaaatccaaattattatttgagaattaatttcataactaaagacttcattgatgtcattaaagtagcaatgtttttaaatcccaacagggagatcgaggcccagcaggtcccccaggaatagcagggatgtcggtgagttcagattacttcacatcattttcacaggtaaacggttctatctccatgatacacctgtggccagggatcaagacaggcaggagagcataccataactcccatggcattaggttcctgacaattctagtttcataaataatgccacctgtattttccacctccacaatcctctatttcttttgttttgttttgttttttgtcctcttttattttcttcccaagtcactttcatggaggggagaggaaacacagttactatacattaatttatgagcacagctttggaaagtttattgtgtttctctattcttgtcatatttcaaggtttctcagtcttcaaaagacagagttcttatcctcaggcatgtacttcaagttccttgtattaatgcaatctgcctgagttattccttagcccagtgttattagcagagctttattgctgctaatgtttcctcataaactagcccttcaatcctctcaatcatttttgttgctctctggtgtcaaatgttttaatctcatcaaggccttttcaaatgaataggaagtgttccaggaaaggttgaaattatttctctgagccctagagatcattctgatcttcattcatgatgctctaattaaaattttgtggtcacgctttatgaataagaggccatttatcctcttgctaggtgctcctgcagggcaggtccaggataacattacaggaaagtcaatggaaaccatgggcttgtatcacaagaatataagaaagataagataagataaaggccctacaatcaccacccacagtcacccaccgagatctactgacacccaacaccacccaaagccctgctcatctcccactgccatcccacaaagtgctcagagccactctacttcactccattaacttctaacaacacaaaatagagccccatccatcatctgcatccttcgtagatgatgacattcccttacttagccattatagatcaagtcaaatattcgtatgactgtaaaagtagcatgaaaatatcttctttggaaagctcttccaaattttttataaaaggaagtattcttgaaagttgactacacacttaattctattccctcactactgccccactcacagccattcccagcaacatatttggaaatcagtttctggaagtgtccttagagaacctttacaacctgttcctcttatactcacatcctgtgatttgaatttttgtttccttgtgataaaataaagtctagtttttttcattgtgttcacccaggtgtgtctacaaattacattttgctattaccctaaattaagcttatcttctaggaaaaaatactggccaccattgcaagtatttaaaagatgtgcaacagtggccacaggcaatccaaatgagaaattccaaatatgtttttcaaagaggaagcattattgagataaggggctagcctgccacttagttggatgtctaagatctgatatatttactaaaaaagcagttttcatatgtcataattaaaaacattaactggctaggcatagtggactcacacatgtaatcccagcactctgggaggccaagatgggcagaacacttgagcccaggagttagagaccaacctgggaaacatggcaaaactcttgtctctgcaaaaagtgcaaaaattagctgggcacctttagtcccaactgcttggaggctgaggtgggaggatcacttgagcatgggaggcaaaggttgcagtgagctgagatcgtgtcactgcactccaaactgggcaacagagcaagaccctgtctcaaaaaataaaataaaataaaagcactgactgacaattacataaataagaaagggtaaaaaatttacatactacaaacatgttcagttaaagatgcatgttagatttttataactggcccttctgcggctcagaagataaaatagttaaaagaatctagaaatagacaatggtgatggctagatgacagtgtgaatgcacttagtgccacttaagtgtgcacttaaaaatggtttagagggtaaactttaggttatgtatattttaccatgataaaaattttttttcgaaaaatggtgattgttctagttgaagcagggctggggcctgcccacacagagacactggtaactcagctgattaccaaggggacccaatcctgctcttcctagaacggaccggtctatccctttcctgtatattcagggctaaccagggatttcccctagagcttctttctttgccttactctgaggaaagcgtgtgggtttacaggaagaagtgcctgtgagtgctggtcgtggggtggggcctccggtcagcatgctctcccccggatgctctgagttctccactggtcctacctgaccttaggaatgacttccatcaatgtcccttatctctttgtctcagatctcaaggcccgagccctctatacccgccatgtcccacaataagacccttcaggtcattggccttctcagctctaacacatcttcccactcaggcccctaacaacttcagcacaggcaagctgtggggacccagggatgctctctctaacttctgcctgcctagctttgccattcagcaccgtatctctacctatggagggatctccttccggaattctaagcagcaagttgaaaaaagcccatttcttttcatatttctccaaaacctacttggctttttcaggtctcagccccaccacacctacatcccacgtcgtctatctttcccagccacattagaccaagggacaggaggtggttccttctcagaggcaaccaagccttgcctgcacactcaggccttgtgtgcttccagtctccactggaccgtctgcccctctcgtccctcgctgtggtctgtctgctccaggatcggtcatccaagccatggtgtagtgacacaaacttatctgtttcttttcctgtcaacaaaacatggcttttcaaatcaaacatgattttttcaggttgtcatactatgaacttaaaagccctcttgtgaatctcaaagcctagaaaaaaacttatttgatgctttgtgcccatttctccactcccaaagtaaagaagagctgccaggaaaataagcacaagagggatgtccaataatgatgatactttgggctaatattttcaaaaatattctcctctcctactctccaccatccacacaaatatatattcgaagaactgcaccccagtctgaaacttatggcctgcggagttgactatatgttccccagtctctgtccccttagaaatgccactttatttatttatttatttatttattgagatggagtctcactccgtcacccaggctggagtgaaatgtcatgatctcagctcactgcaacctccgcctcctgggttcaagtgattctcctgcctcgggctcccgagtagctgggattacaggcacgtcccaccatgcctgggtaatttttgtattatttttagtagagacagggtttcgccacgttggccaggctagtcttgaactcctgacctcaagtgatccatccacctcagcgtcccaaagtgctgggattccagacatgagccaccacacctggccagaaatgccactggagagcatcacccttgggagcactataaactcaattggggttgggggaagagaagcatatggtgtcgttcagcaatttggctcctaacatttctcttcaatttgccttgccagggaaaacctggtgccccagggcctccaggagttccaggggaaccggtgagttggcagttactttcatgacagttgtacttgtgttgtacttgcatgcagttttaaaacatttgttggcaattaatttgtgtctgtggatgtgtttatagggtgagagaggacctgttggagatataggtttccctggaccagaaggaccctcaggaaagccagtaagtacttcttactacttaaaatatgccacctagagaaatgctctaacattatctcctcatctaccacctcagaaattctgagatttgaataagcagtttccaaggagtaagaagaatgcacagatggatttttgatggcaagggcaggagttcttattgagttccctagatctgtgtgtggtatctttatgtcttaaacagtgttgaaaatggtgagagttttaagtgtcaggaaatctgactcatcatttcttaagcctaatgttctcaacagacttaaagaaaatataatggcctgtcatgtcctaaagtataaagaaaccaaagacttatagatataatacctgtatgttaaaccaaatcctaaagtagaagttattttctcaaatttcctcctttgtatacaggccttgttttcttacactttcataaatcactactggtgaatgtctcatccccttgtgtcctaaaagagctcttggttactgatctgtggtattgatgtgacattgtaacaatcattctgactaatccagttccacataaattcatctagtcactgctgtttgctaagaatgtgctgggcccttagggaggggatctaagatgaataagacagatctcactctcagagttatcctttacagaaggtcactgctgatttgtttgctgtggtgtgtatgggaaagaagtcgaggtgaacaaacagtgcaaaattcaggaagccagtttggcacctctgtgaaaccttcagggttggtggccaccatttcctcagagaagacatgaaaaaaatgtaatttagagtcaggaagatctgggtctgaattatggttgaaaggattttatgagtcacttaagtgccatgacatatggaaagcatttccagtgcctggctatgggaggtactcaataatattagtttcattccctgcctcctcttacctcctcattcccatcccctgcaaggcatatcattaaagcctgccactgagttcccaggagattatgcaaaaagcaatttgttcatcaccaaatatttcttgagcacctcctacatgctaggcactgttctaggtggtaacaactcatagcttttgcattctaatataggaaaacagataaaaacaacacacacacacacacacacacacagagtttcaagtagaagaaggtataagtagagtaaagctctggaatattattcaaatagtgggctcagagaaaatttgcctgcaatttgagcagaaacctgcataaagtgagaagtcaagccatgggaaggtcagaggaccattgtttcaggaaaaagaaatggctaagagagaagtgagcccgatggggtccaggacctcatcaaaaggcatgaagtcaagaatgaacgaagtgaaggaagagttggaaagatacggagggagatgtaggcagtggccagaccatgaagaacttccaagccagggaatgaagtttggatttcatttgaaatatgatggaaatccactggagcttttgtagcaaataatgaaaatgattgaacattttgaggatcactctgatattgtgtggagagtaggctgtagggagtggggtagaggaagacagaacagtaagaaaacatcaccatcatctccacgagaagtaatgacagtggaaacagccatgagtagaggaacttaggatgtacattgaagagagagccagcaagcaacaaaacttgctgatggactaatctagagaagtgtgagggaaagagaccaatcacagctgtggtgtagggtctgagcaactatgtgagagtgctgctgtttggtgaaatggggcagactgaaggtaggtggatttgggagggagagccaagagttctgtttgacatgttcatgatggagcactagcaggtattcaggtggagatgtcaagtacacagtggagacttaggagaggccaagattggtgagaccaattagggtatctaaacctgagcctggaaaagtggagtcactgtggataggaagggaagagagtgcttcaactgttaggaagacaacccaacaaagaaggctgtgaaactgcagccagagagacaggaagaaaatcgggcaagtgaggtttccttgatgtcaagtgaactgttttaagagaaaggagaaagcagtaaggagtgatcaacatacaggtaagtaatatgaggggtaataattctctactgcatcagaaacgtagaggtcattggtgggagagatcaccacatgttagtatcttggtaagaatgatccagttgagagaggaaaatttgatgacacaggagagtgaagactactttgagtagaactggtatactcacaagtgggaattggtcttaactaggaacaggggcagttcacccttcctaactgtggagtgtgggggtgccaaagttggggtgcaaatccatgaagattgacgcaactggtggagggatggtgagaggggtctcttttgtttgttagtgaaagaagaatggaggttgtccaagtgtgaggagtggggaggtgatgctgaagtttggaagagacaggaaaatgtgtgaaagagtacttttggagagatagaaagggagtcaaattgggaaatacagagggatggcctggtaatgctgagggtgctgcttgcaatctgctgttgaacatttgggttggaacaagcgagcaaagatacgtggttttcttcagccaatcagctgctcagatgcagatgtgaggtaggcagaatgtacccaggaaaggggctctgccaggtgaatgagatgagggtagagaggagcaaatacatatgagttattgtaaaaatctctgaaagcagggctgccctgtggatagaaagtaacaccttcctatacaaaagagaacactgatgatagtctttgataaattactggagataaaaaacaggttatagggttacgtattttcttatattgttaccaaaaacatgaactacacttttactctagatttatcttctcttattcaagtgacacagctgtttctttcacatcctctcctaatcagctttatccttgttccttgtgtgtctgaatgtaataaattctttgaaccatacacttcaggtaacatgttcttatttaacgtactctcaataattcccaggatgtttcagaaaggttggcgaactatggttgggttgtcaactgtgacagatttcagcataatttatagcagtgaaaacacgcagttctttgcagttccatcccacagaatccattccagcacaataaaagtcccttgggcttttagaggagcaagtccatgcaattgcctgctggctaagaaatcatattcctcaccttgatcttcctcttcaaatcagatctctaaaacacacttgctgttgggccctgggtatttgatttgacctcgaatacttttccttcttatatctcccagccaatagttctctcagtcttataaatctttaagcaggactaggcttcgttatcacttctagaactcccttttaaagttcaagaaacttccagttttctaataaaaagtgactaatactgtcaaaaaccatgattatacatttcttgcttttctttcatatttccaactgaaaaataacaattgttctctgactgacactttatttcatagtaggatcatgctctggccatgttatgaaatttccccagcagcaactgagaccatttactgagaatgatactctgtgctggaaaacctgttagaaggtaacaaaaatgccatactccagccacctatgccatgaggcaccttcttatttctcaggatgacctaatagaagaataagaaaggaaaataatctttgttgactatttatagaggaccatgcatttttcatgttatttcacttaattcttagttttgaggttatttattttcctcactagtgaagagattgatgctattgaggttaagtaaattgcccaaaaaggttaatgggactagtaagtgacagtgtcagaatccgaactcaggactgtcagattctatttatttgttttccattttaccacctttctttaccaagctctcagtagaaatatgattaaggaactgtcctcgaaaccttatgcttttgttgtgtttaactatgttaatgcagagttagaaatattaatcctttttttctttatagggaataaatggaaaagatggaataccaggtgctcaggtatgggaaatatgatttaaaataaaagttataatgcatactgcatccagaatacctaccaacatttacatcaatcagactgatgaaaaatcttggcaaggagtgattttcatgttgacatctgtttttcagggcatcatgggtaagcctggagacagaggccccaaaggagaacgtgtatgtatattactattgtgattgttattcaagtctgtctgttacaactgtcccatcatttgagttacacaattatgtgtgtagacccctgcaaatcaccaaatctataaaggctagggtgtaggcgatcaaagatctctaccagacattaaatatgacaacggactcagagcaagttatatggtacatctatgtagttggcctttgtacacagccaagtatactttgctatttaaatttgggaagcttttattatcctcctgtctcagacatatatctctactataaccatcacccatgttctttttatctagagtaaggtttctcaacctcagcactgtgattattcaggggcagataattgttgtggttggctgtttgggaattgtaaaatgcttagcagcatctctggccttcatccactagatgcagtagcgccaccatccctccaattgtgacaaccaaaagtgtctccagacatcaccaaatgtctcctgggaagcaaaatcactgcaattgagaactactgacatgcagaaaaactaagtagagtaaagaaggtggtgtgaggggttagagaaatggaaagtgtaactgaaagtatagtgaagttactagtaatgccaattatgttatatggttttgtgttgtttggagcgttaatgtcattattgcaatttctctttatttcctttaatgaacctcaacattttctagtagaattgatttctactagaattaacttctactagaattaatttccactagaattaatagaattaatttctagtagagtcatgccactgcaagaagttactcaaacattgttactcagtgtaattctattaagggttgctattgtatgtgagtgtgggcacatatgtttgtatactggtgtctagttcgctaacttttatttatcattatacaagtaatctataataactgaaggaaatgtgaaaatacagatgatgtaaatttaaaaggaaataaatctaccttaccccactacacagagataagcactgtgatatttgtacgtatttccatctctctcactctaatacataatatacacatatatttatatgtattaatataaacatatacttttccaaaaaggagcttatgctgtcttgtaagtgtcttttttcacctaacgatatatattgatcttttcttgtctgtaaatatagatctatatctaccttttaattgctatatgttattctactatttgaccataccttatttcacttacctagtccgctggacatttggattccttctagttgtcataataataaacatcactacaatgaacatctttgtacctaacttataaaataattttaatatgttaaagattgcatttatcttgcacatgatcagagtattaatcattgatcaaagtgtgctaatattttttcttgtcatctcagaaatttctccaaatgtgagctggagtgacagacctgtatgcagatatatttttataactaagacagtagcattgataccaggcctaagtgcttttatttctttctacatggcttatttccatatctgattctatgatcacacaaatctctgtaactgttcatttatttctgttaatttttaagtcaagagaaattgagtttgcccttctgcagagtagtcatagttaaaagaataatataatgagatacaggaccacttcaagcatcattccgtcatatttggtgtgaggatcacttcctggagttatgcaactgaatatttgaaaatttatgactgaagcaactgccatgatctctctctctctctctctctcattctctcttgcacaaacacatacagtagtagacacattccaggataaaaaacagcatcaagcaaacttcatatcacatttaggcacatctaatataatattttactaattaattatgacatcttattcaactgattcttgtttttttgttttgttttgttttgagacagagtttctctcttgttgcccaggctagagtgcaatggtgtgatctcaactcaccgcaacctccgcctcccgggttcaagcgattctcctgcctcagcctcctgagtagctgggattacaggcatgtgccaccacgcctggctaatttttttgtatttttagtagagacagggtttctccatgttggtcaggctggtctcgaactcctgacctcaggtgatctgcccacctcggcctcccaaagtgctgtgattacaggcgtgagccaccgcgcctggcccaactgattcttccatagttcatttatactattgagtaaatgatgtcagtgacatcctccccccagtcacctgctttgatcttttcaatggttctcccttctcaccatcccgtgggtatatatttagggcacagtgatcacactcaacgtgcacacacacaaacatgcacacacatgcatacacgtgtaaagcacaaatacagaaaacaaacctgaagagtctaataaagcacaaacaaacaggggaaatccaggggtggggagagcacatgatttaggagagattttgaatgtcctgaagtttttttaagtgaaaagtctcagtaatgagatcctcttggcaatcttcctttatcattgcaaaggagacccagacctcaagtgacagctggtattgactcaaaactgccatcatcctagatgggcaaccaagcacacctaacattctctctatcttttatgtattaagtactgccaaggtgccaggcattgctctgagcactttacttgggttaattcatttagttctgaaaatcgccctatctaatggatactattaatatgcccactttgtaggagaggaggctaggacacagagagtttaagttatttatacaaggcccaacagctaataagtgccagtatgaatccagaacttttgctctcaactacagctgatgctagaagagattattctttgttattattttttccttaacagggtgatcaggggattccaggagacagaggctcacaaggtgaacggggaaaaccaggccttacaggcatgaagggggccatcggtcctatgggtccaccaggaaacaagggctccatgggatcccctggccaccaaggccctccaggctctccaggcatccctggcattccggtaagtagtgctaagacgctttagggctcctggcttgtaccgaccatgtatcccttttacaatgaaagcaatgatactgcctttcaaataaataaaacaaacctaaactggtccccgtgagggcaataatagctgtcatttaaagttatgtgccagatcctctactaagcacttactatacattacctcatttgatcttcacaatcattctggaaggattggtgtccttttcagcccagttttataaacgcataaaatgagcattaacttgcccaaggtcacagatttattaagtgggtcagacccaggtctggatggcttcaaacccacgcttttaacatacaggtactgtctctaatgtctccttacactacacagaaaccacatatgcctgtttcatattgctatgaaacatgtccatttcatactctattttgttgaatatcagaacaacaaatctgccatgagtagtgccttgaagtagaaaccacttaggccaagagtgtttagtaaaggaagcccatatctttattaatcctcaagaggagtggtgagtggctattctgcagagaaatttaatctgaaaatatccatgttaggaagaaaggagggtcttgaagtgaagtagggcagttaaagacacattctcctcagataatcaaccaataccagatataaagcaaaactgagcattcatgcaattttcatacttctatatttctgcccactgtcctgaaactctacttgaataaagcctgtgtaacttcactcttggggttgtgtcagtaattggtattagttgcattaattaaagttcattaatgaaatagagcattcttggaattattctgtcctaccggaatcatcactttataagcccatcatattggattttttttatttttattttttgtcattctaagtcagtttgttgttacaaatgaactagcaccattatgttaggaaaccccacaacaatactattatcacatatctacacacagacaggatagaggaattttcagtgaagagcgatgaggaacctacccaagaatgtttataataaattaaggctcactatctaagtaggctctgcttcattcttaaattcacattgcatggtgattttccgtagagcttccaactctctcatctgaccatcttctgttatggtctttgttcatgtttatatctcagagtggggcttattgcctttgtcacaaccgccaatcttcatcatattgtctttaatgccacacatatacccctggataataatcaccaactataaagagtaataaaatactttgaaattctaaccatcaagaaaaaaataatagctcctttaaaaatatcaaggcactataataaaacattactgttataaatgttaaattctttgtcaaatgcatgtggatttacttgtcaacaggtggaaaattcagctgacattatttgcctgcttccttttaccagatcccaattaagaaaagaaaattacttaatacctatatacttgcaatgtgtaaattacagaataaactttatgatgaaatgggtaaaacttgcttttatcccatgaatacaacattttttaaaataatccagcatacttggagttctgttccaggttgtcttcctttgaaaatacattatatcaattagatattgactttgccatccagggattggttaaaagttaaattgtgattaggctactaacatcatgtttatactttttagattatttaaccttataaaatgaagtcataggaatgtcttccctaactgtataaagccatgtgtctccatttaatgggaaacctgttgataccactggttatgatcccagcccatagcttttaaagcaattacacacttcaacttcttcccagaatttggtcaaagcaacagatatttattgcccaatataatcaattgccaaaagcatttttcttgataaatgcatccctacagaagtttcaaataggcaagccaacccaatatttctattctttattcatttgtgctatgctctattttaacaacctttttttttccttcttcaggctgatgcagtttcatttgaagaaataaagaagtatattaatcaagaggtcctaaggatttttgaaggttagattttcttaataacattttcgaatttttcactgattcccacctcccacctactatggggaatccctccagcaacattctcgaaagatggccatgccacaaaaaccttaaggggcagcccattttatgatgggacagctctttgatgaaaattcttctttatacaaagttaacttttgcctccctggaacttcctttcattatacctggtctgtaaaacaacacaggtaaagtacctgcttgtactcacatgacagccctttgagtatttttcaatatccctcatactcctccttagttttctcttttatggagtaaatgtgtctagctcctccactattatcacccctgggaaatgtttaatttataaatgactctcatttaccaaggaatattttgaccaatgcagagtagtgtctttttatttagaccaaagtcagcaaactgtaccccctagccaaagctattgccacctgctttgtacagcctacaaactgagaatggtttttgctttttggtagggagcagtgggagtgagttatatttttaaacggtttttaaaaatcaaaagatatttcatgatatgtgaaaattatctgaaatttgaatttgtttccataaataaagtatgcacattccttcgcctcttttctctggctgttatcccactacagcaacaggactgagcaattgtgacaatatggtacataaaggcttaaatattttctatctggcccttgcagagaaagttctgacccctgctctagatacttcaataattcatcctaagatgtattgctttttggaaaaaagcatccatattattctgttgattcattacgagttttcagttaactaacagccctggatcttccttataaaaatatttttaaatgaggtgtttctcattatggactgtgtgtttattttttgaatctaagtgtgtgatcttatgtttcctcttattaatttcaaatcatttgtgttcatatcttgttccaacctgaagatgtcttttgaaatgttgtctcttgaagagcaggttggctgaccctataactttgtgtcatgctaaatttcataagcatgtcatcattctagctgttgatagaaatgttgactaaaaaagccaagagtcaaggattaggtctttccaaatgccatgggattctttctgtccacttgtaaatcatcttctaatctattgtttagtgagctctgaatccatttcattgtcctaaaactcaccctacatttctttgtctatttgcaaggaattgacagtatcacatgattttgacaaatggtttgctaaaatcaagattactcttctgaactgtaagatttaacaaatgaatccatgttggttctcatggttcctacttcctttgcttagcatccataagccaaaaatagattgttgaatttttttaaggaataagattataagatgccccaagtcgatcttgactccattgcttcaaacacggactcaggtcttctccaaggagtcttgattattttaaataataattagcagtagagactgaaatcttggtgcttggatgcacgttatcttactttatatgagaactagaaatacagtagagtaacactgggacttgtagctactttaatgacaaaacagaaaaaaatggggttttttgttgttgttgtttggttggttggttggtttctgaggagtctcatctgtcacccaggctggagtgcaatgacgcgatctcagcccacagcaacctctgcctcctgggttcaagcgattctcctgcctcagcctccagagtagctgggattacaggcacccaccaccaaacccagctaatttttgtatttttagtagagacggggtttcaccatgttggcaaaaaatgtttttttaaaggtcgtgaatttatgctgttgattttaatttaccttgatcttcactaagtatctttatcttgctctgatatgacagtttactaatacatttgtccactcttttgttgagctaccagtaattttaatgttgcccttaaattttgaggtcttttctttcattctctttcattctttcttcttctttctttctttatttctctctctctctttctttctttgttttttttgacccttgaatcaaacattgtggactagactctaaactttgctttccaaacactcatttccccgtcaggaagtttgaaaaaaaggcaactgtttgaaaaaagacatctcaagctcttcaggggaatactgaagaatatacccatggctacataatttgcggtgttcagtgcacagtgaaaatgctggcacacttgttaaaaaatgattaagaattttaagacagcaatagtaaagccgtaaactaaacatggggccctatgtgactgcataggtagcccggacatgctagtcctggggacaggacatctagaatctcagatagtatccatgcatttagttgacctcaaccatgaaaagagaaatgccagcgtatgtgtatttttgaattgcaatctaaagttttcctttaactcttaatccctatgggctgtagtgtctttatttatcttttatctaagagagctttaatactgaacttcagtctcttaagaggctttagataaaatcatatatttaatagtcagtaattaacccatctttttggaagctgattaagaatgtcagaaaatataaccaagcattttcagaaaaaaaaaaaagtgacatgttgagatatagaaggtgttcgttttacaagtccatcagacactggatgaaggtgtggcccctggcagcctgccctgtgcattcagcaaaagagacacttctactccctcctggggaaggctccgtcctgcccactcccaggccattctgtggctactctcatgaagggctatcagtcttcagaggaggcaggtcaggggagttgggccactctccatctgtgttggggcaggctcaccagacttctgctttctgagaagctcctcctctgggtctggatccttcctctctgagttcctgcccctccttcctctgtcacagcccacctgcctggaagctgacaggtgcagagtcctccccaggtctctggcttcacacccatctctcttactgcgtctctgtctcttccagcctggccaggtccaggtgagtggctggacccccaccagagccagtactccctcagaaaccacaggtgtcttagccttaagacaatattttaaagcgacccataaggaaactattttctgagacttctaaactctaagactccatgtgtgatagccctttccttttgtctctcttgacactagtccagcaaaactgtcttctcccaaacaaaactgtgcctgaaacccagaatttagttatttagcatttaagttaatttgtcccaagatcatttcaattcactccatttaattttccacttagaaatcactttttccatggcttctgaacaccatttacaaaaaagaaaaaagaaaactccattttcacaaatcataaagctccaaggtcacaattaccattttcggaaagttttttctctaaaagcaaagattaattttcacatgttaaaacagttacagttaagtagtacagacagctaactgctacagttaagtagcacccgtctccttctctttttcttagtggtttcacaagagacagtgtcaataacagctaatgctatctctgctgcacgcatccctgcacatctgcagcctcgagagccattgtctccgagcggcaagtcgcagactgtcagcagggactcgaaggagtccttggaagatcctgctctccaactttatcatcccaagtgtccagattacaccctctagtgaaaccctagaccaggatgacccaaactttgggctctcctcttgtggctttttaacccctttggggcttcccaggtgacccacctggtgatacaataccctacaaatctcaaaccttgatctattttccaggccacctaacctcccttcaacatcctggtgccccttcccaaacctaactgtggtggaaagaggtgtcttttcaccaatcccaagtctaggttccagattgatcactatgcacaaatatatatcctctctgaagttcaattaaattcccaatttgattgtccaacaagtcaagtccttttgctagtaaagtgaccacacaggacaaggacagatgccatccatgtgtctcagcttagcatttggctttagaagggcttcccagctgccagtgatgctgcccacgcaaatgaggctcttgccagatctgagaagtttaattcttgctattacactgtcctattatgcttgggaatttacatcaacatgcaggaagaatttaccaacctttgcagaaatgtgtactaacatctggctctctaagttcttgagtcaaacatgggaccaataagcccacacctccagctgtgggagaaaagaaagatttgggctaagtattcccgaacaatgtttctgcctccagatttccagtgttcagaaaatccccttacctatgttttctcgatatgcatttcatacatatatttcatatatatatatgcatatatatatgaatgtgtgtaaatatgtatgatcctattttcttatcccaaagttgtaacatcttttcttacctctctacaactaagatattaatttttatgtatgtgtatatgtacttgttatatacacttcatctgataaatatacatcattgatgatatatatatatatatatatatatataaagagttaaaaaatatattttccaccacatagtctctgtttcttccaatttgcttctttctgtttttttggttgcaactctgttgttcagtttgtaggatttcctcagtgtccagtaatccttggctgtctgcatacataagagcagggttttaaaaaccgattgaaagttgtgagcgaacagtggggcttgccaacctcgagtttcacttagggtagtccagatgggctttttaagtgagggacccttaatttcagtgtctttaagtctttactctcagtctggtcagattctccagtggagacattccatttcctgcctggctgtgagcttagctacttcagattttcagtttggaagcctgagtctcaatggagtctgggctcctccatgcagaggcagactacttacccttttaagataataataaaccctcagtcttttgctagggatggggagaggcacctgcctagctgtatagagaaaggaatttcaacaactactaaaacaggctttcaatcagtgctccttattttagttcccctctttcacccccacttccagaggtaacttgtactgccaattctgagccttctgaggattttgtagtttaggtcaagttattcctctacttctagtctaagagtttagttttcttgcatttgttaagtaatgtatcactcaaccgtctggttcttaacttccaaaattgtgctgctattgtctcctttcatatgctcccccattcttgtctgtttaggcctttaggaggattgttttgctaggattcaggaggtagttaaagcagatccatgtgtttaatccgccatctttacccatgatagttcaaagcaacatactcattaaggtggcaaatgattgagacagagacaagtgaagtagtaaccacctttgggtcataatgaaccacaaaataaatatgaatccaccaaatgatgctgttgaattaacagtgaaaaatgaaactagaatataattattaaaatatcacaggaaattactcttctgatatttttgccctttaggagagaactatatttaattttggtttccacatttaggagacatttatggaaaagccctgaaataatggaaccaaaaggagatttacaaaatagattgtgaagcctatgagtaaaagttatttaacctgaatgctaatatgtaacaatatgactgatttcccaagggaaatactcattaactgctctctgtttccataatggggtagcaaaataaaataaattgaagttataccaagaaaatggataattagacatttccatgggcattaggaggagaagaatttctgtctttgaaatatttacaaattttgtctgtgaaatagaagatagacatgggccagatgacatgtgtgtgttccttccttctctaaaatacgtagtttatcatcatattaatattaatgtctgtattatattaaggagcccattctccaaggaagccaagccttggtctcatttgttagagtgactgctgtggctttgccttggcagatggaaaatgtgtgtttggtttatgcatgcttatatcggaactcttcaattcctgcctcattagaaagcatagccaaaaacattttaattgactgaagatccctgaaaacagaggaaaagcaattaagaataaaggcctttacaattcatctggatgctctgaaacatattattgtaaattatagagcattagggtagggttcagaagaggtaattacccttatgctaaatgactgtttctgagtgtatttcaaagccagataatttacagctagaagtagtgaaaataattttctgttttgctaaaaatattaaaaaccaccaaagtacttctaaactcaattcatatattaaagaggaaaaattagtactgtgaatatttgtgtttcgacattgaaggtatttaaacagacatgtttcaaattaagaaaaattgtgaccggtctcagtggctcacgcctgtaatcccagcactttgagaggctgaggtgggtggatcacgaggtcaggagatcgagaccattctggctgacacggtgaaaccctgtctctactaaagatacaaaaaaaaattagccgggcatggtggtgggcgcctgtagtcccagctactcgggaggctgaggcaggagaatggcgtgaacccgggagacggaggttgcagtgagctgagatcacgccactgcactccagcctgggtgacagagtgagactctatctcaaaaaagaaaaaagaaagaaaaattgtactgaaacacatctcttctttgaggtgcagaacagcaaatattcaaactgtgattattgaatttcatatttattgtaatgccccaagttcataatttgatgtaataaagatattatatgtacattcagtatgatgatttgtaaaactaaaactatatattaattacctatttgttttatctattagttactagaataagatatagtaatatcaaccacacatcccaggtagatagtgaggtagtgatactcgagggcaggtgatttcatatcactccttgggaccagcatccattagatccctgttggcctcccattcatccttcagtctgcagccagagattctagtcctgtgcgggttgtggtatatttccattctgcatgctttgtgacatgagaatgtgaatgtaggtgattacttttcggataatgtcagctaatgctctatagctattggggcttttctcttaataattctatatgaaaaaacaattgtttttctttcttaaccagtatgggcctacattgtttttaaatgattgttttaattgaaaactcatgggaaaacagattttcctcagaagtaatttactctttatttaaaaatttacataaaataaaagatacatatctgtttaagtatgcctttgcaattcaactaaatcaactaaactgaatgaaaagactggagaacatggaagtaactctttacaagacctatatcatttgggctttgtgttttctaactgacggctatcgtttctactgcgttgttgtctgtcatttggtctttacttacaaaataaatactaatttcctcagtaaaaaaaacttttctggaagatttgtctgcaccaaacccagactaaagtttttaaattgaatatttatttcttactacacaaaagtgtctttgaaaaattgtgtgtaaattattttaaaataaaaccatttaaattactaagagatttttgaagaagttatgcaaaaagaaaaagaaaaaacaatgcgattaacttcttgtcatggcaaggatagagcctcctcaggttttctgtttgaaatctagttgttcatatattagattttttaaatgtgaggtatactaaatataaacaaaccaagcaattttaagaaagactccagtgatagattgtatttataatggccttggaatgagttaatgattttaccaaaattaatttcatatagtagtaaaatattcgatatgctttttttagttatctgttgctgcataagaaaatacctccaaactttagtggcttaaaacatttatcttacatttcacattataaatgtttattatctcacattttttatgggtcagggacttgaagtgttgcttaattgtatggatctggctcaggatctctaatgaagttgcagtcaggatgtcattcagagctgcagtcatttgaaggcttgactagggctggatgatctgcttccaagttcatgtgcgtggccactggcaggtagcatcagttcttccccacatgggcctctccacaggacttcttgggtgacctcactccatgtcaactgccttcctccaatgagtgatctaagagagaaagcaactaggaagccacgatgtcttttatgacctcatctctctagttgcccactgttaattcagcctttttcttttcactagaaatgaaaagtctagcccccattcaaaactaggagaattaaactccaactttggaagacagtgtcaaagaattcatgaatatattttaaatcaccacacatacgttcacaacattcctggaaagtgccttaaagttattatgaaatcattttttaatgtgaacctaaactctctccacatgccattaccagaggttagattccatgctagtgttctgtccactagattgttacatctcagaagcactgaaaattctcagactttctgagtgacacagctggtctgcatctatacacaaacaactttgcaatcgatattatttgtctaatcaaaaaactcagcagtcagaccagttggtaaattagatgtgcttaaattaaaaactaaatctttttgtttgtttgatttcatgtattttgaaattttttgacataaaatatttctgttctatgatatattattttttcttctatacatgaagagaggatggctgtattcctatcccagctcaagctgccagcagcaatgttggctgcccaagcttatgggagacctgggccaccagggaaggatgggttgcctgggccaccaggagaccctggaccccaaggtaagtcttcaagtgtaatattggcttattgatttttaactctctgtatttataacatgttagtcacagttaaggaaaaaagtatgtatgtatgtcctttatttatacattacatatataaatatatgcaatatataaaatggtttcatatgtaatctctttataatatttgacattctagaagtagatgtttaactattactacttcaaatttaaaaccaaatgagagttacctggtattctaaatgtattgtaaaaataatatttattataacaataacagcaataatgtgtgcttatatatcattattatctaggaatcttagaattttttaggcttccccttttggtgtaagttaagcaagtctccatcatctgagtgtcttaaataaactggagaaagagttttaggtgactcaacgacaaatagttatttggttctaaaatatatttttaagaaattttagaatctttctgctttgaatacagcttgtggatggtaacttgaatgttaaagaatttttcacatgatttctaaagttcttaaaacccaacttatattggcaaagaattttgttccacttatgacaacttgacgagagacataatcttaagtatagcttaactaaattaatctgacaaggccatttgctagaaatatgattagcaatccagcaaagtggccaaataggcccaggcttagaagagtcaacaactctgaaagggaaatattaaattcagtgaatatatatcatgaaagataagaccaggaaaactgcttcttattgttaaccatggaggatctcaggttccttccttgaaataatcaaaagcaacttgtataaagaaagaaaagtggaaattaacactaaaattaaataagaatgcagtccaaaataatatatatgcaaagaagtgtttttctgtcaccagtttccttcctactgctattctgtaatattgagcctcattttctgaagtgtcccaaggtgactgatgtgcccttcctcttctgaaagagcaacatctgttcagttcccaatagcagtgcctgttagtatatatatcttaatataaccttataacctatgaccatgattgccaagtctttgcgtttaattagcacaatataaaacaggaacagttaaaatctctctagttttttttaaacgatacatatattccaccattatctttagattatagtgaagtttggcagattgatgaaggaaagagaaaagtataggatgagaagtagccctctatgtatacactattgtgtagagggggctaattattatctttcgctggttgggtctattctgaagtcagagtatatgagactggcatgcagatctcaaaagcttatctgaaaatgtgtaatgcctcaagccacgtgaagaataagcagcgttaacaccaataggaagaaaactttggatagatccttcaaacagtggtggtttgagaagacaagaacaatggaaaattgagatgatcaaggaaaacagctctggaactggggtctcctgttccactcaaacacctggcttcagacacctcacaggtgctgcgaaggcccatttggaaggctgtcagtcagaggcaattctaaacccacagtgtcagtgaagcttttggaaacaagccttctgttcaccactccacttgcccttccttttgcaaaggatttctatggatttcatctgctcttgtgcctcaaagatattatagactacttctactcctgatagggcttctggatgcaattcttaaacttggaagatatccccacatgatttccagtttttttgtgaaccaaggtttactaaaattgtcaaaacttttgtctccccattgggtttctgacaacagacatatcttgactacaacttagtatatgtctccttaacctttacataatactttcttttcagtatttgttaaatttgcctaaaatttagcaaaaaataaataaaaattgcaaaacatagaattcatttttaaggaatatgtgtttcttaaaaatatttgtttttaaggaatatcagtacagtaggcatgctgtactgataatcctgcctaaaggcacagagaaatctcactgaaaagaaagaaaatgagaggctgctgtttaatttttggtgcctctagagaagtgcacaggaaattgaagtgtttttctctagtacataaataggtgtgacatgctcagaagatgaagttatacatgtaacttataagctttgctctgctcaatttaagtgtttttttccaaaaaggaaagaaaaaaatgcatttaaaatcaccagtgaccacgcaaacctcggatgctgttgtctgaattagtcctcttaatgacacagcatgactgagtttaagaaagggttgaagtcagaaatgcaacataggttgggaagaaaagatggcttctgaatgtgacacagtgtgttctgccactcattcatcctgtctgatggtggctcctctgaaatttctagatgagacattttgttttgttttgttttgttttcagtgtttgtcaggaaagaaatccatttggttctgaaatacatttttaagaaattttagaacctttctgctaatagagcttgtggatggtaacttttgaactttaaataatttttcttatgttttctaaagtttttaaaaccaaaagttgcttatattggcaaaaaactttgttccacttaggacaatttgacgatatatatcatcttaaatattgcttaactaaattaatctgaaatgtaaaattaaaattaaatggttggtttgaaatgtgcactatggaatgagtcctttattatctttaggaaaggacaaaagtataaaggggtttcataaggtttcctgtgcttattctgagaagccggagacgtatagaaagcagtgagaaaatcgacgtcagactgtgagaggtacacaattcatattgaaaaaaggaagagccgctcctaccaagattctgatcatgaaagcttgaggatccgccttcagcaccctgaccttcttaaagtgaaaagaaagaccttttggattctgagttgcatcacttcatttgcagtttttctaatgtttccaaaggggtgattgtcgatgtcttttttaaattgaaaacatttccagacagcttttagattttagccgtcccatggggttctgagtattggcttcctgctgtgccttgagagaactttccttggtgtccattcccacctggggcttgcagcacagggcctcatggctggttctcccgggtatgagctaaaatgtgccacatcagaataaaagaaaccccaagaagcatgattcagctgagttcccctatataaacaggagaggcaaattttcctaacagacgttattctttcgagtgagttttatgagaaaacacttcatttaaacttcttctcaaacacagctgattctccatcacctattccacccgaggaatagataccacacctaaagccctactcatttcagaaggaaactcacatgtggggtcagtaggaaaaaacagctacatccatcgcatgcaccctgcatcagttccaaaaggacagtagtgggaatagttgttcttacttgtgcacttttaaagtaattgatcatacatactgtttgtaggaagcacttgtgatgtatagatttgacctttcaaatttagtagcattaggggcatttggatatgggaggacatgtgtgtgtgtgtcaaaatgactgaagggcactgctatcaattggtggagtagaaccagggaggctaaacaacttgtaaggcacgaggcaacccctaaccccacccccaccatgcccaccgtaaacaactatccctcctaaaatgccaatagcatccatttactggcctttttccggtatgtatacaggcgcacagatttacaactttagaagtaaatctctggagtcaaaactgaaatcttcctactggaaataaacacagtctaccacctgaaaaactacaccaagcaccaggtttcatcaatgactagtacctctagatgctttcaattaggacactgctggtgttttatttgttttcctacatgagctgcagttttatcaagctgtcatcctgtagaattttttttttttgagccggattttcactcttgttgcctaggctggagtgcaatggccataatcttggctcactgcaacctccgcctcctgggttcaagcaattctcctgcctcagcctcccaagtagctgggattacaggtgcccaccaccatgcccagctaatttttgtatttttagtagagatagggtttcaccatgttggccaggctggtcttgaactcctgacctcaggtgatccacccatcttggcctcccaaagtcctgggattgcaggtgtgagccactgtgccttgcccatcctgtagacttatcgtatatggaaatacatgtctctttgcagatagaccagcctcttccaaatttaaagacaggtccacgctgaagaggtgaaaagcttaattctataaatggggaaagctgttattgaccttgttagcattcctacaaggagttttgttatgaagtaatgataaaaaagaaaaaaaaccctacggctttagggcagccttcataatgaatgagcttgggaccttaataggaaattcaagagtagaaagtacttgtgcaattcagtcgctttatctattaataacaggtaattattaacctaatgaactgagaaatttgtacatggaaattgttacatttgacaggagaagggtaaatgttaccttatgcaaatacacgaatcacagtttcttaatttgtaataccacatgaaccgaaatgcatgcagaataatatatttctgcattatattgcaaatctgagagctgaacttaaatgaaatcgctaagttttagccaatatattcttcatttggaattgcgttacactcttgttaatcctcttattaatcaaaagttcatgtatcttcagttattattcttcctcatatttttagcctgtaatcttaagtacttactgagatagctgaggatcaactttataacttttctgtaatagtgggacctgagttaaactatcaaatatacctcaggaaataaatattattttactccagaaatgtttaagtaatggatttgggagggtggtttcaaatgaccctaagtatatacatttttttcctgctgttcacatacgttaaatgaaagtcacctatatcaaagaaatcctggaaacattttaaatttcaatatagatcaactatggttattatgtcacatgtcaaagccactgttctctctagggtctaggattgtactgaatatctttaacacaattttcaaatataaatatgtgaaggtttcctgctggtgggtgtatttctactatatacttcaaaatatttttaacatatattcttttttccactagtttcacatttatgatcaggtcttacataaaaagcaaataaatacctgtgtggtgattacattgccaatgttgttcagataataatgtgtacattgtatgacctagtcaaagtgaaaatgataacccctgctatctaaaaactgctatctaattctcaacaataatgggaaataattgatcatacatactgttcatagggagcattacattttctcctcctgccatgttctactgtaacagcacacctttatgaaaaggcacaactaaatcacagcctactgtttcctactgagatgctctcctactgatatctttgctgtgtgtccacatgagtctgcatggctgctctgtccatttaggacaaggagtgatctttaaggggctgtttaagtatgaaaaagttggaaataaaaactctatttgccatcactgtgaaactcttacagcatggaaccttttattcaaacaaagtattacatgggtgccaatatataaaatgcagataaaaatgctttatgctttttataagcagggataatgacttccagagacacaaatttctctgtactcttgtagctcagccaatagcaagcatattagatagtaagaataattttgttttaaaatatagacagatcttagacctaattcattttggttaaaatatcttaagttgatgaagtacatttgggagactgtcagtctcctctcttgtttcctagctttgctgaagctcctttggagttatacactgccatgttcaaacatggggtggatgtttaaacgttacttagagaagatataatgtttatagttgatcatttgaacacagacctgactttttagatgagttaacccacatatactcatgctcttgctatcatctattagaatcttgaattatttgttcctttcatttcctttaattcttggaataagatccgtattcctattatattatcttgttctcattttaagcaagactctttccatatacttctttcatttagcctataccttgccttcaatcagaattcctactgaagagggctcacacagcttgtcatagctatttgcaagattgatttatttaggtgtcattttcagagccaaaatctcgctatcaagagtataactagttggggctgggcatggtggctcatgcctgtaatcccagcattttgggatgccaaggcgggcagatcacctgaggtcaggagttcgagactagcctggccaacatggcaaaaccctgcctccactaaaaatacaaaaaaaatagccaggagtggtggttgagtgcttgtaattccagctactcaggaggctgaggcaggaggatcacttgaacacaggaggtggaggttgcagtgagccaagataatagtgccactgcactccagcctgagtgacagagcaggactctgtctcaaaaaaaaaaaaaaaaaaaaaagtttgactagttggaactttttatagtaattgcatgttttttaagatcctcattgccctattatacccaatctgtttgatatgtaagtttaatatgtggttaatgcaaaacagttagctaatatactatttattttaagcaaatgtatcacataattatcacagactcagaaaatggttcttctctgtgctgtgttgccatagaaccctttttgtgtgtctcttttttatatatttctcacttaggctacagaggacagaagggagaaagaggtgaacctggaattgggctgccagggagtccaggtcttcctgggacttcaggtaagtgggatattgtcttcacaacacaagcaagcctttacaaattagaaccatgcttctcccctagggtccttatatgtcaagtcgagtgatccatgttggctagagggtgggagagaggaagggccatatgtgatctgcattgtaattttttttttatgtcgttagctctgggtttgccaggctcaccaggtgccccaggcccccagggccccccaggacccagtggaagatgtaacccagaagattgcctctatcctgtgtctcatgcccatcagcgcacaggtgggaattgaacacacctgaagaagacttggttcctggtaacatttccttgccactggagctctcttaataccgtcaaaccctcatcatctgtgggttgctttttttttttttttttttttttgggagtaagccaggcattaaaagcaaccgtttgaatcctattcctatagcaattgcaaatcagcattttttgatttttcccaaattcattccatatgttttgctttacaattgctatgatttttactcagagttttatatgaaatatgcaagtaaatcttatcgttagttcttcttcaaaaggaaattgcatcttgtgacttagtagactgatgatgatatccattttgtagactcatcaacatgtggttggcctttgatttctgaattttaaagtttcagacttatcttttccttggtgtttaaatttactatcattgctaaacatctcgtcaacttttttgatatagtgcattgctcctgttgaatgttttttgactactttttataacttaagaatttttataccatctacatctatcctacttatgcagaaaaataggcaataagaacttcattttacaatttatgttttcaaaaaaaaaatgcaggaaactgttttatcagggagcccaaacacccagcatagccaactactgaaatgattttgttaattctgtataatgagctcaattcaaagcaatcaccactggcatgaataagtactgcgtgaaaagggagtatcaaattccagttttgtatgagttctgcaaaaaaagcctaatattctgtggtcccctcactcagtctctcatttggtaaacagaaagctgttttccctacaaggtgcttggtggtgaagccaccaagctgtctttggtactcttaaagcttcagtggcctagcaagatctttgggcccttgtatccattatccttatgacctcatcaccctcagactttaagacaagaagccaccatcaaaacaaaggatgggatacgtaaagaatggactcacttgtcctagaagatgaatgtgtagtgtcagcaaatgcatgttaagaaggtgaagcccaaaagctcttaaggagaattgtatttctccagaagctgcagcaagaggtacagctcaacaaaggaaaaccacaggactggatatgcaactagtgctcagaccaaagagttcacacccactctaaaaccatgtcctctgaaaagaaacaaaaatacagtgatcatcaaatgcctaaacagtctttctgttggttagctgtacattcattgaggaactgttgattggcaggcactgattctctagaacactgggcatgaggatgttgcagaaatctagatggtgggtcccacagatgtgagaacatgctgcaagagcctgccagccacagcaatcaggactcacagctcttcaaggagcagtgcagatttcaatttggctaaaacaggatgattgcttttgtctgtttactgaaaaatgagtttagaaaggctagcccactgacattggaaaaagctgtgaacagagttgtgtctgaggaatgtgcctaatttaaggcagggtttgttccaatgcatccgtgatttgaaccggttttcattatagattaatgaactgctggtcaggtactgtctacaatggctgtgcatacctataacattttaggtatttcatattgaattatgctgtatatttcaattccaagtttatttattttccaaggttattttatttattgtaagcattttgacattgattttttttttttcgttttctttcttgtgcaatacctacaatggtgctgtgttttaaacttacacaattgggacatacgtatgtgttttcttagtaaaatggtaatttatcccgaaaaagtgtacatagatctaaaatttggtgctatgtgtatatcttgagcttttaatttgttgaattttctaaacgcttacaacttatctgccactcatattaatttacttgaatttgtcataaagctaaatattttatatgttttcaaagattattttttcatattaataggttgtttatctttttgcctgtttgctaatttaaaaatatttattttatcattttaatgttttcatggacttttttgctgatggtaatcaactttttttgttttttggtttttgagttgttcttgtcatagacataaaaagacaattcattttcttgttttattaactctgttcatttttattctacaaaatatgtcatgcattctttcttatgaattgtatatttagaaatctttctaaataccattaaggcttgactggttaattcctatttcaaggatttggatttattcaggtaatttgatgggatggggaaatataatattgtgtgatgcatattacaaagtggacttgtcacaatgacacaaactcattttttgtaactgggaaatatgactaaatttgacgtaactagagaaacaaggctgtatccacatggtacaagcctttctcaccctactctattatttaccttcagatactttttcctgcctcagctctgtacacatgatatgcaacaaagggcagcaagaaatgctgggtccacctaatttaacacaaaatgaagttgagattcggcagttgcccaattcctttaataaaaagaaactaaataatttgggccccaaagtagggtgggaagttttcctctaaatgacttgatggttgccaaatcccttgcaccattttattccattccaaaacatgtgtttatttccacatagatgttaatgatgttcaaagcaggggagaagaattattcaatttcatgaataactcttgtttgcactccagaaaacaacatacatgtttaaatacaaaataattatgggccatgacgacgattaatattaaaactgtgatttccatatacaagtatgtttgagttccaatcttacattttataccaagttcaaaacactttcagatagaagtctttctatgcaaagattaaagtatgacttcaattcatatttatggcctttggaatccaaagaaaaacagaagaataattcatggatttgttcattgttctttccaactgaaggcagtaaccattacttctaaccgtaacacaaacacagcaagttttaaccttttaaacttttcactttgtgagcaaagtaaccccataagtttatttccctatttcatggtattgtttaaactttaaaattttagtcacttaaagaacttaagcaattatattaaaatacgttgtctgtgaaaattatcatttgatatttggcttataaagtaatttttatgaatctgttttatgagttaggtaagatttagcctttctgcagtctgtctcatctgttgggaacctgtgatatacctccatttgtccacaagatggtgtttaaaacaatttgttcagaagaactgagcaaactaacagaaatacaaggctacgaacagtttagtggacaactaaatcagactcttgcctttgcacttttttttaacttttgtagataatttttgttaatttgttttgttaatttatgtttttcctaattttaagcatctttatgaaacaggcacagtaccctttggtttgttgactgttttgattttatttcttcggtggatatatatgtacttatacacttagttaacatgcagattaactagtcataactgtttatacaccactctcatattttagtgatcaatatgaagacagctaaataattatcctactttttagacaggacagatactctctttcaacagacaagaaaaaagatttagcttatcacaagaagcagacaatttataaaactacacaatgtctaaactctatgttgctcagtgtacttaaaattttacagttatatttgtataacgtttatatttttctagaatacatcactatttacaaaagtacgattagaaacactgttttttttaagtaccgtttttattttcgtaacactaataatacactgggattgagaatttctgttaagtgttttgctgacgttgttttaatgaatactcaaaaaagctttgcagatttgtccattgctcttgttcttaaattatttttcatacttgtctgtatccaccttctgaagacacacaagtgtttactgtcgcagtttcccagcgttatttcttaatacttgagtgttgacacatttttgtaccatcccccttttgtaccatctctgctcacaaagattatatgcaggctttgaagaggaggagatgcagaagataattgaatttgtatcttgtatgcctatgtaattcaaagtgacttagtccattgaattgtgttcatttattagttggctggttaagatagcattaattatcttaaatttattcaactactaaaagtctcaggcaataggacagatgagtgtcatcatttttattgtgtggcatacttggagctataatccaaacgttttactcaacaaaataatgctagagtaactgatcaatttggttaaattgaatgaagaaccaagtgaacacagagaaaacttattcggacaagtagacccagcacagcaaaaatttgtctgaaagataagacaagcttataagaccaaagctaagtctaagaaaatctaaatggaaaaaaaattgcgtgttcagatccaatagtgagtgatgtggtacaactggaggagttagctacttgcttcatgaatttgtcaaaagtgaatactaataaagtgggaggcttcactaaatgagggggtaaataagatttaagtttatcagaagtgtgtgtattgtgtgaccatactaagcttctgggtgtaagtaaagatgctggctattttacaactttttattgtattgtgttatgcaaagtacattttggagataaatgtttttcagcacattaatgtctttaaattcaggttgtattgggtgtattttacaactatttatttttaaataacatttagggtgtgttttcccccattttgtttgttctctatcttacctcatcaaactctttacgatttaattgaatatactcatgttaagtgcaatggcattagttttattcaaaatcccacatgggcataatgctttgaggccttgattcctacatgttcattatgcataatgagcttgtcacctatctcagcaataaaggttctgaccctatgtcagggaaatctaaggtgcaattattaaggccatatctactcttcatcacttgccatggctgaagctccacacttcagtccattttgtttggtgtcaaccatggggatgctccagaagcactcttggctaaccatgagccccacaggtgtccaaggaacgttaattggtctattgcagggttcatgtttgtaccatcattatagttttctttgtcacatgaatcattgctcagcttgaaataatcaagtttgtcacccatctccctggcagttcataaaaagcctagtctaattatttcagatgagaattataagcagaatcaaaagcccaaaagcaggcagtcctttgggacttttgtcccccagagtgatcatctcactaaaatcatttgagactttttgctatagaggtccctgagggagataagaaataacacaattaacttttctcatccatagaagcttttacaccatgagtgataaggtaataggcaataagtagttaaatacatagcaggttttcttaacagaaattaattgcatcaaaacgtgccagaggatttatatgtttacctataccgggtaataacttacatagttcttaactattcctatcttcaggccccctttggataaattaactaggtgctctctaaagaatgttgttgtcttttcacacacatattttcaacttaagagacaaaatggaatttcaaatatatctcagaaagagaggtaatttgtttgagacagtttccctcccttgttctctctccagctatgttttgataacttggagtcaaaagtaatttgtgaaggcatgttaagcagagagttagcatgaattgccatttattaagactaaaagtaattttcagttagcagcatcctcttcctgatagccagatcaatcaaatatgttacacttcctctcgttgatcatttaaagagcacttaagcgtgtgtatttacagacaggcattactacagtcagcccattttgatttaatagttcttgagccataggtactttatactgccatgtcctggatcacaactcactaaagaaggctacacaattgaaaagtatttattttactttgcacaaaagggcttgacctatgtttattgaacacaagtattatttttaaaaagatatttaaaatcatttatgtttgtcacccctctataaacagcaagattgctagtttgctagtattttttccttaatactgagttttcactccttttgccaggttaccagcaaatatttttaagtaattttcttgatatttggaaatcagaatttctattggttttccacctatgttggtttacttagtttattttagagacagggtcttgttctgtcgcccaggctagagtgcagtggtgtgatcatagctcaccatggcttcaaactcctggtctcaagcaatcctccaacctcagcttcccgagtagctgggactacaggtgctcactaccatgcctggctaatttttaaatttgtttttatttttacagagacaggagactcaccgtcttgcccaggctggtctcgaactcctgggctcaagctatcctcccaccttggcctttcaaagtgttgggattacaggcgtgagccaccatgcccagccttggtttacttttaaactcagagactgtatctcagaaacactataatcaccaaaaaattttaaaaacacaatagaggtgatcttctacagcaggaatttatattaagcttatttcagttggcaaataaatcagattttactaatgatgtttaagaatagcgatattggttcagtcagcttgaaatgtaaagtatccaaataatcaaatcgatcacctatcctgatatgactactcattcatattcttctgctgtgcagaagccaattacccaaaaccatgccagggaatttatgtgctcagtcagtctcggaagtgatttccacagttcttaaccaacctgtcagctattagggttgaaaatcatatcatactgccatagaagcaccggctagaaataaatcaggaatcatttgcccttaattaacatgccaggttcaaaccaactttatttatttacactctcctctcccagtgagtgctctagttgccactttatccaactttcaaaaatatctcagagaggatttgagatttctattttgctagagagacatgcttggtcagattcaacatttaccaactctctttcatggagggaatttgctgggctcttttccttgcaatttctaagccaagtgtcttctgcttctgtaaactacttcacttaactgaaatttataacgaattcttcctgccatttggaatgtggtagttttgcataatctatttgtaagtgcttgtttccaatgttgctgactgtatctgtggagcttgttgtacaacctttacataaccaggtttgtaaaacagttgagtgaactgttctttgaaattttattttttttaattttcttatgaatattataaaacttagaaacatgtttgattatctaatttttcttttattgtatttgattatgtcactctagttaaaataaaagcactttggtgaaaagataatttctatgcctttatttaattatgtgtcacagctcctgaaaaagtttgccatttttttaaggattgttttagggagctataacagagacctttattttcaaaagtcatatttgaaaaaagggaaagaacattctttcagtctatgtaaatagcactgatctatatggcaaagttggaatcttcttaagcaaaattcatgctagaagcataaaactagatgctgtaagcagttttaaagaaatccaaatacagattacataatgattgatttaaccaaacaactaggactagaatttaaaatgtataaaagtacacacgagaaaaatatatataaaaaattatattagggctcactctcctttgacttgacagaatttagttccataaactaactaaagatactatgttgagctattgttttatgccccagcacaggttactcacaggctctgtgatataaaatgaatatattaagtctgttggatagttaagtagatgttaatgaaacagcaagccaatatgattacacagataataataaagtgcttaagtggtcaggaaatacttgttaagaatacagtgctttagctgagctgcatttataaaatttacaagaaatggtgaaacataaatcatgtttacaataaagttctgagtaggagggagctaacaagccattggaatgaaggcagtggttcttaacctagaaataaagcaaggctagacttaaaaaagtccacgaaatctctgaaatactatacaaaaatatagatgcgcatgcagctgcacatctttctagggaattaacatttcgaaaaggtccatgaagctctctccatacacactaaaaaacacacacacacacacacacacacacacacacacacatacgcatctgtcacagggtaacaccctctgtggaacagctttttaaattactttatgtagaaaaaacactaatattataaacatacacctatagaaccagtagttaagtaatgtttaatgtatctaaataagctcagtaacttcttttcattgaacatgattatttataagaaaacatgcaagagattaagaaaccatatttatttcttctttggtacaaccagagatgttacctcaaacctttaaaataaataatctcatcaataaaatttatgaatgccagagtattaaaattatttctttgctttcacatagaagcgctcaaaatattaacaggtttggggtaaagtacatacagttcaacaaaagttcaaggtgaagaaggaaaccaatacatgacgtaaagaaatcatttcgggagatgtagccctttcttatcactccagagacagcacatcgatgagattttaagcaccaattccattgaatgtagtggggtttcttcataactagtctagtaatcctctatataactgaaacaataatctgagaacaacttctaaatgaaaataactactgcaactgaggtaaaccaaacagttgtttttgtttattggcacagtggcccacgataagacacataggtatagcacactaaagctcaagatcctgggaacaggagtataaatttattcaagggaggtgtttggttttctttttttttttttaactgatgactctgctgtcttccctccaagggaaaggaaagagaacttactgaatagcaccgttcttctatatgtgattgtcaagtaggacttctgtaatcatactgaaggtaatacattgtaatcatgctgaaggtaatcatctttgccccagctttggatggtgtttctcacccaggctccttcaccaggcgtggttcatgcagacagccatgcagcagtaagcctttcaagggtcaggccctttgttaaatgctcgctgaccagcctgcatggtgcaggaggctggctcacagaaaccgggaagcccaggaggtcccgggggtccaggcactccaggaattcctgccacccctggggggcctcgctcaccgtctcggccatttctgccatagctggcagggcctgggtcacctgaaacacacagaagattgcacatgtgaacaggagaatcctcattgatgcaaactggcagagggcatggctcagcagcgctcagataaggggtttaacaaacgcttttggaaacgatggatgatgactggtgatgattggtgatgatgatgatgatgatgataataagatcccttc

SEQ ID NO: 77 - DNA, 3429 bp, Homo sapiens
atgagactcactggcccttggaaactttggctttggatgtcaatatttctgcttcctgcttccacttccgtgaccgttagggacaagacagaagagtcatgccctatcctgagaatagagggacatcagctgacatatgacaacataaacaaacttgaagtttcaggttttgatctaggagacagcttttctctaagacgtgcattttgtgaaagtgataaaacctgtttcaaattgggaagtgcacttcttattagagacactattaagatatttcccaaaggccttcctgaggagtactcagtagctgccatgtttcgagtacgaagaaacgccaaaaaggaacggtggtttctgtggcaggttttaaaccagcagaatattccacagatttctatagtagttgatggtggaaagaaggtggtggaatttatgtttcaagccacagagggagatgtgttgaactacatttttagaaatcgagaactccgtcctttgtttgatcgtcagtggcacaaacttggcattagtatacaatcccaggtcatttcactttatatggattgtaatttaattgcgaggaggcagactgatgaaaaggacactgtggatttccatggacggacagttattgctacgcgagcttcagatggcaagcctgtggatattgaacttcaccaacttaaaatctactgcagtgcaaacctcatagctcaagaaacatgttgtgaaatatcagatactaagtgcccagagcaggatggctttggaaatattgcatcatcatgggtaactgctcatgccagtaaaatgtcttcatatctgccagcaaagcaggaacttaaagaccagtgccagtgcattccaaacaagggagaagcaggattaccaggagctccgggttcacctgggcagaaagggcataaaggagagccgggtgaaaatggtttacatggtgctccaggattccctggtcaaaagggagagcaaggttttgaaggcagcaaaggagaaactggtgaaaagggtgaacaaggagaaaaaggagatccagctctggctggccttaatggagaaaatggtttgaaaggtgacttgggtcctcatggtccacctggcccaaaaggagaaaagggagatacaggacccccaggaccaccagccttacctggttccctggggatacaaggcccccaaggtccacctggaaaagagggtcagaggggaagacgagggaaaacaggacctcccggaaaaccaggacccccaggaccacctggacctcctggaatacaaggaatacaccaaactcttggtggatattataacaaggataacaagggaaatgatgaacatgaagctggaggcctgaaaggagacaagggtgaaactggactaccaggatttccagggtctgttggccctaaaggacaaaaaggagaacctggagagccttttacaaaaggagaaaaaggagatagaggagaacctggggtaataggatcacagggagtaaagggtgaacctggagatcccggaccccctggtttaataggaagcccaggactaaagggtcagcaaggatctgcaggctccatgggacccagaggaccgccaggagatgttggattgccaggagaacatggtatcccaggaaaacaaggcattaaaggagaaaagggagatccgggtgggatcataggccctcccgggcttccaggtccaaaaggtgaggctggtcctccagggaaaagcctgccaggggaaccaggattagatggaaatcctggagcacctggtccacgtgggccaaagggtgaaagaggacttccaggtgttcacggttccccaggggacataggcccacaagggataggaattcctggcagaacaggcgcccaaggaccagctggagagccaggtattcagggtcctcgaggtctccctgggttgccaggaactccagggactccagggaatgatggagttccagggagagatggaaagccaggcctgccaggccccccaggtgacccgattgcacttcctctcttgggagacatcggtgctttgctcaagaatttctgtggcaactgccaagccagtgtcccagggctgaaaagcaacaaaggagaagaaggaggtgctggtgagcctggaaagtatgattccatggcccggaagggtgatatagggccacggggtcctccaggaatcccaggaagagagggaccaaagggaagcaaaggagagcggggctaccctgggatacctggggagaaaggcgatgagggtcttcaaggaattccaggcattccaggtgctccaggcccgactggaccccctggcttaatgggaagaactggacatcctggtcccacaggagcaaaaggtgaaaagggcagcgacggaccccctgggaaacccggaccacctggaccacctggtattccatttaatgaacgaaacggcatgagcagtttatataaaattaagggaggtgtgaatgttcccagttacccagggccacccggtcctcctggcccaaaaggcgatcctggcccagtgggagagcctggtgcaatggggttgccaggattagaaggatttccaggtgtaaagggagatcgaggcccagcaggtcccccaggaatagcagggatgtcgggaaaacctggtgccccagggcctccaggagttccaggggaaccgggtgagagaggacctgttggagatataggtttccctggaccagaaggaccctcaggaaagccaggaataaatggaaaagatggaataccaggtgctcagggcatcatgggtaagcctggagacagaggccccaaaggagaacgtggtgatcaggggattccaggagacagaggctcacaaggtgaacggggaaaaccaggccttacaggcatgaagggggccatcggtcctatgggtccaccaggaaacaagggctccatgggatcccctggccaccaaggccctccaggctctccaggcatccctggcattccggctgatgcagtttcatttgaagaaataaagaagtatattaatcaagaggtcctaaggatttttgaagagaggatggctgtattcctatcccagctcaagctgccagcagcaatgttggctgcccaagcttatgggagacctgggccaccagggaaggatgggttgcctgggccaccaggagaccctggaccccaaggctacagaggacagaagggagaaagaggtgaacctggaattgggctgccagggagtccaggtcttcctgggacttcagctctgggtttgccaggctcaccaggtgccccaggcccccagggccccccaggacccagtggaagatgtaacccagaagattgcctctatcctgtgtctcatgcccatcagcgcacaggtgggaattga

SEQ ID NO: 78 - protein, 1142 aa, Homo sapiens
MRLTGPWKLWLWMSIFLLPASTSVTVRDKTEESCPILRIEGHQLTYDNINKLEVSGFDLGDSFSLRRAFCESDKTCFKLGSALLIRDTIKIFPKGLPEEYSVAAMFRVRRNAKKERWFLWQVLNQQNIPQISIVVDGGKKVVEFMFQATEGDVLNYIFRNRELRPLFDRQWHKLGISIQSQVISLYMDCNLIARRQTDEKDTVDFHGRTVIATRASDGKPVDIELHQLKIYCSANLIAQETCCEISDTKCPEQDGFGNIASSWVTAHASKMSSYLPAKQELKDQCQCIPNKGEAGLPGAPGSPGQKGHKGEPGENGLHGAPGFPGQKGEQGFEGSKGETGEKGEQGEKGDPALAGLNGENGLKGDLGPHGPPGPKGEKGDTGPPGPPALPGSLGIQGPQGPPGKEGQRGRRGKTGPPGKPGPPGPPGPPGIQGIHQTLGGYYNKDNKGNDEHEAGGLKGDKGETGLPGFPGSVGPKGQKGEPGEPFTKGEKGDRGEPGVIGSQGVKGEPGDPGPPGLIGSPGLKGQQGSAGSMGPRGPPGDVGLPGEHGIPGKQGIKGEKGDPGGIIGPPGLPGPKGEAGPPGKSLPGEPGLDGNPGAPGPRGPKGERGLPGVHGSPGDIGPQGIGIPGRTGAQGPAGEPGIQGPRGLPGLPGTPGTPGNDGVPGRDGKPGLPGPPGDPIALPLLGDIGALLKNFCGNCQASVPGLKSNKGEEGGAGEPGKYDSMARKGDIGPRGPPGIPGREGPKGSKGERGYPGIPGEKGDEGLQGIPGIPGAPGPTGPPGLMGRTGHPGPTGAKGEKGSDGPPGKPGPPGPPGIPFNERNGMSSLYKIKGGVNVPSYPGPPGPPGPKGDPGPVGEPGAMGLPGLEGFPGVKGDRGPAGPPGIAGMSGKPGAPGPPGVPGEPGERGPVGDIGFPGPEGPSGKPGINGKDGIPGAQGIMGKPGDRGPKGERGDQGIPGDRGSQGERGKPGLTGMKGAIGPMGPPGNKGSMGSPGHQGPPGSPGIPGIPADAVSFEEIKKYINQEVLRIFEERMAVFLSQLKLPAAMLAAQAYGRPGPPGKDGLPGPPGDPGPQGYRGQKGERGEPGIGLPGSPGLPGTSALGLPGSPGAPGPQGPPGPSGRCNPEDCLYPVSHAHQRTGGN

SEQ ID NO: 79 - DNA, 352938 bp, Mus musculus
  misc_feature (1)...(352938): n = A,T,C or G
ttaatagcttttaaaatttattataattactctaagcctgtatattttaattatttattgctttaaaattatatgcatgttaattatgtaaatgatatgttacattatattttctttctgttttttaagttagtcacacacatgtgagtgtgtgcccatgtgtgtgtgtgtgtctgagtcagtgtgtgagtgtgtctgtgtgtgtgtgtagaggccagaggataactttcaggagtcagttctctatttttaccacgtggatctcaggtatcaaactcacctgcatcaccaggcttggaggtgcccctacctgctaaactgtctcattggctcttgattgttttgtaaagatgcagtctcactatgcagccatagttggccttgaacttgaaatatttctgccccagccttctaagtgctgagattacaggcttgtgctgtaacacccagtgttcactctgatagttcacacattaacttttgtttctttgacgggtgcttatttttttctgattttttttaatagctctgaatttgccatatgaagttgtgttttgttggggaataaaagaaaatagcatatgtggaaatttgggattattgttttaattattgactatgtacacatttcgaataatgtgactaaggacaaagtggttgtgttaagaaacaacaaagtatcttagagtatggcattgtgagtgtgtctatgtgtatgttccaggaattgacttgccaagggtcttagaacagaataaatatttgagaaattcttgtttgattggaaattatttttccacagttccctgtttaattaattaattaattaattaattaacttttttgcagtactagggactgaatcaagggtctcccacatgctagccaagtgctctcccactcaaccacactcccaggcttccttcttacttagtcctttgactatcttaagaagcttgtcgttcttcacatttacaagtgctgaactaagcctgtctgaatgctctcaacggcataaaagaattacttgcatgtctgtacacctgagtggcagatcgaatcagagctgaatctagggtgaggtgtgtgtgtgtgtgtgcatgttcatgtttgtgtgtgatttttgttgttgtttgcttgatttttatatctagggattggaatgtctttgtttgtttgtttgtttttccagacagggtttctgtgtagccctggctgtcctggaattcactttgtagaccaggctggcctcgaactcagaaatctgcctgcctctgcctcccaagtgctgggattaaaggcatgcgccaccactgcccagcgcccagtgggatatctttttccagtgtaattctttattcaggaaagagacatgataatgacgtttgtttgtttgtttgttttttggctaacttttattctgtgtttcgtgttttctgaaacttttcttgatgtggagggtggggaatctcaatatcttcctttcacaacccacttggcaatattattcagccctgcgtttgaaggctggaggtagtcttcggaactttctaatttgatgattcgttttcttttctttctttctttctttttttttttttaaagctgaggttgaagtggtaataagattctgtgggtcaggatcagttgacttccttcaggaaaggtgagcaccccttcgtaatannnnnnnnnnnnnnnnnnnncccagcaaccagtgggatatctttttcccagtgtaattctttattcaggaaagagaccatgataatgacatttgtttgtttgtttgttttttgggctaacttttaattctgtgtttcgtgttttctgaaacttttccttgatgtggagggtggagaatctcaatatcttcctttcacaacccacttggcaatattattcagccctgcttttgaaggctggaggtagtcttcggaactttctaatttgatgattcttcttttcttttcttttcttttcttttcttttcttttcttttcttttcttttcttttcttttcctttcctttcctttcctttcttttcttttcttttcttttctttttttaaagttgaggttgaagtggtaataagattctgtgagtcaggatcagttgacttccttcaggaaaggtgagcaccccttcgtaatataaaggaggaggtgatcactacactcaaaggagcagctggaaacatctggccataaagcagagagacccaaagccagatccagaatatgcaagaagggcagttctccagacagggcagatacctaactacctaactggtaaataagcaggcatccattttcttttctttccatttctttccttttctttttttctttttattcaaaaggagttgcaaaaacatctgttcatccatttgactaggtactttgtaaaggcttgccatgaagccaataaaatgcaattatcctacgtaataagatgaaggagatgaagttccatgcatgagcaggagaggggggcatggagttggaaggactgtgaaagacatgggcaggtgaaactcaactgaccagtggctggagctggagaagcaaaaagtgggagttctagatcagtctcaacaggtgctaaatgatctcaggcaatggtgggtgccacgtttgtggcgcaactgtgatttgggtggagcacgacacacttggcacatgtgtgggaaagatctggaagatccaacttgtccagattttcttgaattggtgggctaaggagtttggtcattttataagcaataggaagtcactcaatttaaatgattggctggggcaaccgcatcccagggataaaaattataatcgtaggaaggagaacttggcttgaattcacaccgagcttggaatgattagaagacatgtgttacttcactggaggtgaggcgaaagatgagagctaagggggtagacgtgagagcacatggcaaggatgagagcccaaagggaagaacagcagagagggaagaggaaggggcggaggagaccccgagcgtcctgcacagcaaggtgagagcaataaaaagccagagatgggaagagtgagaaactgggagatttggtaactgggatatgaagatgaggggtggttctctgggaagaaaaggaagccagttgtaccaaatgataccgatgggcgagggaaaagcagacgtcaacacaacatcccaggtcattggagagctgtagcgcagtttctgctgagtggaagaggcagtgccagcaaatgtccttcacaggtgtacatttcaaaactgccctcgagtccgtatcatgtggagatgccttattcactccgattattttataccgagtgggtgcaaccagccgctcagtgtaggagaggctgggggagagagggtgcagtgatggacagctggtgacttaatctgctgttggttcccacccagagggcaccaagagaggcacgatgggtaaacagtcttttggtctcaggctcctcctaaggctcggcttcagctgtaagctgctttctctgctctgggagcataaccttcaagagaatccttcagaaaggggagctagctagacaggcgtggcagttgcagcgtccacactgaacccttcccttcctaggcacccccttacttgttctggcatctaacacagtaccaggtacacagactgcactcattatatatttgtagaatggatgaatcaatctaagcccaagtaggctgagtgagctttgcagaatgtgggctccattgatgtgtttcctgaaacaagaggccaagagggtggggtgaggggggcgggctgcttcggttagtggttcctactctctgatcaccctcagtagcaggcacaggagctctgctgagtctctctcacttaccttgaccttggcagagcagcacaagtggtcctctaggtgaggaggcgaggtgggcagagatggggccaagatccagtctttccagtcaaaggctctaaatcgctgccgttgactttccaaatggcagttaacatctagtaggtcaacatatttgcttgtttattcaggctgaacagtgatctcatttgatgccaaaaaaaaaaaaaatggattaaagaagtgaggctacatctctgtgattccagacacggggcatgcaaatagaaatgcaggtggcatagtcgaccccatgtatcttgtatgtagtttccagccagagctctcatatggtgggttgtcctcccaggctacaatactggggcatcatggactgattgctttcactggttgcctccatttgaaaggactgtcttcttcttagtctctttctgtgcactccatgtcctatttctaggagagagcctttcaggaaacggtctccactgtttatcctttaaactctatgttcttagagttcttagaccatttctagtttatctttgagctccagaagtccaagagaaatgtccagcacatgaaaagggctttatgaatatgtgccaagtggtttatgaattcatgaatcagtaaacatccagccctctcaagtagcatgggcctttggatttctgatactgccccagtcttgcccttttcttttctctttctgctgggtattgaaccaagggctgtgtacatgctggataagcactctgccactgggccacatccccatccttgagtttgggagatagggctcactgtgtatcccagactgatctcaaagtgggaatctgattgcctcccttttcccgagtgctggaattacaggtatataacaccacacctagctttattccttttttgaccatatcttaggcacttatatgtttctactccccaatctacccccagccctcaaaccaaagccattcaatgactgtattctgtcctttctgaaacagaaagctacccattagtcacaaggtgcctgttgtgtgttatcccactttcagtgacatagacaagacatgggaaagacacttacacagcacttactgtgtgataggtgccactccaagagctatatacagatcaacgaacactctttcataacagtctattggtatggtgtattcttatttaatcccctgggagactcttaacttaacttcatgcctttcttctgcaatactaacctcatgtctgtgacctaactcttaagcaaggaagacattgtttgacatacatcaccttaacagcagccactgcaataaggaatctgaggcttattattatcaggagagctgactgctgtttcccagctctctgtcactggaaaagtcccttactttctgggcctcagataacaaatagaatatgtctcacatctctgcagcaaagaagcagtaagatgtccttagtgctgttattactgaagaggtgttgagttaccattaagtgataggttcaaaaattcctttgggcaagttccagctgtttgatcaactgataggtactggtattctgtggttccttaaacccaggtctgcgagatgctcgttccagggctggacattgttatataaggatgtgaaattccattttccgccagagtcaaggctgtgcggtgctgtgaatgccagcagcctcccgagatgtctgcatttccatcctgctcttctgctccgctgtgcatttgcacaaggtttcctgccaactttgtcttaggaacccactcccaagccctctctgcattatgttccttagagcactgttttgcataagagtctatttcttggaaaagctcaataaggagaaaatagaacaaaggggcctctgatagtttaagcacaagccacccgagtgtaattggcaaggcagagtgatcaggattggtgggaggggaacatgtcttcagccaaggcccagattttcagattcctcaatgagtggctaaaatcttatatgaagagggcccaaagcctgtgaggtctggaaagatctttgtgaatgaatggggtagattctcaactcaccactctgtatgccttggcatgtgctccacggcctgcctggtctggggatactgaaatggctttgcctcccttctcttacatacgaggctgaaaatactcctgtcagtcttcctcgatcttgtctgacagttgaattgttcacaggagtatcagggatacaggaaaaaggattctgaaatgtaataatctgtatatgttcaataatctgggaaagtttttcagtggcttcctctgctcctattgaattctgagtctgcagatcacagcttgcagggaaacatgcagaacatttggctgctacatcctgagcatccctcacccccgatctctctctctctctctctctctcctcctcacccctctgctcctccctcccgtgtgtgtgtgtgtgtgtgtgtgtgtgtgtgtgtgtgtgtgttggtaaccttgtgcccaataagggggtatgaacttcttgggagctgtgagaggaattgctggtagtgtgaaatggagggtgtagatctcgacaaagttccactgagagtggcatagagctggtgactgatttaggacttctgagctctcaaggttggttcctgaggtactgtattgctaagtacttgtactcagagtgctgtctcaggagtgaccagtagatggtgctctggcaacagggaaataagacttctggctccctgaggctgagaaaagggttttccaagggttttaaaactggtttccagagttctgatcagttgctgcttctccacacttccatttgtggtctttaagagaacagtaaaaccagggggaaacatacttaccagatttccatacaaggatcatgatggcaatgttctggccactcctgatagttccctttagtgtggttcctggaatatttaggcaccggtcagaattcatcttgagagtaggaggcagggcatccacaggcttagcatcattgtgtctccacttgatgatatacacgttgcaattatgtagcatggctattagaaactgaaaatcagatccattagatgtttacactctgccttttatcagatcggaaccaacacctcatgactccgaagctctgctgttctgtggtctgaatcagcaccttaattcacgctcctctgggctgtgagggctatagtagtgccctgctgtagggcttatgtacactggtagctataacaatcgctggtgcaatttaatctttaaaacggtatccacctgacaagttgcaaagtgaagagaaggaagccagtatagagacccagaggtcttaaagctctcaaagctgtgacattcaggttgaaggggaaaagagaagaacacgcctcagctttgctgcccttaaaccaagcccccttctaaacctactgatgccataatattttccctggccctctgggactgcttctccaagaatcctaatgaactctaccacagagccattcctgctcccgagtaaactctgcctagatgttggtaaagcctgctccgtgggaatgcaggaaggctaggctcagccccatgaggtcccagtgtggccagtgtattgtcttgcatattctaggcttctaaagaattcagcagtcacaggactcacagagtatggaagaaagaggaacccgaatcagtactagattttggcttactgggtaaagagacaaggcaggagtccttagtctttctcggaagtacttgtggaaggtaaaaggctagtgtgccctgtttagcaaacagacacagaggcatgatgaggaaggtgttatgtctcatccttgaagtgagctttagagcagagcttgctaggctatacaatctcgtggaagttatgaaagacacatcatttatgtcatcatccatatggctcattatttaatccccaatgtctaaaatagtgtctgttgtggggaatgtacgcaaatatatttgctaaatgaatggtttgtatggctcctctgctatggaagatcagattttttttagtcccgtgaagtttacagagctctgagatagccactctgtctaggtgaccatctagtgagacttcacagccaccttcctttactctgtctcctaataagctcctcggcaaagtgagatcacaataacaggtggcactggcacacttccagccgagatttgatctgaaatgatctccgatgaatcccagggtcaacactcgcttcctgagggcaggggtgattgcaaggcatccctgtgttgaggccatttctttgcatttcttgtacacagacccttttctgtcacacacacctacacactcaacattctcatacaacagacatgtatcagtgcacacacatagacactcacagacacatacaagtaggaatacacgtgcccaacacccagacaccactttatctcttaatcagttaatttcacacactgcctttcaggcctgccgcggtggcgctgccctcatggtgacttccaacactggggctttggtttgcctttgcttacgtcttcagccagccctcagcgcttccttcgcttccgtagaaaggttatggatacaactatgtgttgaagccaagggtgaacataagtcaaggaaagtatgttccagacagtgcagatgatgggaggggacagggatagactgtccacggagtctcctgtaggcaaggactagattgttaagcacagagcttctttctctggactacatgtcctccctctgcagctcagacactttttttttttaaatgacgtaggtttgagaagatcaatggaccttggttgaaagtaaaaggtggtggtgggtgggaaaccccctttgttaggattttgagggcactttgcttaggctctctgtctggggattggaatatctgggccacctgccaggaggaaagtggaacccaatctagaaggctgctttgtaaggtcccttagggtccataggacagaaggtcccagagaagcagaggtacttctctatgaggtctgttaagtgttggtttaggaagagggcactctctttgccctggggatccctgttgatggtagtggaacctaggagatccaaagcagaggctacaagatcctagggtggggtgcacaagtccctactctccactagagcagtggcgagcagaaccctatgcagagtatggaaagaggcacagccctgagtacccttcctaggaccaaagagagtgttcctggacaggtctttgatctgttgcagagagtctgcaggcatcaccagcttcagtgggcctctcttttccatctcctgagggaaccgcgactcttccttggacccttgcctaggtagccttcagtcaaacgaattcacaagccaaaccagcctcaccacgctggactctgagagccccgcccccgcgtctctctcggatccttggccaccttgctgcgctgctgcgctgtgctcctcaacctgcccttaagcatcgtctctgctctctgtagccaggaaggccgggaggagaaagagctggtctttggtgaggaagttcggtatgtggattaagtcctatgccctgccatcactagctaggctgactgcaacctgttcctcactgcgaccgcccgcccgctcgctcgctcgctctcccaccctcttcccggcgcagccgcggatcgctgttgcatgctgatcctgggaggcggcggcggcggcggcggcggcgagcgctctgggcggatgctggcacttgggcttcgctgctctctggttgctgctcaacttctaccccaaaagcaggagctgtgaagtcatttgcccctctctggctggttcgacttctcatcttcatttttcgggcgatgcggtttacgcaggaaccttagtaccgctctcccccccacctccatctccctctctccaacctttggatgcatctccgctggcagatttaaagagccaagtcttggctgtggaatttcttagatggacttgcaggggctggcgttctaaagcatgtcaccgtagctggccctcgtctttttttcttttcatttttttcaaagttcttttgttttcatttccttcttcctctctacccctcaccccgaccaataaatcagcaaactgttacctagcggaccagtgcctgcctttctctcagccaggtgtgccagaagaggagctatgtttgaggaccgaccttctccacccctctccggtccctgaacaccaccccacgctggcattttgggggaaaatattccctctagaagccctacccccttcttcttcttcttcttctttttttttcttgaggaatggagcttcgcagaggttgcctttagattcaacagttcagagcagggctgaagagcctgcaggggtccccagaggcggtggtccctgcgcctgtgtggataaggctctgagcctgcctgtgtcttttctgcctcttgttgtgtgcgggtgttcggcgatcacctttgtgtgtcttctgtctgtttaaacttcaggatggctcgcttcggggaggcggtggtcgttggcaggccaggctcaggcgatggagactcggaccagagcaggaaccgacaaggaacccccgtcccggcctcggggccggcggccgcctacaagcagtcaaaagcgcagagggcgcggactatggctttgtacaaccccataccagtccggcagaactgtttcacggtcaacagatccctgttcatcttcggagaagataacattgtcaggaaatacgccaagaagctcatcgattggccatatcctttcttacccaccatgacttccctctccccctttgcattccatcgggtgagggggggcacctagcatggaatctattccccaccccttcctggtgccaaaatttgcccctttgctcaagtgcaccctaccttgttgcattcacggggcaagcctgatgccccggagacctatttgggcagtagtggttttcaaggtaagacttttggttttggggattattttccatgtggaaatctctaagtgtacttaggtgcctggtgtggagacatctgcctctttctgggctttgtctgtttcttggccacccccaaagtcctaaccctttcagaagctgcactccatgtggtttggcttacctcaaatctcaaggattctttcataatcagttctctcttttccaccacttaagccagtccctctgctcccattcctaccagctgggaagacacttgcactgtctgccagcagagaagttgaggttctgggagggatttgccagatgagaagctccaaagagtagacccatgtatacaagaagacaaatgagtacttatgaaaaaggcgttgggctagggactcagctaactctggagaccaactttaagttctactgaaagtgaatgcctgtcaggggagatgatcatgtcaccaccagcccaaagagctcaaagttggagttctttcttcaggcaaggaggtgtgttcttcctttcttggtcctgggttgttactcttgcttcttaatgtttgccatacctggctgctctcccagtatactgaaccatagatctactgggcctgaacccatcagctgagggtcagaggtgtgcaaacaatttctctctaaagccaagggtgttgctctttacaaggagtgggtaggtcatctatggaggtgatggtttgggagtaaaaggctaggatggaagaaacatctttgcaggttttaccaagcgcactgaatgcaggctgctgatcaggcagcttcctgcctgctctgcactaagaatttgcatgcctgtcaaggccattaggagttgaggttggtagggtgtttcaggggattacaggaggcaagccaatgttttgaggctagatgtggggggtcctcttggggacagggactttggtgcctctggagacatggttcttgggaagaatacacctgcaaaagagactcctcctctttgccccatgctccctcccccaaccctcctctcaggtgtgcagcagtgagaaagctgaggctggggtgggggggggatggggttcaagtattagtttgcaaggcatcttgcttccccccagggcctgaacatcccctgcagcccccaacctctagtttttggccttctctcccccacccctccagttccctgcctcagctgctttgggattggctggtgcatggtgcttctaggcagcagcacctcattagaaacgaagcagcatctctaagcagtgatgcttcctgctgctgttcacatcctcccacagacaccccctggctgggtttctccctttctcctccttgttctccagttctcacctccccctcccacctccacagaatgatccgggccatagagtgcttgggttgaactatttagataggggcttggggcgggggaggggtccggtccctgcagtcatgcccagtcagtgagctgcacaaggcggactgattgcattgtgttgcatgctgcggcgggcggctgcaaataactccttggagcagtactctactggtctctcagggaaggtcccttccctcgaccaccttctacagttcttttagattccccacccaccaggttcccctttgctgtgacctgcttaggacaccccgcctccagacagcccccttctccgtttgcttgcagtagacaaagcagcttttcagtcccacagaaggcaaagtgtggtcacagccctccttggcacctcggacagcgccatcaaaactccctggctggtcctgagctcccaagtcaccgggtgcagcacacagggtacttccggttaagctcaagctcccggactgggacacgaagcacgtttccaacaccaaagccttttcctcttttcatttctgccgcaaagacacgggttttccaccaggagctttgagagcaaggtgctgctcgattttatgcattcttccctttagccaaaatgaagtaaggatcgccaaaggagagattccggagggaatggattctattctcatcctcagtgtcctgtcccagacatctttgctctccgcatacttagacattgtacagtgttcctacagcctgtaggctgttgtaacctgttcagagaacatctgctaagatgttgaggggaagctggttggattttttttccccttctggttgtacagtgtaactgactaatgtattccctccggtagtgaccacgtggaagcattgtgcctctgtgggctctgcattttcttccaaggcgcataggagctagctagtgtcaccttcccttcagttcccagcatccagtttccccaaatacctgcttcatctcattgagaatcagtgtgagcaggagttacctttaaagctctctaattaggctccttgggttcaaagctcagctcctccagaagccccagtgaccttgaaaagttacttcattactctaggattcaattttcttacctgtaaaatcaggatgataacaaagagttactgggagaattcaatgggttaatgtgccaagtgtttggaacattacctaattacccactaagcatccattattattaatggaatcctttgggggatttctgcacacctgcaaggtgggacctgacattcaaggtgaagtcatttagattcttgcatctcattgagagtgaggaacctcgtctgtatcacttgagagcttgttcaaaatccagactcctgggttccacttcacagttgctaaatcacacacaggtgattaatgtgtcaataactgactgtactcccggtggtagtagtgaccagtttaagaactactttgttctttgtgggggtcagattttcacaacaggaacattgttaggaagtgttgttaagaccggctctggtacgaacatgcagtcatccaggtgcagattttaattgctgtgcacgacactttttgaactttgttctctctctctctctctttctttttatttttttgtgacagaaagtcaccgaggaactaggatggtaaggtctttttcttacatgtcagggattttaattttattgatctgaaaggatgagctaagtaaaaggtgtgatttaatttgtgcttacctgctgacttaggagagccttatcttgctcttaataggggttggctagttttaatttgaaggcaaatgtctacaataaaacccagatttgacatgaaagatggcggaaaggcaacaaccccctctgaatgcatttcctttttcttagaagctacatctgcatagggagatcgttttatttcctcacgacattctcttctgcagatgataatgtagtctttttgaaaatgctaatctgatttaaaatgtggtatcccattttatggcatttctttcttgcttgcttgctcatctaatagatctaacaagtgttctttcttcctcgggcattggctattctggaagctacttgctgctctctgtactgcactctgccattctgcctgttcttttctcagggacagttatgtgggtaggcacttgggatctctgacatagtttgtgagatagcctactcttgtttgcactttttcaggtcaggggtgaagggacgaagtggcgtgtctgacttaagagattctacatcatagatgggagattgtttttcctccacctacttggccatctcagcaggcaagcacatgtttcatgtggaaggaacagttcagagtaggaagatcaaatgtgtttgtagcctttgagtggatgaagctcattatagtgaacccggggttgtgcatgtaggatttctcgtgaagaatttcagtatctcctctgcactctggatatgggtctgaggctatgtgtgcgtatcacagatttcccccttgtaaattgttcagtgaattgtaaatttatttggaggattttgctgaggattacaggaagtgttagttctcaaatctcccattttggcatattcttgacttctctggttgcctctaaatatacatgctttgcaagatagtaaactgcaggcctggtaagaaatttgggtttgatgtaactccagtagatcgtgagtcttgactggggacgctgggaatgaacaaggatggaatctgcaatcctgccggcagaggatgtggggtcctcatattttccattgactgtagatgccatgactggggttggcatgacctttgttttctggggttcctaggattgcctgtttgttttgtcctttgtatgaggtgagggaagcctggctatgacagtgagtgccatttgtaagtgggagacaacctggaaagtgagttggaatgaacaaattcacagcaacaaaacgactcgaggatgaaagcaaacatatcttgggtgtgatagtttggtctattggtttgtgtcctgttatccccccacccccacccactttcctgctgttgccttcctttcaataggtgcagcacacagtatgaactaaaggaggaagaaaaaatagtgagcacaggcctttcttcctcctcaaagatccagattggaatgagtgacttcttctaacgctgcttatctcttgagagccattactgtccgtgatgtaggtgccacatacctgtttctttcctccctccttaaagggacatctggtttccttcagactttgtactcttatttaaagcaaaagggagtcaaatttgctaagagatcagaactcatgcagaccccttcatcatacctgttggaccattggattgttgctcttcatagttccccactctgggcactcacaggacaccattacccaccacgagagtccagtcccgcagaggacatacacacaatttgtctatcactgaccacaaagacaggaaggagtagacctcaatgcaagataattaatcctcttttactcagggagccagaggataggccttcccttcctcttccagcccaggcttctacccatcatttcatccttctgtctgtctcttcttctcagttttaggctcagcctttttgagtaattcatcattatgtgtgggtttttcttggaattttcagaaaagcaaggtcatttgcctctgcttagatacgacaatggtcttttgaaaaggaccagtatcagacaccaactgtttcctttaactcctctattgtctatggtgagactgtgatatggggaaaggcagcttagaggacaaacttttaatctggaaagcaaagaatagctggactgtatgcccttaagagggaaagaaaacggcaacacacaacttaaaagtcttacctgagatatccccttagcggagaagtaaggacttcatgcctttgcttgccatttgtataatgactgccttctactcagccctgttgctttcaggtacctgacaaataggtagctgattacctttgacttagagatcagggctaagaagaaggcatttatgtccctaagttttggtcactcagactcctcatggtagcttggcattttcatgttgagcccctgatctaagatgcaggcttctgtaaacattttaaatcccaatgagaattcagataggaattggggtggagtgttgcagaggggtccactatggctgccgccaccattgtcattgtcactggcataccacatggcttttaaagcagtctctttaaaaaaaaaagttccagatatatgagagctacacatcatttcccttaccatgttctaagccgacacagagaggacttgtgtgggcttccctgtaatgtctctagcatttaatcaaggacagaaagcatggcataaagtttttaggctcatctgatctagtgttctcttgtgtgtgcagctcatttcaaggaaatgtctgagatgcgtcttcactcgagtattctaaatatgtttctttaatggccatctctggtctcgatccctcccgctcccccataaactcagatgaatcgcatatctctatatctctggaaagcaaagaatagctagaatatgtgcccttaagagggaaagacaagccacaccaaagaaaacagcagcacaaagtcttatctgagttatccccataatagagcagtgactgcttcatgggagttgttctccccctaaacccctcccatagtgttagagactgaacttagacttggaaatatagcgcttggttagatgcaagtctcaggttcctgggatctgtccctgttatgtagcttaagggagaggctcggtgcggcacctgtgccaggcatggtgttttcgttcatgagagtggatctccatctctgtcacagctgtgtcatctcaggagcttgactttatcgccaccattggccctgctttaatggtatctctgatgaatctggaaagtatgttttaggtttgtctgtcagcccttctgcccttcagggaggcgtactatcaggagatgtagcagaaaagtcggtaactggtgagttgtaaaagaagtgccctgggtagctccatgcatggagctttgctggggaaagactatatagtgtcattgtcaagacacatggagttgtgagtggcctcctggaccaggaagctctgggaactgggcggaggattcattagctgaaaggtttttgatagtgtaccactttcccctggtttcagatcattttctcacggggctggtcagagtcgaaaaagcatgaaatgaattttcaacagatactaacatcctggcaatttccagctgtgtgctgttgggaactagtttgccactgttctgtcagctgccatttctttcagtaggtgatttccatcagcatcagggttaatgcctcatttgggtcctttgtgttgaagtcagatgtgtgcactctaccggattcattaaggcctcagcttccaaacttcggcttgcctcagaattacctgcgtggctttattagaatacagctctgtgggtggatttgggctcttggagttcccgactcagtaagtctgaattggggtctcagaattcttatttatcacaagttcccaagtgttcttgccactggtggtcttggaaactacagagacgcagctcccttcatacagtttagctctgtgtgtttgacatatctttagagacagcttcatgagaattgctaatctgccaggcagtggtggctcctgcctttaatccctgcatgtgggagccagaggcaggttgatctctttgaatttgagaagggtctggtctacagaacaagtttcaagatagctagggatacacagagaaaccctgcctcagaaaaacaaaacaaagcaaaacagaccagctaggaagattatccagcctaaatctgcctctgctatactaacctaaatctctgctgttagcagaaacttatttttgggattcagacattttgaggcttccagatcattctaccaaagtaatgatgggatctttggaatgggaatacggactctcagttttaagacattgttaacttagagtgagttcattccttttggcctcatgacagagaacaggctcttataggaatgggctcatgcgttttaattccagcaccccgtacactgctggcacgtgacaagtgctgcatattcttttattgaatgatttgcaattaaatatgttgctattgacttaacaagcgtcaacaaagtgattaagctgtctctagtactgctctggctgggatctgcaggacgggggcactctggtggttgttagtatgagagtactgactgctgggagaaagtcaggggtcattacatgggaatcgggagttaggaaagacaagtatcgcgtcacagtgttctttagaattgccccaatttctatatgacccaccacaggcttccccgctgttaaagaaaatgcagtgtttattttctgaaaaattccagtgaaaactctattaattggcacccagagatctataatgtaatgacaattgaggtttctaatgatggcctctaggcacacagaatactggagtgccttctgaatattgtcaatccagtgtttattgagattatgttcaaacagtctgaataaactatgccccatattttgggctttcacaaactgtaaaccacatccacacataaagagttatctgttgcaactcattaattttgaaattatttatttttattttatgtacattcatgttttgcctacatgtatgtctgtatgaaggtgttggatcctctggaactggagttacagacagtgagcggccatgtgggttctgggaattgaacctagatcctctggaagagcgacagtgctcttaaccgctgagtcatctcttgagccccatgatttattaattttttttttttaattatcagcttgttaaattatcccaagttctcttctttctctggctctagtgggtgacagagagcttgtatttatggctctggaagtcagccctttcagctttagaatccacaggattggagctgagtcctggtgtaattgtgctttagcacgtcagcagggggtggctctaagcatttacaaaggatgggtagctcagtgggctttgcatttgcttggagagctcccagttggcaagctgatattataccccattgcacgattatctctatacaataacattgaacatggctgcctagaattttgaatagaactttgactaggcatctcatccagggctgtcaggtgattcctttttcaagcggactctgagtatctgccatttgtgcccggacccctttccatgttcttccacacgctcacctgccatcttctcaactcaggacaaaggatgatggactctaaagatcttattgtggggtgggaatattctttgttttcttaagggtaagctctacattttgtggaactttaaagtggggaatgacttgaatggctgtctcgatggcctctaggtgactgattggcatactggaactattaggtttcttagtacacggtttttaatgtgggggtggctcccattctcttgaaagaatacacatacaagtttgcactcagtatcggggttccacgagtcaatttaagaataatgattgtgttagaaaattcccacatgtctggatgctgggatactgggtgcttaagaagaatgttccctacctacataccacataccttacatctagtgtgataagaatcctttgtgaacggaccacagagaagtgtttgccagactgtcatgagacacacattctactcagagaacacaaattcattagagatcccttctccatctctagacaggcaaggacaaaatgctctctgttacttaaaacccttaagaacaagaaatcaaaatactctagagcctctgtgtgttttattagtccttttggtttctgctgtataaggaaatgctgatccagtccacatatttacttactatccttgtggttctggataccattatagacaagaactcctttcgatggcggttacgttttgatttgtattacccttaaattttatctgatctcggttaatttagatttaaatatctactcgtggctagtggcaggggcagataagccagaaagctgtttcctctgggggttgatgtttattaactttgtaattgagcttccttggcttcatgtgcagggtgtctcagggctcactgtaaccggcaccgtttccatcccagctcccgttctagccagcccagtgacagcaaaggccaccagcctttacactggctactctgtctgtctagctctaggactgtccttagaggtcattttctcgttgacaccatcgttgattgctcttgaggagaataagaccaaacccttcctctgggttcccactgagccaccttgtgtactatgtctaccccaacacttcttcccatataacgtttgcattggttgaaaatacaagcaagaggaagagccacttttccatgactgctttttaaattcccaggatatagaacaatataagcatatttgtttcagtgaatattcttttgaaatgagaagtagccttagatttctgacttgtggttgtagtcaacgaaacttctgatcttttcacattaggagatgacagaattgtgcctctagctttattcttagtttgatctttagtttgagattggggccctgatttgttttgggtttgttttatctccttgtttatttctgatgttgctatccatcctatggggatcttttcaagtggaaaggaaaactactatctatgtatggccaccaaaacccagcctttcttcatttaaacaaaccaacagccacaagacaagtatcattatcaacatcttaagcaggggaaagctgagggtaaagaaggttaagttatctcttcaagttcaaccccagcaagcttgaatccagggaatgggactccagcagcaactgctgctttggtcacacatccgtcatagtctctgcacaggacctccacccactctatgtcatctgcaggtttgataggcaagtgctcttagagttgagtcaaataattaataagaatatggttagaactggggactcccttactcttctcttcgatgtgttcgtaagtactccttgactgcttggcttttctcaaatcttttgaactgttctcaagccaaccgacgcttctttattttgtctgtaaaagtactgtgggagatctcactgtcatatgcttcactggaatcaatacatgctttcatgactatttcatgtctattttaagctaggatgcagcatcttgccttttccaaagtccactttaggtactgctttcagagtctcagatgatagtttattttttttttttactagatgataaaactcccaggagttgagaggctacgggcatcattgagtctactgcctacactgtagagtgtagggaccaccagtctcttgctcaaagctggagagtacatcaatgttaagggtgtggcttacagcttcaagtctcaattacacctttgctgcttcctagctgtacactttggcaacctgcttaactatggcaaattgtgttggttttttttttgtggcattcaggcaagacggcacataaaaaatacatagcttagtgatggacacaaagtaatccgtgaatgactcttagttgttaatatgtagttaattatggatgattcagtattaaatacctgcagccaagtttcccccttctaactgtattgtctcgctttctcctgacttttagcagatttctaactggagtttttccagatatacttcacgtgacctctgtgtaggcctcttcgcatacctgaaccttggggtctcacacctcagctatgaggaggcagaactcatatcccctgccaggctaacttgcaggactgtttgagggctagcgattagctcctactgaggatgaaagccctctgcaaacacatcagatattagtacaagtgctaccagtgatacagttcataaaagtgcaacatttattaagcacttactgtttgcttagtgctccccatggaaagcacctgttgaaaccattccttgtgagcacatgcagaggtgctctcttacatttgctgcttcccacagtcaggggaaaaggcttggagaggtttactcatttgtttactatgacacaccgagcaagagctggaagcctcattggacttagtgtttttagctgctgcagctgatagtggtacatgaaattttttcttcttgctttcttccaattattgagtttacattaaaaaaataaaatttaaagcatttacatcacaacgggtcctcatttgtatatttttcaaatgacgattttgcaccaatattttctcccaggactcattcagatttatgatgccaaaaatctcaaggggcaataatgggggagaatttttctgcaagtttccgatgaaagcaggtcaggtgttcaaaaccatcaacagccttcaccaaatgcactggattctgttttcacttatataaaattggtagccagagatttttgaatggcccagctggaggcatatggaagggtcactgggaatgacagttctaccttggccacctgacacattctcgggggttaccagccttctagtaaactctttcttgtcagttaggctccttggacttgcaagatttttgtgttctctcagcaaagagagttgggatgagtttctgtgaactgaggacgaagcttctgaaaagattggagagccgtgtggaggtcaggaaaccgagcctttggaagtgtgtcctatgagctctgtgtatcctggagggtattctactggtggaaactgacatgtgtgagcctgtaggattaaggatagaccacttagctcctggagaccagactgaagtctctgaagcagttatggagtgggtagaaaaaaaaaagttagaggaactgtctctctattctgctaactttggattgtatttgcatggaaatgagtgtttgtgaaataacggagccatatggatgcgctgaggtgcatgtgttcttctggtctgttgatagaggagcagttgaagggcgtgggcttatctggaggtggagtggatgggtggatgtggcaacacagggaggggggctggtctgcggaatatgggcctgtgcaagtgcagatgatctggacattttcacaagatggccctcccttatagagggtaatgtgtgcaagcatttacttttgaaattattacccctcttcaagttctgttgcacctctggacaatctgtctggtgacaattagagggtagaaaatgacaccattgaatgcacaagccacgggctcattttcatcacaaatgtcaatgggcaaactcaggtaacaaagcacggaaacagattctaggatgttataattatctagaagtttgcatactctgcctgaaaggagctttgttgagaataatattctcagtaaggtagaccatttctctttttttcttttagctttctttatttctattgtatgattttatcagcattctataaagactatctgccaggatgataagcgctcaggaacagagaaaaactaagctttaacaagtggttattgtttaatggtcactctataacgtgtttttgagactgacttggatttaactcattgttctttacagtcacctggggcaaggtcacagacagctgtggtcttaccagctgtgcttgctggtccctcactatcttggcagaagactgaaaagctagccttctctaatgaaatttcttcttggactagcactgtgaactgcttgtgtgtttttgtggtacccactgggtatgaggctaaacccatagatgagagaaggacgactaactgagtcagagaagagcaaagctctcttaggcactatgaaatgggcctgggacatcttggtttgtgtcactgggatgccagtttgggttgggatcttggatctttgactattcccattttttcctgatccctttggttaaatgaactacattgctttgcccaggagcgttggtttgctgatgccaattttcctttcaccattatgtgaaagtctgtggggttttcatgttttcagtgctccaaaaacctcccttagtcctctctgctccagggtacccgagtgggattgagttgtggaggtggtagcttttatgacctctccttgaacttttgctcattgaatgtctctgcttttggatttttttttttaaactgggacatgaaggctgcagaagagagttatcttgaaagaatgaaggaaaagtttgtagagttttgaggaaaacagtcttatgttcacactcaggccagttctctctattgctacaagtatccagtcaaccccactggtcatgggtttctgatcactgaatatatagaaaatttctatggacatctgacactttaaataggtcctgctatgccaggatttccaatatgaatgctaccaatagttttcttttttcatttgtagcttcacctaaagcaacttcttttattgtaataatggatggtcatttttatctcccctacttgctttcctaataacaacacagaataatagagcattagaattacaagattctaggagaaattctgattggacccttagttatctgtaggaaaacagaaagtcaaaggcctcaagggacttaccacaaggtaataactgactgtgtgttggctagaacatgctgtgaacctcaagactgtatactagaaagacctattgctagttgtggtgtgtctcaggctgagcacacacctttaatccaagagtgctgcagggtatttgatcacactgtgagagtgaatactggaagaaacctgtttctagttgtgatgtggctcagccctaacacatacctttaatcctggagtgttttgtttattgtaaacaagattaaatatagtcaattataagtcaagaggtggagcaagcaaacacccagttagttgacagggagtgaacatagagaaaaggcatagagagtgagaggagcccggaggacagagagagagatgcccagggaggagaaaggaggggcattcagtctggagggttttaaaggcagtatcaggaggggcaggagcttttaccatacttctatgaagtatgtctatgaagtatgacggtcaggtgtgcttcctctgtctctttgggctggtaggctttcacaccagcatttggctcccgagtcttcattgggtaaaactggaaggactgggattttgttttaaaaacaacacctgaccaacagcttttttgatccctttttctcttctttcctttgtgattcctctctgctcagtcctctccagctccttcatcgtccaaggcttccttctttttctgttagtgtgtgggtttggtgctttggggctatctggaagagtgtatataaggatcaagattaataaaaaaaaaaggatttaagtcacaaaaatgcaagtggataagaggaggctaattcatatagatgaggtcgtctggtgcaaatatagtgatgatgaactaaaggattcatgtcattggctaatgctctctttcccccaaaaatgatgttggagaaccatacatgagatgaagcagtaggacaggacccatcagggggcttccactaaacagaaaaccaacactaggttgcagcaggtaggagagtgggtggatgctcaggcaggcagtcctctcagaatagtttctggattttcagtggcctagggaaaggtaaattctccagaccccactttaaaagataataaatgctctttaaggatagttctatgaaagacataagcaaaaattctaagatgaagtccttccttccttccttccttccatccatctttccttcctttttactttatctcttcaagcaaggaagctagggtattgatatttgattattctgatgaaaacttcccaagactttggagggcatgaagatgacaatccagaggagttcttgttcttcttgttctttcagtctttgtatccatgccatagatgaacggtgtgctagatagttagaactctggtgttccctttggctggtccttgtttgcctttggaatctcagtttctgtaattgtcgatgggtctgtctggtttgaggacactactggcccctagtatcgaaatcacgagtttctccttgactgaacatgaggacaagtctgcaggtatctagaaatgctgatgcctctacaatagccaaggcataaagtatctggagatgggatacaacacttttaacttttgaaggtgtctctagtgatttggtagttcagttgagccagagatccacttttctagagagatgggtcttctatctaatccatttacccatcttcctccctctcccttcttcatttatctacccccttcctctctcctaccttattttgtgagatatgtgttttctctgtattccaggctgacctagaactcaagatactcttgcctgagcctcaagggcatggtgggtttcagtgtgtactaccatacccagctgtttctgtttcttatatatgcattttgatcatgggtggattcttctcacttcccttgcaggctgttatgaaagagctggagtccctgggcactctggaattcatcctaagataataaactaattaattctaaggggcattgggttggcaaaaccattcacctacagcttcttcaggcagacttttgtctgatccaagacttcctgatgacaggtctagaaatcttagtctgaggagcagaaccctcaggccttcagttcacccagcaggcccttgagtacccaactgaagacttcttaaccttgattcctcttggttagtaactactaagcctctgaaggttgacttagcataatgcccatcaaatggaggaacccctgaacattcttaacaatcttctaggaacatgggacttacagtaaaccatatgctgagactggcctctccatactcttgagtgtcttttgtgtatgtttcacaatccctgatgtaaattggtagctcaaaactggtcagaaggatgatattgacagtctagcatttgcaagtgctatacatgagggctttctccctgatggtatttattagcattgcatttgatttacctctcaaaaataatctgttttcttatagacagtagcagatctaaattctgtatattctgtattttctcagatctgcccttgggagagagggtatcgtagtctttagaataactttaaaagagatatcagatttatctatttcaaggtggcctttggttgttcgaaagcaactatgttatctctcaagtctttcctttgcaagctgagtattagttgcttcaacacattctcatctggtttctacgctgagtggtgtctttgaacatgggtacagttgcagagttttcaaaacaaaaattctcggagcaaccatctctttaacaaaaactacttcattttcttgcctgatatgttctcagcagcatttgatgcctgctttgtgatgtgtgagtctatgaagtagggaacagcgtggggtgtggctgttcattgtagctcatgtttttcccccttaaagtacaagtcgctgccagaactcttgatggacccaaatttgtcagagtgacatcaaaacactaattctggtttctgaaacaagtaatttccccaatgctgttttgttttttatctgaggcttttagcgtgtacctcttcattcagtcatttgtctcttgatcaccaaaaccacatgtggaatgacaactgtttttagtccaagatccattcagacacataacaaatgaatttcttaggactccttcaggtgatagccactggaatgggcatgagtagcagaacaaggagggcagggcagtcttctttttcagaagtattcttatcactccctggcagttatgtgatacaaatgggtcttgaactgtctgccacttatcatctgtccctctgtctctccaaagtagcaacaatgtgaccttcctttccatgtatttgtgtaggaaacagggtcttggaagtcagacagagttctttgatctagaagccacaagaggtgagacatagtttcacagttgacaagagagtaacactaaggatagtttgagtaactgagttcactgacctgcctagtagtgcatcttgactgacctcgggggcagaaggcctcctgagggcccctcggcctccgtgctgagttctcaccgatgccttccttgccatccattcactaggtttgaggttattaggagcaggggtgatggcattttcattttttgacaggggtagggtgggttgaaagagaggtacatgaatgttcagggttgccagtcagatagggattggaaaagaagcagttgtcatggtgatggtgggttgcatcccaccaccatggaaaccaaacttaaaaaactgatgttaaggctggaagtcacatgatatatcattttgttttgttttgctttgtttctaaaaggaagaggggtttgatttctatccctctctcccaccctctctctcttaagacgagacagggaggtgagaaaaactgctcagaggataacaacgagattgtgaagcaggacagcatggagtacttaggaacttctgtctcatgttcttcttcttctagaacagttttcctgctgttgggaagggatgaggaatgtgcttggagtttcacatttgccatcagagctgtgcactggtaacgcacatagagaagcacagggtgttagttctcctgccccgagagggcccagcctgaactcatctgctcaggacacagaacccaaaagcacgcggcttgaagaaatggggaaatggagctgagcgcacgacttcttccagatgtgaggacggtctgtatgttgattctttatagtatctgatgacatttgcagcttttgtgttgctggaagttagtgccctgctgcgtcaaaccagtctaaaaggtttttatctgatagtcacaaggactgctaataacccaggatggattatacttaggaggcacttgcgacattctagcctctccacagccatcagagttctaattgcttgattagccttgcaaaaggctcagagtaaggcacagtttctttccaggaaactttggttctcacttcctttgagctgttccatcttgctagtctgtccagaggaataagcactcagaggtgttagaaagccatgttgaagttctatccttttatctcccacgtgccccttgtgcccccactcccacagtgatcaggagaggaagtggtaagatttcccccaccccctcccatgaagtcattgggtatagggcttctctaacaggtgtgaatttccctttcagactgaagggcatgtgtagacaggttaggcagtagagagtcctggagggacattgtttgggaaagggtagggatgaaaacacagtctgttgacacaatggccacaatgatggctgtgccagttgtttcggcacaggtccagcctctttgctattattcatcgctgccagacagatgtgtttttctctgtggcctcaggcagagtggatgccatctcacttgcatgagctcactgtgtctccatcagggtctgctggagctggagccggagcgggacctctgtggtggttcaacccctcctgttcttagctctggccctgggtgtgattaatgtcccttctaatcactggaagagattgcatcagagccatcagcttcataaatcctcctctggggactgctgtttggaagagctctccatattcccaggaggtcctgggccaaatgtctttgctttcttcccggaggcccattaccataattttcttttaaaatctttactggggtagatgtctttggtgttagatcatagctgcagccagccagccccctcctggagactgtgaccacagacagatgctctccccaaagtctcaagcagtagcagacacttaagaattgatttagtagggtaataaaagtgacctgcgatctgtttagggccttgtgttcacctgttgttttgggtgctggtccttttgtctttctagtttcttctatggaagtggatggtggtggccttccctttgagcaccgtactggggcaacttttgcaatgaaagccctgactcctgtttctcatttccaagtttcattctctcctccgctgtctatgtccaacacaagatcctgatgttttttccagtcatatagcccttgaagggctgtgtcttactatttattacttgacagtgtctctttggaacagagcttctgacagagtcacacaatagacagactctttcccagctactgcccttgagttaataatcacatattacatttatgtgcagctgaggagtggtaacatatgcaatggcatcaaagtcgttgtctgactacatctcttcaaatcgcatatccctaaacaagaagtctgaagcgggaagaggattcagaccttcttgcaggcagttagttgtcctgggtctgaggctagagatagatagggatggctaatggaggttgagatctatctcctgggagccagtgagcacttggtgagagtctcccgagttctgacaactgccagagtggtcacattcttgttcctacataagtgtcttctccattaggcctggaactcaaagagaacatcgtgttctgtcaacctgcctgtccctggtggccctcagatcatattcatttgctttatgcacggtgataaaggctctgggaagggacagctgagagcagaggggtctcagaacaccccacagatagggctgtatatttctgtaagaccccccccccccacttccatttgcttcctgcagcctaagtcttccccaggcctgtgcctgcagttgtgaaggcgagaggctggctcagatgagagcagttctgcttacaaggcaatgcaaggcgcgcaaccctatcctagggctctgttggcaatcagagccagcaccatagcagcattaggtccaccctctgtcttgccccagctttctctgctaaagaaggaactaaacaaatggcaggtgtgcgggccgagccatgctgctcaaattagctgtgttgctaaggaaacgagtcaactggttgaaggaaggagcattgggtaaaagggataaatcaataagcgaacctatttttatcatttccctaatgattgtcttgaagcagttagacagggaaggggaagggagagccgcagacactctagtcctcattaacggcttggagggagtgagcagtgaaggggtgtttgggaaggttgccaggaaagtttatgaagtgaggcccctagtgagcagacagtgagagagaggggaagctagctcctttgcaggcctgaagctcttttttggtcatgttcttctttgactcggtctaggcctttgttcggcagcatttgatcttccctggatcttgcacaggcttccataaccgtcttctttatattcaggattgtggtggattttggcattggtttgattttctttctccctcgaatacatatagctttaattgattttatgattataagttaatacgtgctcattataacagtcaggcaatggataaaggagtaaagagaaaaatgaaaataaccctattactcagagaaaactcattatccttctagcaaagccgggccccacccccttccctctctcttaacattaaagagaatgtctgtgcatactggctttttttcgtttttgatagataatgtatgcccacagtatgcagtacaaaagttcagatggggatactgtgtagagagaatgtaggatgtctttttataatgataacccagactctggtgtgcctgtgccatctatgtattgattagtcccttattcattaaataccaatcattagatacacactattcccaagcaaagggttggccaccaggagcaggcaaagcctctgccctcagtttcccaggcctttatgtttcattggtcccttcagacaaccacagacccaatggattcacaagaggcagaggcttatgtagcttaaatgaaaaagagctctttcccagttcttcccaggtaggtcctgggtccatggaggtgctgagtgggtttctgagcttgcagcatgcgtgcgtgtgtgtgtgtgtgtgtgtgtgtgtgtgtgtgtgtgtgcacgtgctacatggaagagtcaataaatgtgtcactcaactcagagataccagcccctcctcaacttgtgatggccaataaaacctggtttttgtttgtttgtgtttgttgttgttttaattagggctcttaaccacagtcccatgagggccaatcccaagagagatgctctgaacaaaggactgcctggtgaagcaagtctggagtgtgctgtgtactgcttcccaccccattgtgtgtgcagtcacacactgtgtacagtagcattaaaggctccaagcagacctgctgggaaggcacctacttaactttacttaacccaggcttccctcatttatttgattgcaactttctgtagcactagtattttgtgacctacattgtagaggcagcaccccagatgccctcagcatctgcagccattcatcaacgctgctttggcacactgtcagtttcctttctagaccaagttcccaggcaaggtcagaaattcctcagccaccacttttgcctgattctctctgtcaacagattcatcttggaatcccaggcatcggcaccaagcccagcagagtttagcctgctccagagtcttgtggaatgctgggccctgggttagccttttgccactttatgtgaaaagctctagattagagccagctatatgagagaggcatactccttctgatccttgtgttctggtggccttgtcagggtgtgagttgggtggggacttgtcctaagacaggggatgtgcgtgccagtgtagatcccagaggttgcccttagcttccagagtttgaagcagaaagcataagagtccttatgggctcccatgcagtggcttcccttccgctgtgaggacttcaggaagcataatagaatctggggcagaagtccatttggaagtccaatgaggctcatccattttctagatcaggtggctgagcatgaggaagcagagaatttctgggttggggatgctgtgtgtgaactggagatgtgtgggaaggaaggactgccagctgtgggagaatgcctgtgactcagggatccgtggaaatggtggtggtggggatgagatggtactaccaaatgctgtggactagaaaagtcacctcctcctgtgctggcccaagaccagagcaactggagggctactgatgtctctgtgcacacttggccactgcttgccactctccagagatccctagatactcatttgatgccattaacacagggttacagtggaaatgggaagaggggctttggggtacgttggggtgattgctgttctgtacaaaagaggtctttaggccctgtgtcctacactggcaaccccgctctgctctatgggggtgacaggagaatggtctctgtccttccctctttgtgaaatacactacctttctcccctgaccctgagttgtggaatttgccagagaataggttgaactgcaagactagtgacacatctggctcgtgtttgtcataacagtaattacagaatgaaatcccagtctgcaggatgactgggccctgggagggagttggtgtttctcttttctagccatggccccacctccccttgagcttgcagcaaagccttgcttcaggagtcagggagcctgctttgaatcataatttttttgtttttgtttttcttcaaaaaggtagagaattcctcactggtctttataaaaacagccggggaaagcttatatatttactcactggattcacagtttggtttctagagcctggactttgccatgggagattccaacccatgctatgcttttctgttacctataaatgcaggatcttaggagagaataagaagggaccattctttcttttggtttcaggatgtgtgttctgtgtcagatattacagcagaagggagctcacatggggtaggggaatggtttcctttccagggattctggattcttctttccctcagttgatcagaggttctggagagaagggtaacactagatgcaattctgaaagggtagcagatagccacagcttggtctttattgaggccaaagctggttcttctgcccaggcacctgaagcatgggaagaacaggattcttgcttttttcttcttcatcaatttgaagccctgtttcattcctggatttatgttttatttcactcagtgattggattatctgacatatacctaactctaatatttcctgcctccctccttttcttaaagaaaacgcttcattttcacggagcagtcctaaatgataatgcctcttatgcaaagggtcatatgctatcctgcctgcctgcttgctagtgcaaatcattcatactgcaaggatcagcagaaggagtttgtatatgtatgttcacagccatattagaggctggatccccccttacatgaacttggtccttaacacctctgtttcacgccatttgagtacatgatcctggccaccatcattgccaactgcatcgtcttggccctggagcagcatcttcctgaggatgacaagaccccaatgtctcgaagactggtatgtgtctgctttctctgccctttctcctctgggttcctttgactccctccccccacttcctctctcatacagctctgtgaaatctctactctttgctgagggacaagttagcaataaaccctgctgggactcaggaggaagagggcattgcaaatatggggtatatgcatcacatgacagtcaggcaagaagaaagggcaggcatgtgggacatttgcttcactcctctttcccaagggactgttggagtgagaaggaacatggagggaggatggtgaaagccgagtgtgttggtgcttatgaacttgctaaatgccgactgacatccttattctcctaaaggaatgagtcacatgtctaatgtattcctctagaagagaggacacaaattattttaaatctagacacatgggcgagtggccacacaaatgatccaagcatgagaactatgaagtttctagctagagtatagacccaagaatggagaaataaactccttctgggcaatgctatgccatcagggacttccaggagaaaaattctaatctccaggtgggacacatctgtccatttctacaacccttttccatactctgtgtattccatgcagtttcaggtcctcttggtgcttcagtaacctaagctgtacccatataaaaggctagtcatcatgggtgtacaggagagggtcaaggtgtgccttggcctgtgtctgacaaagaataattattctattgttgctctgttcttcatccttgcaggagaagacagaaccatatttcattgggatcttctgctttgaagctgggatcaaaattgtggctctagggttcatcttccataagggttcatacctccgtaatggctggaatgtcatggacttcatcgtggtccttagtgggtgagtcttgcttcttgcttccttccttcttgctgtgtgtgtgtgtgtgtgtgtgtgtgtgtgtgtgtgtgtgtgtgtgtgtatgtgtatgtgtgtgtgtgtgtgtgtgtgtgtgtgtgtgtgtgtgtgtgtgtgtgtgtgttgggaggctcatggtgacatgaggtagctggtacaaggaacacacagaggacagagatcagaatgtacagtagaaaccaaagaaaaagatcaaggctgagagtctccatagagctagaccataaagaaaccattcttggaagagttgggtgtatgttgcattagatagagtcatggactctcaggggtgcctggtgtcccattgtatacttgcttgattgctcaacacctagttttccaggaaggagccttttaactgaagcaatcagcttgtgctggtctagggaaggggtcatcccaagagatcagtcaaaagatgcttgggtgtactttctttgggagtttggagaagattccaactatgtttttctgaactaaaagttaagagaacagaattaatgatttgtagatttattaatggcataaaattgaatcacatgaaaatatttgataagacattccttagaacttattatagtatatattggaactgccctgatgttataggcacatataggatggcgattcatttaggtgaatatttgcaacatcattcctttggatatgatgatgagtggatgtatgaggatgatgagtagatccatcatctgttggcagcagatgtgatgggctttggcactgggagtgataagaatactgtccaggatttctatggcttgtgagtctttgaatccattgtctttcagggcttgctggggagaatagtaaacttgcataggtgaggattaagtgcttggcatagatatttccatccttaggtgcccaactctctggtgaggacaagcaaagacatgggacactgaagagagggattatgtagccaccactgtgactgacaaaacacgaggaaaaagaaaatgtgtagggagtttcaagactgagaagctgagcttggaaacatgaatctacccactgtcttctaacacagacacagtgctcacatttttagcttttaggccaattgtaattgagtgaaagagacgtagttaaaggtatagttgattagaatacagcttacaagcagccagcctcagtatgggtagtggataaacagggctgaatgttcatgtttagaaagtatccagtgccttacaaaaggattttctgtagaccattttccaaaaaaaaaaaaaaaggttctaatgcaacattttaaatattacttagtatataaagtatcacagaagtatattttcacagaaaatgtagcaactggaataatgttttaaatgtctctaaaatcagtaaaatatactgtattggaaaagtcctaagtgagaactgagtcatgttattttattccatttgaaatcatattagtgtttgttctgttttttcataatacttttactgattatttgtgaatttcacatcgtgtgccctgatcacacttacttctcagtcctcctctgtctagatccctacccttatggcctcccctaaccccacccccaaaagaagagaagaataaaacaacaacaacaaaaacaacaacaaaacaagtccaatttgtgttgctcaaatgcttgctggagcatggtcagactcccagtggccagtcctttaaagaaaacagggtccttccccacctgtacccccaccaaaagtcttcagttcttcaaagtggagagctgcacttcagcattttttatcacatttttaaagagttctctttgatggctttccgtctaggctgttacttttggaggggctagggtttgtcacagaagccttctatgtccctctttctcaattgttcatcttcagtcaccgaaaccactgcaaaaaagtagtttccttgccctttatagtcagcaggagtgtggatcatggacttttcacatggtttctaagggtagcatgttggggtgtgtgtgtgtgtgtgtgtgtgtgtgtgtgtgtatgtcattggtcctgctcaatgttatatgcactgaaaacatttgaagtttctgttctaagccactcattttattttaaactgtcatatattgatttttaaaaatacagaaaaaaaaccagaagagaaaaatccttgctgactgattaaaagcaatttctgactttaagagcaatttctggcttttatggcatctctttccatccctttaaagcgaagggagctttcttttggatgtctgtaattttgctgcctttctcaatatatgatgagcatatcacacatcattctgtactctactgaaattttgtggtgactgatgaacactttattaagtggatacacacagcttgttgcttgtttctgcttgttattcgacacttagattgctttcttgtttttgctatgataaataattattaaagatgctctaacatacatcttttagatgccacactttactagacagtttgacaggctgaagtgcagtcagttctctgtatctttggcttctgagcagacccagtcaagcgtggataggaaatatttggggaaaaatatatctgtagtgagcctgaaaagacttctcattcttatctctaggccctaagcagtatagaataactaatatttacatagtgtttgtcctgcatagtcttgtaggtaatgtagagatgattcaaagcatccagaagggaggatgtgcatacaatttatgctagtaacatgacatgttatataacatatgtgagcatgtgtaaccttcggcatccacagtctcagacccagtctccttcaggtattataagacagttgtactttgcagggggaatctggtggttctggtgtgggaagtggggactctgatgtgtatggggaggtggaagaccctttccatctgaccagacaagggaagatcaatgtgaactttgataagggctgtcaacaccattgaaggagcagatttacgggaaccagccaggcccttttgctgctgtagctaagaagatgcctattcctcacctacatttccagggagttctagcacttggccaagtcaactgttctgtgtgtgctgtctcaccagttttcttggtggtttctcagacacggatggctctctgggtaactttgactatgggtacttcctagttgaacaaacaagactttaagtcttgatcccatctcacctccagctcaacatgcaggagctcttctcagctcacacatagatgttttccaggtaacagttcactgtgctcttgattgttgagggctgaggttccgacccactgtaatggaatgggtaattgaactgtctgtatttgtacactcacctaccaccttgcttttctgctaagaggcataccatctttggagtctgcccatgtctcagaatacgagcatggcagtattgatggtgttctctttttctcagtggtgcattaaactagggacatttttacaattatggcatctcaacttcagttcacatgttgcagtaccaactagtgaggtgggcagaacagactgcagagatgggttattcagtacccaggatgttatatcattttcttactgtctcttgctttctggtggaagattctggggtttagagaatgctctctgatgcagggcttctatttttaaagcccactccatgtatcccctctcctggccacacaatcttcctttttttttctccttcttgacacctgcatccagagttattcctgctgacagcacttccttcccaccttgtcttcaggtgtcacctcacattctcctcctgtgcacagggggattgacagtgttggagcatgacacgatacttcagggttgaggctgcataacatcttagttctcggttctggtggtgggtggggggcgggagggtcgggggcaggagggtgggtgctgtagaatcatacagctggctcagcacgagacctgtcatcattagcctgctgctaagaaacaagtatttttggggggggggactggaatccctacattctgcctgccacccctaaccttccgtagtatttttagtatccttagacatgtaagttgaagatgtgtatggtttaagtcagtcatttaatatattcacctataaacccataaaagggctgtccgagtccattttctactgctacagaatatcagacactgcgtgtttttaatttttttttaaacagaaaagatttatatcttacaattctggtatctgaaaagtcttaagagatgattctgccatctgatgaagcccttcttgctgtgtcctcacagagccaatgacatcataagctgaagaagagaaagaaactaaccaagctcacccttttagtaggagtctgctcctgtcataagtaaccaattctggtgatggcatatagtctatgccatagggagttgtctgcatgaccaaatcaccttagaaaggcaccagtcttgctacatcacagaaccgcttaaatttcaactggggcattttcagggagactttggattacagtaaggatcttgtcctcattttccagacaacaaaattgaggctcatagagggcatgtgtctaaacagcagacactatctaggacagtggttctcaacctgtgggttgtgaccccttgagggtggtcaatgaccctgtcacagggctagctaagaccatcagaaaacatatatttatatcacaattcataacagtaatagaattacagttatggagtagcaattaaataattctatggctggggcggggtcaccacaatgtgatgaattgtattaaagggttgcagcattaggaaagctgagaaccactgatctaagaacttaagcccatgtcttcagcctctaagcccgttctgcaacattcttccttccttagtcacctctgctaactcaaggctctgtattcatagatctccataattcatattcctttggccccctagaaacagtggatggagcatggcagggctgcagatcatcatacaagtgtttccaactcaaagcgggagctgcaactggagtttgaagagggcaagctctcctgtggctttctgaggcttcagtctgtgagcttgcaatacagcgccttgctctatggcaaaggaagtcagctcttgatgtaataatgctgtttggtgcctgacaagtagatcaaaagatccagctgacttctttgtgaattggcttgtttagacactcattcattcatccatttgcttattcaacaagacaaatcttgttgaccgagaaataccaaatcagtttaattctcatctctgctgaaacaaacttttgtctgctacgacgtgggatcgctcttgaattggtaataattctggagctttatgtttaaactcttgttaggccacctggaatattctatattacttaaaatactattatatattaatcttaacaggaagttattacctaaacatatagagaatgataggagatgataaaaacttaggcatctctaaaccattttaagagcaaggaactgggagacatctgggctttatgacttttgttcatctctgtatgcccagagtctggtatatagttactgcttgcaaattttgacatattacttgttccactaccaaagtcttacaccttctacaggatgcaagaagagtggtgagcgaggcctaggcctggagcagtgagagactgtccttacaccttccctttggtctcactgggatttgtgtctacaactccatctgcctagcttattttgttagggaaatgaagctgagggtttgtactccaggctaataagaaatactgggcactctgttctatctccttgggaagtgatcaaagcctctagaggaagctgggttgaatgcagggagaagccagcactcatttgtcctataacactggcatgtagctaaacctgggctaaagcccacattctaaaggtgatacttctaatacggaaaagtagcaccttagataagaagtattaggtttaattattttccccatgctatttcagggatgaataatctaaggcacagaaaattttaataatgtgcttctatccaagtgaatgctctcctatacacacattttaacatcctactatttcaattacctgtggtcaaccacagcctggtggacacttcctaagtattgaatgacattcccttctgagtagcatggtaagatctctgaccattccttactatcctgtcagagacatgaaccatctcattgtccagggtgtccacaatgcatgtatatacctgcccctctgatgtcaggttttcctttcaaggtattgcaaaacctgtgctccagtgttccttactttatttcataatggccccagttgtgaatgttgtcatgttggcaatttttctacagtgtgtttttgtaacttgtattataattgttagttagtcctattaatctcttactgtgtctaaactataaagtaaatgttatcataggcaagtaggtatggaatgtagaaaaagtcatgatgtgcagaattgtatactagctgtagttcttcatgctttctggaggtcctggaccagacctcctgtaggtaaagaaggtagttctatatgataagcagagtttgaactcagtctgtctgcctttagtgtctgggtttcttttctgggccattgtatcttctgaacttagagatgctattagcatcttagggatgctcttcagccactgaagacattcaagcttctctatttcctctgcacatcttttggttcaggcccagtggtgagctgtacgttgttcctattacacttgaggaatctttattttcagtcctgatgatattacagagctagtctcaagtatgatcccatttgtactggctagttttgtgtcaacttgacacagctggagttatcacagaaaaaggagcttcagttgaggaaatgcctccatgagatccaactgtaaggcattttctcaattagtgatcaagggagaaaggccccttgtgggttgtgccatctctgggctggtagtcttggttctataagagagcaggctgagcaagccaggggaaggaagccagtaaggaacatccctccatggcctctgcaccagctcctgcttcctgacctgcttgagttccagtcctgacttcctttggtgatgaacagcagtgtggaagtgtaagctgtataaaccctttcctccccaacttgcttcttggtcatgatgtttgtgcaggaatagaaaccctcactaagacaccattaaaaacatcagctaggtcagcacacactttggtgtcatgatgatcaactggacagtggagctatgacctgtttgagtggatgtgtagtacaagtactgtagtattcatggctgtctctaaacctttagcctctgctaaggtttttgccaccagactcagacaggcacttaagagctattgaaaagactttggcgccttgctaggtgtgggtaggataggtcacatgtttctcaccaggacaatgagtctacatgtcatgaacactcagaagaagggcttcagacttgtctcttgggggagcttatttaaagagatagcacttaaatagcactgagctgcacaaaggggtagacatacaaatgcttgggggtgaggaattgaggagagagacagagggcattcctaagaacccagtagtgagagacagttctgtagaggtcaacaggagccaacctaatccatgcaagagcatttatatcaagcagcggagccctgaagacttgaagctgggggggtggaatcctacttctaactctgttctggacactgcacatgttttttttttttaattaaccaatctgatttatgtatcaataatatcacaatttacaagatgccaatacaatcatttcagagccaattgataatgataaaagctttatcccaatatttctaatcttatgaagtcatgactacttggggctggaaaacaccactctggtacaggtcagcagccatcttgcttcccctttttttttttccattttttnnnnnnnnnnnnnnnnnnnnaatggcctttctctacacaaagaataaacaggctgagaaagaaattagggaaacaacacccttctcaatagtcacaaataatataaaatatctcggcgtgactctaactaaggaagtaaaagatctgtatgataaaaacttcaagtctctgaagaaagaaattaaagacgatctcagaagatggaaagatctcccatgctcatggattggcaggatcaacattgtaaaaatggctatcttgccaaaagcaatctacagattcaatgcaatccccatcaaaattccaactcaattcttcaacgaattagaaggagcaatttgcaaattcatctggaataacaaaaaacctaggatagcaaaaactcttctcaaggataaaataacctctggtggaatcaccatgcctgacctaaagctttactacagggcaattgtgataaaaactgcatggtactggtatagagaaagacaagtagaccaatggaatagaattgaagacccagaaatgaacccacacacctatggtcacttgatcttcgacaagggagccaaaaccatccagtggaagaaagacagcattttcaacaattggtgctggcacaactggttgttatcatgtagaagaatgcgaatcgatccatacttatctccttgtactaaggtcaaatctaagtggatcaaggaacttcacataaaaccagagacactgaaacttatagaggagaaagtggggaaaagccttgaagatatgggtacaggggaataattcctgaacagaacagcaatggcttgctctgtaagatcgagaattgacaaatgggacctaatgaaactccaaagtttctgcaaggcaaaagacaccgtcaataagacaaaaagaccaccaacagattgggaaaggatctttacctatcctaaatcagataggggactaatatccaacatatgcacatgttttttaagaattctttttaccctgggatcacctctgaggaaagacatggcaaagagaagtgaatgctttctgtgtcttcagctccagcttgcagggaatgagtatataacctatnnnnnnnnnnnnnnnnnnnnnnnnnnnnnnnnnnnnnnnnnnnnnnnnnnnnnnnnnnnnnnnnnnnnnnnnnnnnnnnnnnnnnnnnnnnnnnnnnnnnnnnnnnnnnnnnnnnnnnnnnnnnnnnnnnnnnnnnnnnnnnagagagagagagagagagagagagagagagagagaagacaaaggaaatcgtgggcaggggaatgcggcagaggagcggggaccagccatcctgcagcctcagctaccagccagaggcatacacagagtggtttagcccaaagcctgtttgtaggaggatgatatctggagctaaatatacatcgataggtatttttagagggtttctgtaagaaggctgccctaacatgtgtttccctagcagctaaagatcgaggaaagcaccgttttcctctgggagccctgtctttctggtgctgaaaatgtgggggaggtgttgcttatgcagccccaggggcccccagcccgattcaaatccccgcagtaatagcgtgatagccctgggtatttatatagcaaatcatgtcagggagcctcctgggatcttagcgactcgtcttttacgcacccttttagttgtgggtgggccaaagccagaagtgggagaaagaaaggctgggtagagggaggaggcagggagcttataattttgtagatgggaatctgacactgagagaggagacatgaggggttttgcgtttcccagcttcggtgaaacaggagcttaggaacctggtgtccttagtactgctggtggggaggtctgtgagttcttggcctccactgcttttgaaattcttccctggagcagagctgggagctgcttctatggcaggtctcctcctcttccctggcactatgttcagtgctccacactgggggaacactacagttactggcccatgcagcagctacttttatcagaacagtattttgttccagttgtatgatgggagagatatggttcagatgcagatttttgcttgttattctttatttttagaatgaagaggttcattcaggggaagaggtaggctacatattaaacttaaaggtcttttctgaattctgtacattcagggaggctccaaatgagaatgccagttagaacttaacagactatacataggttcagtaggcaaatttttctcatgcataactgtctttttttttttttctgatgagatacatcactagtccactgaacagatatttactgagcaccatctgtattccatgtgcaaagttttggtgttaaatttcttttctcaaaaggctttttcttgtccccattggtggaagtgtagtcaagaatttagcttatggtgtcagccaagaagaggctaaagcagaggaggtaggggacgcttggtgatactgaggacatttggtctggggcttttcttcttggatttatgttgatgaagggtgatttggagacagaaacagtgtccaatgcattctctgaagaccactcccagccctgtgccattcacttcctgggcatgaatatgtgagtgatggagtgaggggcagtgaaagtagagatgtgctggcatagtagagggtataaggtatgacctcattctatagactccgaatacagagtaaacattagagggggtgttcgtgtttccactctgtggataaaatacgtctcctcccttaagtagacattgtaactcctgtctgtgttgtaaatatagtccacagttaagtataaatgcatcagcgtgaaatgttaggacacgaggcactgtttaatgtcagtgaagtcaggcagtattgcatgtgctggttatggagcagcttcgaaagggaagggtgagttgagacagcctagatttcagaagacaaaaagtgggtgggctggtgtaatggagagtcaataaaagcaagggaaggccaagttactcagccacagtcactgcactttatatccgggagaatgttaaatttgtccaactttttcacggaagagaaaactgatgtacaactggctaagtgctttgtctaggctcttcaaagtagaatgtatgagccagggtgtggagggtagtttgttcagtacaaaccaagagctttgagcattgtaagtcaaaggattataactaagaatattcaaaaggccgtgtttcagaatagccaacccctcttgcttatacttgtaactgaagagaacagtttcactgaaactattgcaaattctgataccatggctgttaaaagtttcttttattatcattttgtgccaagacaaaattgaacaataggttagctctcatttctttttagtagtatatctaattttatcaacactgggaaagtcctccatagctattattagcatgaacaacaaagaaattccaagagtaaaagttgaaatggaggcttccatttttaattttattaacaatgaggattttgcctcctctagagccccatttttccagtcttcctattcctttgtcttctggctcccttccccccacttctcatcaagcccttacaggtcagaggggccccacagaggaaggagaagacaagcctgctttgtccagtcagcccttgcagagaaaggagctaagttcctatttcctccttgtctttctttcaattcctaccttcacgactgccactctcctgtcagctgcctgagccttggtgacaggatagctagggaaggggttcaaggccatggcttttctccatctgtgcagatctgggacagtgactctgagccagaatgacaggtgcgacgacttcacacttcagttcccatcagccatgccttcgcagtaatttacatcacttcggcagggacatcccgcaccatgaccctccagagctcagccagacctttgtagtcattcctaacctcatagccacttgactggacatggagagctgcagctaaaactgtcatggcttggggtgactttgctgttgagtgagaggagacaaccagaatgatgtccctctgtgacctcacctactgaggcttaagcctaatcgacacccatttttagacttttgaacaagaagagaaaggtgactttcaagagtttggaggggaggtgaccaatcccatactcaaacagagaggggactgctagagattcaggactggacagagatagtttttattgtctttgagtttgctgtctagaggagaaaagagatggacttttaaactgaagcacagaggtatactgagtaagcagagagaagtgttagagctctgggaccctggaccaaaactgaaggaaggaggatcaaggaaatgatgatggtcttgagactgagacagtggaaggggaaggaggggaagcgtgaggagagctttaggcagaggggagggcacctatgcaggactggacacagggcacaccaagcaccactgggaaagaataagattgctagggtacttgtggtgacagtgacctagaggaagaaaggaatgttttatgggaagccaccaaggggctctaactaggatggtgaacagagcatcaggcaggggtgctattctctgggaagagattaatatcacattgaatgattccatgtctactcagaataggaacttggaactaagtcccaaagaatgcctttcctcccccttgtctcctccttccaactttggccctcaactataattttgtttcactaactgaagttgtaccaaaacccatcctagagcatacaatctagcctattgcattctgaagacttgttaacctgcccagagtggagatttagttcctgccctcttaagatcatgctttgagcatctcctactgattcaaataatgggtaagaattgatgaatgtgtgggcttttattttcggcattcaacagcgaaattattttaaaaatgctttgctgagaacattgctatatgatgattatgattttttattttccaaatagaacaatagtcaaaagatcaagccagcccacatgcttgtttacgggatgtttctcttctctctgctccttccccatgacacatcatgatgctgaatctggatcctaattgaactcttgttaataaccacgataaatataacatgttgtgatctaggggttctttgtggggaactcagagtgctttgtaatttacctcctccccactttccattagagaattggagacagaacctacccattccctttctaagtatgatgttattatatagcagacctcccagttgtgtccttctagtcgactgtgaggatagacacaggaacagttaaattctcactctgtttttttctgctgaccacttatatttcatagcctctttttttccaggagtatattcaactggcttgctctctctctctctctctctctctctctctctctctctctctctctctctctctctctctctattgaattaacttggatatttgagtccttcagtaagttaagtatctcaaatagaagaaattcggacaaggttcttcctcatacagagactctgatcagaccagggtttaaccactaaggtttaaccaggtggttctagaaataaaagagggaggggcttctgtggtttcagcttccccaagcaattaccaggctgaaaccacacagaagccaaacagtaacacatttccctgggatacaaattttacaaccatcgtcatgtaaacttaaagcagaattggatctcagggttcaccagtcattccagtagtgttcaacatgggggccccgggactctgggaactcctggaattattgtaatggatgagcaaatctgtggtcccatctagaactggctgttctcagatgttttctacatgtaggtatcatagtatagtttttatagagtgtgtgcatggtgttgtgatttatagatacagatacatttaaatgtattgttattgaatagtggctttttcttctctttggtgagtcagcaaagcatagtgattaacaactgggtaacaatgggtaagtaaatccatgttcatacactatgctgtttgctacctgtttgactgtgggcatccagcctattttctgtatggctaggtgtccttacccatactaaacagagttgggtgaatagggattatgagtcattgatatcagttctctagggaatggagtgggacttgaacttgttgaaattacaaagaggttctttcacttgtaagataagaattgctaaaccattgtaattaagtgtgctgctcaacattggctgtcaataagatctgtatttattgaggaggcatacgcttacctgtgagaaattatcttgataacattaattgaagtagaaagacccaacataaatgtggacagcactctttcttggacttgggtcctagactgcataacaaggacaaagggagctaagcatgggcagttatcgtctatctggttcctgtctgtggatacagtgtgactagctgcttcaagctcctgccactgtgacttggccaccatgatagactagaccctcctcaaactacaagccaaagcaaacccttccttaagtttcttttgtttagggtaattttaacacagagatagaaaactaatgaagggaccaactcactgttacagaaaaagggcataaacagcactctcaattatgtttagttggaaggtcacttgcccacagctgaaggtggatgctagtgttcagtcttgtgtagatgtgggtgggagaagtggaagttggacatagctcttacactcttgaatagagcaatttgactagagcagagtgtatggctgggatagtcacatctgaagccaggcctgaacccagttttatgtggggcagtctaatctttaagaatgagaagaaggaaagaatgtcagttgaactgtaacacccagataactgcctgaagtcacatcttttataatcagcctgcatatcaatttctttcactattggctagaaatgggtccttggatagttttgttttattggccccttgcctatctttcttcttttcatatagttttagtgccataaaagaatatatctttttttgaagacttcagtttgaacataaatgttgaattggttactatttgagagaagagagcaatgtgagaggtgtttttttttttttttttgagatgcatttctgtttcctgaaactcaccaatgcaaatttatagattcgttacaagctgagagacttcacaggggaatataaaccaggcaagaaggtgtaatccagtctgtgaagttctcactgtccctggctcttattgcaggagtgtggtggaatgggggaggggtggaatagaaagctggtgttcttttaccagatttctttatttttcttttattgtgtgataatatgaaacatgcgtataatgtgttttgattaaatttacctcccattctgttccctcagatttcttccctatttccctgatacttctgctctcaatctcctgagctcttcttcaccctcccgagtctacttggtgccacctctatgtccatcggtttagggccatcgagtcaaacatgagtagcttctcaaggactgtatccctgaaccagctttcttagtaacactgcttttctgtccttcccatccgtcttccctctttctgtccatctaacaaattgtcatgtattaagtgcctactgaatgccaggcattatcatggaccctgcctacttgaaacttactgttaatccaggtcatagagacatttagaagacatgggattgcctggtctgcacttggtagtaaatgaaaatagtgatctcatagctctctcagcaacactagattaccttgatggtatagcccattcacaagactaaagactttgatgttgacagatctagcttgaacttcagctttgatactgagatgtctttttggccaagttgcttaacttacttgaatctatgatgttaaacacataaatatttttttcttgtaggagtcatgttctaggttgagcagggttaaacgttctaaaaataacctctcaaattttataggttagcataataggtttatctcttgctccttaaacagacaaatatgttaatagttcacttttttcccctctatttactgatttagagaccaaggccctaacctaggattctaccatctgccaggtctcatgatatttatgtggagtcagaaagagaatatgaattgtttcatatataagtggtgtacataatttctcttagcatcctattgacaagaattacaggtttatcgaaacaaaacaagaagatcctgtcctaattgggtagctacctctaggcaacaatactgcactgttgaaaggagaaaaggggaatacctgtttaggatccttttcaaaagacaagtgataactgttccattgtctgcatgcgggttagataaaatgcatgtgctgtcagacatatatgagatatataacaattttctattgattattagtaacactattaaataaatactgtacatgcatataactcagttgttaagaactgaggctaaaatggtaatgagatgcatgacttcaaagagctctcacatggctgtagtgtatgtttgtgtttgtaaatttttttttacctttggtatgggcgtttattttattttattttattttattaagtattttatttatttatactccagccattcccctttctgcccctccccacagttcctcaccccattcttcctctcccttgcctttgagagggtgctccccctctacccccgtaccccaagagtgtcccccttccctggaattctttctaggattaggtgcatcttctcccacagaggccagaccaggcagtcctctgctatacatgtgccaggggcctcagtccagacctggttgatggctcagtctctgggatctatcaggggtctgggttagttgagactgatggtcttcctgaggggtcaccttccccttcagctccttcaatcctttccctaattcctccctaggagtccttgatttcagtccagtggttgtgtgtaagtatatgtttctgtcttagtcagcttcttgttgggcctctcaaagggcagacatgcagggcttttgtctgtaaagacatcatagtaatagtgtcaggtcttggtgcacccctcaaccgggagatagatcccaagttggaccagtcactgaacagcctttcctttagtttcttctccatttttgtccctgcagttcttttagatgtgaacaattctgggtcatgtttgtaaatatttaaatgtataattataatgtgaggctattacattaattctgaagaaaaggccagggaaataaattttgttgcatttgggtctcactacaaacctttcgttgaatgcttgctgtatacatggcccagtaatatgcagcaagaacaataacagagttcagataggaggcggtacagatatgggaatttggtttccttctcctcaaaggcattaactattgatacttggtaggtacaagtgtaagaagccatcaaatcattttattccctcttagtgagacttgcaatggtaagaatgagaaccagtttgtcttgttttatgtttattctccctcccctccgggatcacagagaccagcagtagttagccaactgaggttggtgatgactttctaagttggcctagataaccctgctggttaagacctgtcagactctgaaccagctgacccacttattcatgtcttttctattgttagtttgtaccaagacgtgttaacgtttagttatggggtgagtgtagctacaataaatagagtagatacagaagcaaataaaggttaccataggtctttggagaaagaattattgtggcaatagccctaaaataggcctttggggtgtcaatttcaattatggctttccattgtgggcagtcttctatatagggtcttataactggaccagtaagagctgctcctatcaaaacagtttaaattaattaaccaactagttaattaatgtgaatgcatacactaacatgcatacaatacatgcctctttttttaagtgattattttatgccagttgtggtggtacatacttttaaactcagaactcaagaggcagaagcagacaggtctctgtgagttggaggctagctggtctacaaagcaagttctaggacatccgagggccattacacagagaatccctgtcttcagggaaaaagttgttattattattattattattattattattattattattattttgtgaattggtattttacttgcatgtatgtctatgtactacttttgtgcccagtgcccatggaagttagaagaagacattagaatatcccctagaactggagttggtgagctgccagagaattgaacccaaatcttctagaagagcagccagcactaatccatcttttgaaccccacaaatgcatgtcatagcaggtgtttggcagttaggggacaacttgcaagacttagctatctcttttgcaatgtgggtcctggacaccaaactcaagtactcagacttggtggtagttaccttcacctgtcaagccatctcattgacttcctgttactttttaattgcttttgtgttgagttttccttgtttggaagaatttaacacaataatgttttcttataattaatggtttatattcttcattttgtatgtttgctacttattaggccatacatcttactttatgttaatttttctcaattgatcagagtgttttaaattgatatttcatacttatcaatcagtttattaaattctcaatggagactcctttataacctacaggcatggatacacagagaacactatgtttagtattagatttattgatgtttctcatttatacagagttaataataacagtcaaatacactcaattctaattagaaataaaataatttgttgcagtcaaaaacctacccaaacaaaaatgaataaaatcttggtagtgatcttcgttggtggtataaccactgggctagttgagttcctgagtcttaattttaggagagatactaacctacaaaaggctaagatttgatggacggacatacttgaaatcatctggttccttcattgttgctggtaccacgccctgtcaatctttctcttcttctattattcaccaaaagtcactagaatgctttgtggtgttatctgtattctgatcccagtgttacagagtagggaacccattaaaacttgacggtgctcctgaaagcagctgtcctggagggaaagagacggaacgaaagagatggaacgaataagaaataagagtgttaagaaactttgtagctcttgaagttagacacagggtctaggtatgtgcccttatatgggttatcttttatcagaccatatctccatctatgtttcatgtgtgtccttcatatatcttgtcctgaggagagtcttgaatgcaaacagcatggcagagatgtttccccacagagtttgctctttatcagtgattttgttggaaggatttgcaagcttattccttactttgaaaagagcatcgcttgcttctccaaattgccccaggcctaggttctacttcctttctataagctgctctggggaccttcccctttcttcctgcttcattaacatccctaacctctgaccctgacccattggtctattctttgtggggaggtccagtcctgggatccccagctcttcagcctggcagacaaagcctggtcttagattgatgtttgaaactgaatttaccttaggaaagtcaagagacttaaaccttgttttactaataattctaacctgctgtttgtaggcagactcacgtctctataggcaaaatgggaatttgtttgtgttcatataagggggaagtgaggaaggaaagcctagccaatgaattttgaaagataaccctcccctccacatagagagtaaaagcaaactgagatattaaaagactataaataggttgtatttgtctctttatagagacatcctaggactatacatgcgcattcaagtgtacgcacatattctcttccccatctcccttctcatccccccactcacacagaaattggatctttaattttttctacactttgattttttcctattgagtacgatcttctttttacacagtcctttccaacactgtcatttctatcagtagaatagatagtctctgtggttaggtatcgggaagagactttgaagtgggtccctgatgccaggattatcaccggccctgcctgggtctacttaggttccctgactgaatgcaccttattcactctaacttgaaaagactagagagggagactttagagagtcatgagcttgccagcatggtactgaacatttgtatgtggaaacattttccccgtaggggtaggaacaatagattttcaccaaatgagcctcagacccacacggtaggaccattctattaaatcacctcccaggctctgtgagcttaagaatttgtctggctttttaccctcctgtcatccagccttttctggtttgtttgatggctttgtcaatgctcagctacagaggactacagatatttttcttttctctttgttgtacattgatattatagtgagaacactagaccacaggccccagaaattcaacggatgactagggatgatatgtttttctaccattacttttccatttgatttttagggtgagtgttagaccagattttttgggagttctaagagtctttggtggctgaggtcttaagctacaatgtgatcaccatcaatggacccagttcctgagacatcgcagtaacttgacctctaatgtcaaacttctcctttctctggttcattatcacattcttggttgagtaacttccttttggcaagattctctttcctctttgaaacggcaagaaaaagtccatattttgaggtatcagagacttcaacaactgactgttttcttcttgttttgatgttcattgcccacctgtcttatctctggaaccaggacttcttcaaccaagcaagactggattcttttgtttctgccctgtctcaaatagtttttctctgttgctttacctgcaattacacttttcttttagaattattattattattattattattattattgcctttagcaggtccattctatgatgttctgtcttgtaaaagacaaggttcattagagaaatagccttctgttgtgtacctgacatctatataaccttttcttcatagactacctagcattgcctttcttcctgtgatatttctgtggggcctcttatttctttactgaggctgacagttggggttatgttccctttttcatgctctccaaggtatttgtagtctcatacccataataaatgctaaacaaattcaaattcagtgtaagagttcaaagccaggtctgtgcatcctgcccatgagtctaagggcagtcttattccaggtccacccatggtctacttaggctagattctgttgtctttatcctgtatttttcactactgcaaccacaaagcaggatcctagaccttgaccaagtctagggccattcagattgaatgtgtacctgctgagctcacagtcttgctaagagttctggggctaaaggaacaggatagagtgtcacagaatgtgtccttgatcaaaacttgggagagaacagcatgatcctccccttatgtttctgaggcaatctctgttacttacccaactaactcagtagaggctattttcttgccgtgtgtcatcactgtgttgtttaaaataaatgacatcttggtactatcagttgtttgcagtgtggattctttcttcttcaatcaatctctcttcccacttgcctgcccccatctcttcctggacaattagcaaagtgtttggtgtttggtttggatgaataattaattcggaagctttgtgaatgattcatggcccatatgctggggcaacaggatgtggtgtctgtgtgtttgtgtgtgtgtttgtgtgtgtgtttttgtgtgtgtgtatgtgtgtgtgtgtgacacagcataggcaggtcagaggcctctccttaggtcggtggccctaggctatgtgtaccaccccagtggcagaataggttgcatgtaatcttccgtttggagattcttcagggaaaaaaaaacaaacaaacggttctccatggttttatgtattttaattctagactggtgttcctagtttgggccatggtacttaatgaattggagtttatatttttaaaagtagctattgactgtcattaagatgggtgactgattttacatgtcaaagctttaaagggaaagaaatctctttatttccttgcataaagcctcctaggcaaggggcaatgctttcttcagattgtagccttcttactccttgcgactatactacttttgtttcctggtacagctccttcctggcagggagaacacctggctacagttcactttgtaggctttcctttgcctttgaagcgtgttcttatttacttaagtgcatgataatatggggctgatgcctgggctataaacacgtgacttctctttctgccttggtcattttgagtagtgactcctgaatatgtcctgatccctgaaagccaacaaaggagaaataaatgtgttacataaaatcctgaactgagttcattgtctcatagacatacagactccacatttcattatatatcagtaaaatagagagagtctgggagtaaaatccaaaactctggtaagatatgatccaggttttggtaatttctttttcagaagagtaatgaaagcatttttttttctgtagtccctagtatattctaaggttgtgttaatcatatttttgccccccatttctatagaacttatttgtatgtgaggtgtgaaatttgactatacctatatttcccccgttgtttctcagttccgtttacaacgggtcatgtcttccccactgatttaattctacttttgtttgtatactaatttcccaaatacacactctatctttaagttctgccttctactccattggctatttatttgtagactgtattttttttgtactgcttttttaattagtagagctaatctcgaatttttctttaaaattgggtgatcctgggctttatggttttatatgaactcagagttgatgtgtcaaaagtcctaagcttttgttggaaattccgtgggtttcttgactagaatgggaggtattgacattttaacaatgccaaatgttagcaccatgtcttctttatttaaaacattttaggtcctatgacagtatgagggagatttccattcataacctgttgctctcatattacctattttgtgtctaattctgctgctgtgaagaatgcatttttgtgtgtgtttctattcaaatgttgctggtatgcatataaatattattgtttcttatttgttgatattgtattcatagatctcataaaattcttttattagttaaaataagtctataaattctcttaaattgcccatgtaacaaattataacaacaacaaacaactattattgctttctaattggcctatttatatttttcttactgcactagctataggtgccaggagacgttgaataatggcagtgagcaaccatttcatatttcctcttctttcaggcttttcattgatggatgtctcttggagaatgaaaatgagtaacttttataaagggcataaggaataacagtcaatgagttttaataatagctcagtgttttaatttaattaaactaaaagggcattgattttatcctgtaaatgattaaacattgaacttattaaagccattggaaaaagattcagttaaagtttaacaaaaatttcatttatttttgcagtgagcatgtgcataggatttgggtggaatgtgctgtgattgtataaacaaaggtttttacttgggaaatttatggagcaatagtatgtagaatgagtcatgatgagaatataactgataattatggctaagaaagtgggatatcgcacaagttgaagtagatgctgcaggcaaatagcaacagtaaagaaaaaaataggaaagttcagcaaacccattaaaaatcaagaagggagagaaaaaaagaagcaattggaaaataaggagacttgaagacagagtagaagtgactcctgaccaatggcaaccagaactaatataaacagacagaactaatgtaaacagaccctatcaatagaaatacccaaaatgcacaaaatgtcattggaggatggaaaacagagtgggtggaagaagataggctgtataatgtcaacatgaggacgtgactagtgatatagtggttaaaaacaggaaggtgagagtatcagggatacatggcaactggctcatcagtccagatgatttaaaacttatgtacactcagaataatatctgctggaataagggagctttctagttgggtttgaagaagagttgaccaaagtttagaatgtatgcaaattatcactattttagacagggcagtagaaccttggtggttctaacagttagacaactagactgataatgaacagcaagagaagggaggtgttggataatcctttgctttcttggtcttttcagcctttcagaagacttgcagatctgaatctgtgtgtagagaagatactggaatttcagatggaatttaagtttgtccaagtatacatgtatttctcttttgactatatatataataaaatatacacatgtgcatatattatataccgtatatacacgtgtacatatatgtatatatcatatatatcatttacatatcatgtatacgtgtacatgtatgtacagatgtatatatattacattcacatattaccttcacatacacatactgaataatatttgcaacacacacacacacacacacacatacacacacacgatcacagatgggattcctttaagaaaatgttaatttctctaggttttctttagttgttttgtttcctttttttaaaaaaatcttttgtggatgacaacacttctaattattgttccatctcagaggacttctcttccctccctctggaaactgtagtgtgctgtgctttcttcatgcttcttctgttcttgagtttcactaatctgtgccttatgtggtgatttttatttttattctccatggcattttagggggaggacagccctttccttctgaaggttaatagcttcagtaagggctatgagtactttggaatgttgcatccactctccaagttttttgccctttattccatatgtgtgtgtgtgtgtgtgtgtgtgtgtgtgtgtgtgtgtgtgtgtgtgtgtgtgtgtgtatttgttctgcatttctagcttcatttggctggcctgtaactcttcataaatcctttaaacagccttttttcttgtacttttcatttttttatggctttgtatgggttctggaattttgttcagttctgtctctttgtgtctagttcagctgtctatttggccattcagcctgtttgatggatattagcatttccagtggttgtaagtttcttttgcactgtctctggatgtttgttcaaaatgctgtgatatccccatgctgtcatttaggctattcatcatatgcatataccgtgaagctcaagttgtttaatgaacaattttgcttttttctctttgtttgggtatttgctaagtcttgagtatattgccagcgtctacctgcctgtcacagctgtgtaaactgcttaaagggaggaagactgtaaatccaatattgtagcactactgcaaaagtgcaggggcccctggcagttggctcactccactgtccagtcatgtgggaagacactgctgttcctcccaggcacaggtagatacaatgaatgcttctcctctcccactagccatgcctgtttctccagtccaatgggcacgtttccccttgctcttccctggtcgaatgtgggaagaatgataggaagcagagccaggagtaatttcaattgtgtaacatttctgctaccaaacccaaactgtcctgttggtcacacttggatgaccactgcctgcagacaagagcactcctggtaaagtgcccttgttgagagctgtcacactctttttgagtttggaggccccagtttgttattttgttttgagctagaatcttgctatacagctctggacggctgggaatttgctgtgtaaaccaggctgtcctcaagcttggagcaatctttctgccttaacctcctgaagtctgagagtactgaaacgtttgtttcttttcaaaaatcccactgaattcactttctgtcctgatgggtctatcagagcctgcagattccgttgccttcttgatctccattggagtttttatgtgtgagaatgaaaggtgttctaaaaatttgttagaggaggaagtcatagtaggtgctcttatgtgcttatctgagaaagaggttagtgtcatttctatttcttttcttatttagtttcaattacatgcgtatgcccatgcatgtgcgcattcatgcgtgtggtgccctgctctatcactatccactttacattcttgtgacagggtctctcattgaacctgaagctcaccctttttcagccagactgtctacccagtgggcatgggcatccagcagtctacaacctaactacagtgtggggattgcagtgttacaagtgtgtgctcatgtctggcttttacatgcgttctggggcatcaaacaggtcctcatgcttgtgcagtgagccttgcatattgaaacctctccctagtctggccttcccttttcttacggttggaatgagaggatgatgatgagggtggtgatggcaatggtgacatccagcctgtgtttttacgttaagtactgtccctatatttccctactgttcacatgattcctcagtctccatgacatagattttattactgtggccatttcatagatgaaggaactgaggtacagaaagataggatgatttactcagataagtgtctaaactaacttgcattcgtttgaagatgtttgagctgacacatgtcaagcacttgccatggtagtaagattacaaaaaatggcaactttcattttcctaagagccaacagcagagatggctgataagagacgctaataaataactcaagaatgaacagagagctagcacaaagttctatttcactgattccaaagaagatcctatggatgcggttactaggagaccatcctaccagattgttgttgtgtatgataaaataactgtgggtttagggaagggcagagcttgattcatactccaccagatgaacatcttacagttttagctattgaattcatgctgcttgaaactattttaatttttttcagatttgtcatatgattgtcatatgatatgattataaataaactagtttgtaggtttaaagaaaggcaatgattttgatctctcatatgcagaatactgaaaaaagatgttaagttctactccaagggagcttaagtgttactttctacacacagtcaatcctctggctagcttcagcgacttgtattgtagctcttgaattttgtgctatttcatgtcctttgaacatgcttctttgtctattgttacaccatcctgaccaactctcttgactatcatctcttcagctgactatgactgccttcttctcatgtccctccaccttcctcctttgcttaggctgcctctcaacttcacccttatagttggtgggagtgtcctctactgtccccaggtttctcattgtgggtttgagggcagcggtgatatccttgtgtgcctggtgcttagtaatgagtcagcaaacatgagtcaatgaacagatgaaaaactgagtaagctaatgcacagattaaagggtgacaggtgtaaaaggaagtatgaattttggaaggcaggaaaactattccaatgatgtttttaaagctaagtgagaaaatgccatgttcactcaatcttggtccagtatcactgtcatgggaagaagtttctattactactcatctgtctcccttctattaccatgctataatgttactgatgctgtatgtgaatccctcaactccagttgcccttccatttctgagtcccattagaacattccataattgtaaaagcaacttgggaaaatttgataagactttctttttctcacttaataaaaaccctttcttagaacagtaacttttgaatgttaggtataaggctactacattacttcatagataagatctctgttagaatctactcttttctccattagaagacagatcgagagtcaagactttattttcaatctccacatataaaaatgatatacgcaatcacatgtattccgtgccttgagttaaaaataggataaaagcaaagtctgactccaggtcttccatgttttaacatacaaaaatgtcatgttagtctatcttctgtctctgcccacttcttcgtcactctggataggtgctgcgtgaacacctcctctccgggtgctatgtcttgtgtgctgctagcacaatgaacaggtagaggcttcagaatgcttatcacaagggagatgtgagatcagtgcaaaatttacattaacgtaggtatcctaatagctccattatgtggaggggggcagaatagtctcatacatgctcagcataaacatcataggtctgttgctgcctcaccaatagtctatcctgcatcattatctcaaacatcatagtgtaaaggtttattcccccatgttaccattataaattgtgatctatggtgaaactgaatgtatatagctttatatacattatatatatatatatatatatacatacatatatatggcagcttttatttctcgtttgcctgagagctgagagtagtccctttgtaatgctcaatgagaattgatcatgccagtgaatgaagaattgaatggaagatattaaagggtggaacattggaaagatataggactcaaaatatgatatctccacgtatggcctcaatatactgactatgttaagttgagggaatctgaggatcagtgtgtgtgtgaaggacttagtgagcatcctctgaagcaggtcatacagctctggtgttagatgtcccccaaaccccaccccgggaaaggagaattcttatccccaaagatggtggctccttgtagaatctgaatgaacagaccttgaaaagcttcccatggctcattgcacttagctctttatctttcagttctgtcatcttcccctatgacattctgtgacattctactcctcatcaaacttagaacacaaatacccaacagagtcatttcttggggcatttgaaaaataaaattcttgtcacataaaacttacattaataatcaaagatttgtgttttctacttgattgcttatcttctcttgtagaactctggagtagaactagatggtgggctctcacattgacaaaaaggatgctattgagggtctaagagtcctaagattcaatagagttttaggcaaaaatattatgtttttctctctggaatattggccagtctattgccatagttgttcagaaaacatgtccctgacaacaaggtgggcaagttcaagtagcagagttggatagctagaagaatggtgagctgtgaggtccccttattaggtagggagacaggacagaaggaaagggaagggcaggcttctgggttagtggtagcaacattgccgagaagacaagcagaagcaaattgatgctcagctcccagattagttaagaacagcctaattagctaatgaacaactccagccctgaaaagctctgttatggggtgagctacaattctcagcagcatctgcagagtgtgtagacgtgctaacacagagctgaggaacacatgctaagttctgacccacaaatggctggtctttttatgttacacttgcttaagggaatttcagagagccttgtcatcaatgcaacagagtacatgtgtgtgtgtgtgggggggtggggtgtgagggatgaggggtggtggaatggagaggtaagttcaagtcccagcttagttatatcctagcagagtagtctctacctccttgtgatcaagaaaacacatctgaagtgaggatgtgccttttttattgcagatatttattgtgcatactgataggtttcacacagtatattatgtattttggttgtacccatatcccttctttctgtcccccttccttcccttatcattcccattgtatgcatacctcttccctctgctttttctttcttctattattctcattgtgttcacctctctctctctctcttcctccctcccccctctctccccgtccctactctctcctattattctcattcatttcctcagagagttgtggttcctctctcatgtcctatgtagatggttgatttttacacatctctaggaaatctagaacccataaatccaataatgcttgtgcaatttgtttttctgaatctgactttgggactctttttaaaaagtgataaacatgttctgaagttagatagtggtgatggttgcacaagcctgtgaaaatagagaaaaaccactgaactgtaccaattggaagcatgaattttgtggttgcatatataacccaataaagctgttgtgaataaagagtgcatatagctcctaaattaggacagtagcaaatgcaaataagcaattacagtaacgctgtaaccctgtattcatctaaattgccacggacacattgcaaatggtagtggtggtgggctggtatacactggaagtgtagctatagatggccctttaactctcttctcttcctccttcctgtttgaagataacaaatgtttgttgctgccttcttgtagctctgtgtgagctgaggagatgggaaagctggtgaccctagatagattggtaattgcagagcacaaacccttcatcagctctgcagtccacagagggcagcatgtgacagacagcaatttaaagggccatcctttatagggtttagttggttgtttggtcctttgtgattgcttcttttgtattttaagaaggcttacagtcataagcagacttggtggctctaagcggctcttcaggctttatgtctaccaaaagtatctcgggtttttgtgaaaatgaaaatgttggccttaccacagacagttgggacttggtagttacccaggccgtcaggtaattctgatgcagatgcttcatggactatatttgggacctgagggagaaaaatcatcctgttatattgagaaatataagcatggggccaacctgaccaacttcaggacgtagctctccagaaaggaggagaagaaaactggggctagacagcctcacctgtctctgcagtgttaaaccttcttattgtttagtagccctgggactaaccacacttctcatgaaatttaggcccaagtcttctatttactttttattttgagacacaatcttccagttctcaggctagcctcaaactcatcctcaccatgtatgatttgtaattgtgatccacctgcctcagcctcctcaagcttttaacataggtttgaaagaaagatcagaaaatattaacccctgttaaatgcactactatatatatactgtcttttgtatacattaaagatatattggagctattgtatagtaacgagtatttggaaatctttgaggttttaggtgtaagaactctactaaagactagctgaggcagagaagcagttggtctgtttagggtactgtggtttccagtcaagctggggataatggcggtggtctaagaagactcgatggtcatggctctggccctgccactctagctctctcacaggcttatctcacatagactagctgtgattgcctctggctctgctcaagctgcccatgagagcaaaattcaagaagtggagaatccatcagctagactttcccctatgagaacagagaagagtaaggaagagcagggacagggaactgcagcctgcctattctgccccaggagacttttcctcgggggtttggatggatttcatatctggaccatggtagctgtcaattgcatccctatgcttgcctagcttctaagctcctctgttttgaggagagagtttttgtttcctagctcgctgctacctcatggccctcagcttgatcactttccttgttattccttcggccgtgtaccttccttggctccctctcccccagtgatggataaggagagcaaacaatccccgggggctgggggtgaactgaagactgagcatcacgtggccatcaggaggtgttagagatcacggagggactgcagaacaacgtgatgaccagcctcaactggagaaaaactgacttgatggaagaacggatcatgacagagggacatctgctatggctgacagttgtaaatgcagaatactcaacaagtaggcaaaggattggcttggaagggagtatgtgccaagtattcaagtttgaaagcagtcttgggctggctgggaagctggccagtgtgtgttatccttgagagagggcgttggtagagagatctcactctggcctgaggttggatgctctgggcttttgccagcatcttccttccttgaacctctgcctagctgtctgagaacaaggagtgcccttccctggccccacacatgctcacctcctgcattcctgttgcccttgggcttttcatgtggcctgcttcattatggccactgagattgcacctcctttctatgtcatgcctgctgtacaattctagatctgttcttttctatgcttggtgtgtttgaaattctacagtcacatggggaactctgcggatccccctctaggctagaggagaaggaggaattctcaatagacagctgctgaccatttatgttgttgaagaaaaaaaatcatctataatagataaccgctgctgcgcatgatccattgtgatagtcaccatcttcccatgttgtctctgattctttgtcacaagcactaggctttcagggcacaggttttgagcgtgagccctagaccattgtgcactctgggatttggacctcagtatcaatgtggggtcagcagtgttgaagtagaattagactcatcattttttctgcatttgttatagcatttgttatttcccaactcctgcctgtgtttttataattttatgtgtatgagtgttggcctgcatgtttgtatgtgcaccagatgcattgtctggtctcccgggaagctagaagaaggttttgtatattctgtaactggagttagagatgttgtaagccactgacatctggtgttggtaattaacccaggttatttacaagactagcaagtgctcttaacctctgagccatgtctatagccccacagtaggcactcttaaccctttagccatccccccaagcccctcacatctgcctaaaaaaagccacatgttttttctgtttgtctcttggctacctctatctcatgacttggatgttttcatggctttttggctttctgacatcacattctccccagtttcttctttataagaaatatcctggagccccatcttcagagagcccccatctcctaagatgtgaccctgaatgcctcttcatttcctagtccctagattctgtggtctctttgtggcctgtagtggcttcctcagcagtatgctgccctagatgtcaacttctaccccagaagctctagacacctgcctgcctctgcttgctcttgtacacactcattactccatcacattcctcccgatgacctgccatcctcatcacttgcttcttgtgcatttttccagtctttttttcccttttttggcatcaagagccacagttcatttgaactagagggaccttggagatcctttggtctgacttctctctggaccttcgagaggagatgacttgtttgttgtgagtacagcaggtctgtttaataccaggccttctttttgtagtgcatccctgcttccatcacaataggctacctaaaggtgataggaagtgatctcactctcatctaactaggatgatgtcatcaatagagacagagatgcagtggagatgagaaaccatgtttgtaggaggtttcttattcattgcttttgccatgcaattagcatcatattatagtctctactcatgcttactgtcacagccacagattgagccctttattgtatcatcctatggcaccaatttgtttgctatttcatgcaccaaagtaaaaactgtctcaatgacgtatcgcatagctccaggcagaggctagaaccaactgtatgcttaattcacagagtatcaagggcaagtctagaaagcctcacatttgagttactagatataataaagacctttccactcacagcagtgatagcttttcttaattgttgaactgaggcttcctagagtcccctagctagagtcacggacacgtcctccccttctgttttcacaatactttattagcatctttgtttttgctcagatagtgtgggtcattacgaacagactcctgcctcctcctggattttgagtttctggaggaaataaatagactttctttgtatggctcatgggagtctttggccatgaagtgtgtcatgttattttgctcaatatcaggtagctaaattggatgctctaagtattgacatagttaacttctaattcatatgtgttctgtctgcccatctcatagcctccttttacaatgtggccaaaccccagactgggactaaggccaggctgggagggtttgggatgatttccagatgggcagaggtagttgtgtatctgggcatgcctataaccacatctcaaagccaagtatacaatcaattaccttggtcttatccatcatatttagttggctaggctgcttcttccattagcccagataatgaagagatggcatttgtattgtttatgttgtggcacagaaaacaatgccccatctagataacaaggcatagtagccttttctgaatactcagatggaagtggtctggggaaaacaagcatgtctgagaggaacagaaacaaagagctagccagaacaaggaattagtgagaatgctggacatttggtttcttataagaatatagttttgttttaatctcaggtgtgagatatggggctacttcagattgtcctcagcagctgactctgatttgccttgagcgttagcagagccatggttttgccagctgcaggtcatttctttgattatgtgatgttaggagttgctggaatttttcagtgcatgtataaatgctagggcccagagaggtggggtgggttgttggtggtttgttgtttgattttgctcaaggtttgttaagtagccatgtgcaaagaagaaacaagaagacagtggatattctgatgataaagaacaaacttaccgcaactcaatggccctggtcaacagaaagtattctgatagaacatcacctgctctctgacaactaacttcgttcaggaatctctttcctctctcatctttatccctttttctctccaatttactactaggggtttaaagggtggaaaaggagtggagaatgttagaagaaagaacccaccaaatagctaaatccagctacaaggaattgatctgcattgatttcaagccccagggatcttacaaatctaactcatcttacagaattaagaaatggagccccccactaacatgagggttactgaactggattgagccaatggaaccaaagaggaaggggactgatacgagagacatttattgacatttaaccctagaggatggggggaagggggaatcaaagttgaacctcaggctggggggtgactccctatattgaggtgtgttaacattctggataaggagcagtctgaagtgtggagctttgaggatggttttggctctgtgagttcaatgtgctgtttgaaccattgggtagcactcttataggagcactggagtttaaggcaggggaccttggacttctgggatctatcattatatggtggctgttggaacagtagataggggctagattcttcctggattcctaggagagagagagatacagagagagagagagagagagagagagagagagagagagagagagagagagagagagagagagagagatgggaagagactggtgacctgagtcgaagccaacagtgcatgggcagatccaggtctctagcagggtggttgttggagaccattaaagggaaatgaaggaagacagagattctggaagaagaaaatggttctctgggtcaaaggaaatgtagaaaggctatgctggcaatcgcctgggaaaccccgatgtttcctattcttactctgtaagtgagtgctgttcctctgtggcagatagtaatgcaccaggagaggaattcttcctgctctgtgtcttagagtccacacgtaaaagtccctgctggctctgggctttagtcacgtggcatggaactagtcatccctgggcagtttgcagagagagggagagggggctgggtgtgagagattggtgtcttaattttagcaagacttttggagctccttggaaggcaagctttatttctacaaaaatagaaagtattattattactacatcttcgtgctgcattggagccaaatactggagtcctcaatactgtatttatttccctgggctttgggaagggtggaaaagaatgggacatttaggttgctaagtgacgtgcttctaaaaatattgagattccctagtggctccttctcctgttcttttggttggactaagaagatgataaggtcaagtaatagcctgaccctgtattgaggtgggcccaaggcatcttgttggggaagaatagaataaactctccctcttggaccctcctacctgcttccccttagggcctactactttgagaaatcacaggaaaaactgggcctccccctgcctgaatccaagagccttgcctaggcaggcagccctgatggttgccatggtgatagtgggtggttgggggaggcggtgatgcagcgtttggcctgtgcaactgaggtccccaatgtaggctgcctgaagcttaagctcctgatactcttggcgattcttctaggattccagagcgtcacttgctacagtgttgaaatcttcagaactgacaggcatctagacagccgaatcaatccttcattgtttaatatgtatctcatagacccataaacttgtgggattcggagctccacagagaccttggtaggggaaagtatatgcagaagagaactctgtgcaggggagaggggctaataccacagacctgagagtcgggggatgtatttaagagcttctaactcatcagcatccctgacaactggacactaagcccctgagttgacaatgattatgatatgaagttcattatagaacagaacagaacacactatttcattgttgaattagatttctctttttctctttggcaaaatctctcccttcctgacttgatccagcctctcaaaagccatgcagtaaacagagcacgaatgccgtcgtctaaatgatgtcaccaaacaaaacattcattcttttgttttttatgtatctttttgtgtgtatgtgtattcacatatgtggctatggaaacacatgtgctatggtgtgcctgtgtggggccagaggacaacctcagttgttggtcctcattgttggagataaggtctctgttggtatagcagcttagctggtccatgaccttctagggattcttctgtttctgccacacccatctcagtgtaggagtgctgggatcacaggcatgagtgatcatacctagctttactcgggttctgagggtctgaactcagatttccagttttgtgtggcaagtgctttggcccagcctccaaacataggtaacttttcatctgatgtcatctctcaatgccttgctatgtttctgccttcctgaatttcaacatagtttcttctcatacatcagtgtatgctgattatagtaatatcttgtgttatgacattttcatacatttgtatcacttgctttgatgataaccacacatagccattgaccttttgtctcagtattactttttaaaatgggacactctgaacagaacatacagctgtaactggtctgctcctctgtagagtagctcaggacagaaggcacaggattggtgaaaattctgagaatggtatgtccccaggccataccactgtcagacatgaaacctgtgggagtccttcccagatctgcatatggacaattgaccttgttctctacatttttcccatttaaactgttgataaaaattgctgagtgagaagaaacaacataatgatagaactgcctttatgaagtttgaatgtataacataatagcatcaacagctacatacacatacacactcacacacatatacatatgtacatacatacatatgtatatatacacatatatccttctatgtatttgcttttctgttcttgcatcccatctgcaatctggcaatcaaccactgttcttctgaggtggttgctgtcattacttcattaatgaagaagtggaatcacagagaagttgtgtccattgcccttgggcacgtgggttctagtagcaaagttggtatgttgcaattcagcgtttcatctactgatcaatagaatttggaaaagatgttttcaagtgacagaaactccacgtggtcctctctgccactgtgacagtaggatgtcggcgtgctttgctaatcaaccagtaccaaatgctgagcattgtcctgattgatctgcccagtaatcctattgaagcagtcagagagattccattggaccggttcatcctaaggagccttgggccagttcctgagaatggtaagtggtggctatgctgaggccttaccacacctgagctgctcttgtgctaagcactgagctaccattcctgtcctgcattatatgagtatcttactttcttactgttctcaatttgtctccagtctgagctctttttggagttgacagtctaatcactctagaatcttcttcttcttcttcttcttcttcttcttcttcttctttttgaattcaagatgttttattagctttcatgtctgcccatttgaatagtttgttcacatgaacactgaatttgggaggagagtgggatcaagtataattctgctgtagggactatctatgtggccaatgttaaaccatggaattacctaagctttagtcttctcctcttgaagacagggacaacagtccccatgcagaatacctccagatggtgaacacagggatgggagaattgccatgtggacaatgtacagagaagtgcttttcagcttcaaagtttcaaagtgctcactccactgttactgcataaaatgctccaatgcttagctttgcattgtctctgatctagattccattttttaaaaaaaaattgacttattcctttaaattatttgtgatatttatgagacagaacaacagctgagtgtcagtcacccacattggaaaggggttccggtcatcttccactgggtgggattaatgagggagatagagacagacaagctcctgaagggcaggggtgctgccttgtcccagttctctcagcctgaggtagagtgcccctgctcctccatcagtaggaaacctcgaacaggctatgagctatgagcagctatgagcagttatgagcagctatgagcagctatgagcagctgtgagcagctatgagcagctatgagcagctatgagcagctatgagcagcctggagggcagggacccttacacattgactttcattttctgctttcttcctccatccttcctcagccttcgcaggctactctggtgccacctgcagtttcttctgggttgacatgggaaggaggcaacacagagaaaaagaccagctgctctctctgtgactccagcagttcttggttttccttgggaaaacctaaggccttgatggcagggggcgggactcacatggtgccaaagttaggggccactcactcctgtccttggtcttggtccttggagtatgtggtctgcttgattggaaagtcaaaggagataggaaataggacacacttacattaatatgatgacctgtgcctgcaggaatggatgacagttgaataaggccaagaattatcttgccttacaaactctttcttcagctatatgcagaaattcacaacaaagcaccaccaatccttactcactcaactcagcgtgacaaaatgaatgtcttaagaacaatggaaacatgggcctacacgagctgtagtctttcgagtagtggaggttgtgtttagctctccagatactgttgctggtggtgttatgctagggttgtgtccatatgtcttccttcactctgaagatatggccaaagagaaggaggactggggtggcagagatgtgtgggtgtagttatggacttggggagtccttctttagctgtaatagtctgtgacagatgcaggaaatctagagaaggcactgtttgagtgcacaggaacaaggacagaattgattggctcatcttccctagacttctcatggtcagagagcctctggctgatgggctgagattgttcccatcccataagccccacgaggatcttctctcccaaggatggttcccctcaaatagagaatctttcaagagaacatggacgagttgttggggctgggagttgtgagtggggctaggtagcagcatggtcatgctgaagtcatctgaagcttcatattcagatgggttcttttcccccagtgcagctgcagctgctgttacaaagaggtgtaaaatgcaggtttaggagaaccaggggtaattagctcattcacagcctttcttagagttcacacagaattctgagcacccctcccatttcatttaaatatgtcgggagaaggtgagatcagcaggtgcaaacatcatgtggtgtcagaacaggaagctgaggtgtgcccctcccgacttcgtgccaggagaaagggttttaatggggctcaggggagtgtctacacgacatcttggagagtatgtggggtcagaaatcccactgtcctcctccctggctttcagtattagcttctggaagacttagtctcctgactgccagcagggtgtctctgatggtgccgcatagagtgctcactcatgaaccttgtcagaaaggctcagagtagggcaggacctagatgttctcactgggaaaggctgctgaagaggccggtgtttcctctctagtgcctcttgatttttctcttgagccttaattttccctgtggaaagacacagacaacttctaccttattgtggccacccaaaagtacctgaaactctttctccatagctttcctaaacctcctggaagctacatgaagctggcattccttgctggtatgttgagcgttctgaggaggtggagataatggacttccatactctgggatttccttcaagttcagagcctggctcccttgaagcagaacttcataggtcatctcacctgttgccctgccaacccatctcttctaaccacccactttctaaggccgtgcagcagccttctaaagcatagctttgctctcatgattcctctggtagagatgcatctgggagtctttgctgcttcctaggtgaggagggggagcaggacttggcatacattaaggagtgatagactcacagggacacgtcctctggcttgctgtgaccagccaaccagtgtcccagatgaaggtttgtcaggctacttctaaattgagcctggtcacattgcctgtgcagtggtttagaaatggtcacatcttctatggaaacagcaaaagggagtggatctagacagaccaacccataatagctggggtttgtccacagagtggtttatagagtaaccagaatgggatggaagtgggcttggaggagacaagggttccaggaggaaatgacagtttgggatacttgcaggattgtcttgaaggaatataaagaaagggcactccaagttctgggggtaggctccagttcctgcaagggtctgaccagaggctggcatgagcttagcctgggacatttgatagagttctatccattgagcttgatgtttctcaaggttatatccaacttagtgcttattcgttcattctttcttgtcatttattgcatatttactgcatggaaagtaccttactccagattaaactggacatcaggcacaggccttctcctgaaagaatcagctaatggaaaatagataaacaaacaaacaaaaacaaaaccaatagactatgagagaaaagatttggggaagggtacagcttcctagaatagatggtttggagggacctggcctcccagagagggtggcctcacataagagcagtgaactgtggggagtttggtcccttcaggagactggaggatgatgtgggccaggtgtaataaaggcgaggaggccagatgaggccagatcatcaggacatttcctgggaaagcaggaacgagttagactgggaagctccaggtcagacttgaagtttgaaaagatggctctgggactggcctagagcccagaatgaaggcgcagagaggcagacagaagctgaaggtattcctgtgaaaactgaggagcatactgcttgtaggaaagagaactggagaggccgctttggaatacatagttcaggtctagcctcgggtatgtcctgagagctttcgaggagagaaatgtccactcgataggacacccattggctagaaggcccaccgggtactgttggaggcaccacactgccagagggtggccaggtcacacatgtttgcaagaagatacaacccaggaggttttcatccaaggagagtaggaaggttgagattcctaagggagaaagtgtgagttgaaagtgagagtgggctggaaatcagtctggcggttcctccgaaaattggacatagtactaccggaggatcccgcaatacctctcctgggcatatatccagaagatgtcccaaccggtaagaaggacacatgctccactatgttcatagcaaccttatttataatagccagaagttggaaagaacccagatgtccctcaacagaggaatggatacaaaaaatgtggtacatttacacaatggagtactactcagctattaaaaagaatgaattcacgaaattcctaggcaaatggttggacctggagggcatcatcctgagtgaggtagcccaatcacaaaagaactcaaatgaaatgtactcactgataagtggacattaacccagaaacttagtatagcgagatataaggtacaatatgtaaaacatatgaaactgaagaagaacgaagaccaaagtgtggacactttgctcattcttagaattggaaacaatcacccatggaaggagttacagagacaaagtttggagctgagacaaaaggatggtccatctagagactgccacatccagggatccatcccataattagcctccaagcgatgacaccattgcatacactagcaagcctttgttgcaaggacggtgatatagctgtcccttgtgagactaggccggggcctagcaaacacagaagtggatgctcacagtcaactattggatggatcacagggcccccaatggaggagctatagaaagtatccaaggagctaaagagatctgtaaccctatcagaggaacaacattatgaactaaccagtaccccagagctcttgactctagctgcctatgtatcaaaagatgacctagtcggccatcactggaaagagaggcccattggtcaggcaaacgttatatgccccagtacaggggaatgccagggccaaaaaatgggaatgggtgggtaggggagttgggggggggacttttgggatagcattggaaatgtaattgaagaaaatacgtaataaaaaaaagaaaaaaaaagaaagtgagagtgggtaggagcaactatgacatcttagaggatattacttttaagagggagttggaggagggatgctagccaggaaaggggaactcagaagggaaaaagaggacttcgaatcctgaaaagcaggatgaatattcctaatgggaaatgcctggggctaaaattattttggactttagatatatttatttcagaatatctacacatatatatcatatctataatatatatatatatatttatttatttatttattttctgcatgatatatatcaagatcttttggggatggagcccaagtcttaaggcacaattaatttgtcatcagtagataccttatgcctacagtctgaaggagattttgtacaacatgaggacccacatgcacatcttggctcttgggatctggaggccactggtgacctttagtaagtttattcatggagttgggagggcagacgccagctggcagcaggctgaggatgtaaaccacagtcagaagctggccagtgcagagagaatggtgaagaggggcccctggggacacaaggaaggtatgtcaaccagagcactagggtgaagtaacaggctcggcatagcagtgtggcttctgggaaaatcacatagagctacttccatactcctatgccttgtagaagttatagaaacactacaggcaacagtgacatacaagtatttgagaccaagtttcacgtgcagcccaggatggccctgaactcatagcattagcatctttctatctcagcctcctgaatgtagggattgtgggtgtgagtgactattcatgaattacactgtactttacaaaattataactgttctgatcatagaagaaagatagtcttataaaaaacaaccctggaaaatacaaacaagcattaggaaagaacagtactccttattcactggactagtgtcatggtctttagtgggtacttgatacagtcaagccagagatttactgcttctcccatgtgtgtatatggatgataaaagctaaaaatgatggacaataagagatgggcagtgataattaacagcagcatataccagtacccatggcaatataacctccctctcaaagtgtcttgttgttttatctttttttgcctaaaggaacagattaatgtttctcttatagatattcaggtttttaaataactacctttgtgctttggggccatgattaagtatactgcagcagtacaacagtcagtatgatgacacagacagctcccatggaaccaatgggcaggtagcacctactgggtggatatgcttgacaaagggtcatatgctatattctgatggggacagggggcagtagtttgagatttcattatctacttagaatgttgtataatttaaagtttataaacagtttatttttataatttttcattgaatattttcaaaatttattaactgaaaccacagaaaacatctagaaatagggggattgttgaccagcaacctcacggcctaaagataacacctgctagcgtttagtgaatttccttcatgtcttttccccttcttatacatttcacattgtagaatttatattgaaggtaaaatatttacccctcaaaattactctgattttcttctgtaaggctttatgtataatttactatgttattaaatgttctatagacataatatttttaaatgaaaatgattacaaattttattttatgtgcatgaatggtttgcttgcatatgcatccttagaggcctgaggagagccctgaatcctctggaacaggggttatggatggttgtaagctaccatgtggattctagaagaacctcgctcttatgttagaacatacatgctcttaactactgtgacatctctctagcccctagcaatagcactttaaaggctatgtagtattccacttcgtggtgaactgatgatatatggttcctttcaaaattcaatgcagaatttaccattagattcagcagttccacttttgggcttacacccaatggaattaaaagcaagaatcagcacagattgtggacattcatagtagcggacattcatagtagcatgatgcacgatatccaaaaggtaaaagcaaaccaaatgcaactgagggactgatgaagaggccacatgtatatgcatataatgtatatattatgcatgtgtgtagatagatagatagatagatagatagatagatagatagatagatagatagatagatagatagatagtcttacaaaggaatgcagtcctggcattcactatgacatggatgaaccttgaagatgtcatgttgagtggcataaaggagacagcgtgacaaaagctgtataatttcactcacatcttgtacctgcaatgagtgcaagtggaagatggctgccaggagctggcaggacaggagagagattggtttagtgagtacaggacctctcttttggaagatgaaaaagtcctggagatgggtgaggattatggttaatatatattgtacattatatgttatagttataatatacattaatatctttaatggtgcagcagtagtacttgaaagtgttcaaagctgtgaattttatgttctatatattgtaccacaattagaaccaaacctaaggactgaatcttttcaagactagtttacatgtagacagcaaaatctatactttcttttctctctttttagaaatatacctgaatatattttggcagtaatgtgtggttgactatacacagagtatttctgcacaccaccccccctgccaagcaccctgggcccctttcttgtccattgttttcttccccggtgtctgaaaaactactggactgcttttcccccctagacacagcgtttccatttaaatgaaatcagagcacagccttcagactaaggcatagtgcttctgatatgcgaccctgcttggtgcacacatcagtatgcattcctttctattgctttcagtgccctgttctgtggacaaccaagttgtggtacaattgattgatttaccagttttgtattgtttggattgggtgcaccctgggtagctataggtagagagagatgtgatgaataaactgcccattgctgactacaatggccggcgtgtgtatgactccataaagaacagctctgctgttttccaaatggctgtgctcttttgcatttccagcagaatatcggatttccagttgttcccctgtctcccattcttcaccatgttcagcattatcaggctttggatggttgtttggacttttggctcagcccttgaataggtgtagagtcaacactggtttgagttacagcttgtgtttccctgatgatttgaaatgtatctttcatgtgtgtctttgctttttatgtctttctgtattgaagtgacttctcactacatggggccagtttttaaaaattaattaatcaattaatttttttacactctatattttatcccccccataaccctctgactgttccacatcccatacatcctccccaaacccccagtctccacaaggatgccgccgccccccaccccacctgacctctaaactccctggggcctctattctcttgagggttaggtgcctcatctctgaataaacccagacccaggagtcctctactgtatgtgtgttgggggcctcatatcagctgctgtatgctgcttggttggtgttccagtatctgagagatcttgggggttcaggataattgagactgctggtccttctgcaggatcacccttttcctcagtttctttcagccttccctaattcaacaagagttgtcagctgtttctgtccattggttgggtgcaaatatctgtatctgattctttcagctgcatgttgggttttttggagggcagtcatgataggtccctttatgtgagcactccatagcctcggtaatagtgtcaggccttgagacctccccttgagctgcatcccactttgggcctgtcactgggccttcttttcctcaggcttctcttcatttccatccctgtaattctttcagacaggaacaattatgggtcagagttgtgactgtaggatgacaaccccatccctcacttgatgctctgtcttcctgctgtaggtgggctctataagttccctctccctactgtctggcattttatctaaggtcccttcctttgagttctgagagtctctcacctcctaggtctctggtgcattctggagggtccccccaaccttctatctcccaaggttgtctgtttgcattctttctgctggccctcagggcttcagtccttttccctcacccaaaactaaatcaggatcccttacccagctccccccatccaatccactttcctttccttcccaggtccctccttccctccccacttgtgatagctttcttctctctcccaagtgggagtgaggcatcctcacttgggcacttgacctttttgagttctgtggactgaatcttgggtattctgtacttttttttttctaatagccacttattaatgagtacttatcatgaatgtccttttgggtctgagttaccttgctcaagatgatattttctagttccatccatttgcctacaaaatttatcatgtccttgttcttaataactgaatactattccattgagtacataaaccacattttctgtatccattcttctgttgtgggacacctgggttgtttctagcttctggctatcacaaataaggccactatgaacataatggaacacatgcccctgtggcatggtggagcatctttttggtatattcccaagagtggtatagctggatcttcatgtagatctatttccaattttctgaggaacctccagactgatttccagagtggtaataccagttttcaatcccaccagcaatggaggagtgttcctctttctgcacatcctcaccagcatgtgttgtcatctgaggatttgattttagccattttgattgatgtaaggtggaatttcggggtcattttgatttacatttctctgatcactaaggactttgaacatttctttaggtgctctcagccattcgagattcctcagttgtgaattctcagttttagttctataccctatttttttgattgggtcgtttggctgtttggtgattaatttcttgagtttatatattttggatgttagccctctattggatgtggggttagtgaagattctttcccaatctgtaggttgctgatttgtcttattaactatgtcctttgccttacagaagcttttcagtttcatgaggtccacatggggccatttttaattatgttgttttctttagtggtaggtggcttttaggtcacttacaattattgatactgcttaaatatctataggtacatgtatgtaaagcattgtatataaatattttataaaaagcattttacctaaaattgtcttcaattttagagtgtatacttcaaataatttgaaactctcaaagaaagtagacaatttcagcatcctttcttaattgctgctcttgaacaggacttgggttcagttcccaacactcacatggtataactatctgtaacttcagttccctgggcatctgatgcctcttctgaccactgtggttgtcacacatccatatggtacatttacatacacggtacaagcaaaactttcatgtacataaaataaaaataaacaaataaatctttagagaaattataacgacacagaaacatgccacagctctccatctacagggtcacctgcagagcatatgaagtttagtattagggttgccagttacagtattttcattttttcataaaatattaattcggctcagcctggtttctttcatgctcagaggtcatgcctaatttgcatagctgggaaggtaaaaatactttcagagcagaagggagaaagctttgtcactagtttaaacttagacaccagtgtcaagacttctacaaggggcagcagtttctttgtctagactccatgattaatgaatgcactgtatcattagagcactctctcagaaaatgcccacaccacttagttgtgtgcttacctaacctgtggattttgctaacagctcagcactttatttatccacaatgaaaatacaattaaaaccacttacactgtttgtgctgatatgccannnnnnnnnnnnnnnnnnnncatgtgttgtcatctgaggatttgattttagccattttgattgatgtaaggtggaatttcggggtcattttgatttacatttctctgatcactaaggactttgaacatttctttaggtgctctcagccattcgagattcctcagttgtgaattctcagttttagttctataccctatttttttgattgggtcgtttggctgtttggtgattaatttcttgagtttatatattttggatgttagccctctattggatgtggggttagtgaagattctttcccaatctgtaggttgctgatttgtcttattaactatgtcctttgccttacagaagcttttcagtttcatgaggtccacatggggccatttttaattatgttgttttctttagtggtaggtggcttttaggtcacttacaattattgatactgcttaaatatctataggtacatgtatgtaaagcattgtatataaatattttataaaaagcattttacctaaaattgtcttcaattttagagtgtatacttcaaataatttgaaactctcaaagaaagtagacaatttcagcatcctttcttaagtgtgtattgttccatattttgccaagtgatggtaccagcttattaaccttccagtagtagcaataggatggacatgtcaattattaatttgaatttctttggctatggaaaatttcaaaggtaaccactaaacattctatatttattttgtgaagtttctatatcttgctcttttagatattatacacaaaagagagttggagagatatctcagtggtcaagaccaattgctgctcttgaacaggacttgggttcagttcccaacactcacatggtataactatctgtaactccagttccctgggcatctgatgcctcttctgaccactgtggttgtcacacatccatatggtacatttacatacatggtacaagcaaaactctcatgtacataaaataaaaataaacaaataaatctttagagaaattataacgacacagaaacatgccacagctctccatctacagggtcacctgcagagcatatgaagtttagtattagggttgccagttacagtattttcattttttcataaaatattaattcggctcagcctggtttctttcatgctcagaggtcacgcctaatttgcatagctgggaaggtaaaaatactttcagagcagaagggagaaagctttgtcactagtttaaacttagacaccagtgccaagacttctacaaggggcagcagtttctttgtctagagtccatgattaatgaatgcactgtatcattagagcactctctcagaaaatgcccacaccannnnnnnnnnnnnnnnnnnngctgctcttgacaggacttgggttcagttcccaacactcacatggtataactatctgtaacttcagttccctgggcatctgatgcctcttctgaccactgtggttgtcacacatccatatggtacatttacatacacggtacaagcaaaactttcatgtacataaaataaaaataaacaaataaatctttagagaaattataacgacacagaaacatgccacagctctccatctacagggtcacctgcagagcatatgaagtttagtattagggttgccagttacagtattttcattttttcataaaatattaattcggctcagcctggtttctttcatgctcagaggtcatgcctaatttgcatagctgggaaggtaaaaatactttcagagcagaagggagaaagctttgtcactagtttaaacttagacaccagtgtcaagacttctacaaggggcagcagtttctttgtctagactccatgattaatgaatgcactgtatcattagagcactctctcagaaaatgcccacaccacttagttgtgtgcttacctaacctgtggattttgctaacagctcagcactttatttatccacaatgaaaatacaattaaaaccacttacactgtttgtgctgatatgccaccatcaaatagacttgtgagcaagcggttcctgtatagagacacaattcttgttaattattaaaattgctgctatttttattatattccaaataggtggtatgggatgcgatatgactcagaactacttgaatgaattttggcttaatgactcttacaagtaaaaagcattttgttttctctgacaaaaggctctagttcacttgggctttacagacagttggtattttatagtaggtttatggccgcctcttcatcaaacctgtaattatgggcttggcttctctgcaaccatgagaaattttatctagttttctttttcccacatacctgtcattctggaagaaaaatggcacatacatgtcctgcagatcaagctcccacgcattgtaagcaaagccaggaatgaagaaacaacggacaaacacattttttttctaaaatttatggatctatgatttgttggaaagattcattgatttgagagggttttatgaattcaaatagattctttaagccaagtaattcccatctgggggaagaaaaaaagaacagaatatctcatggtattgtgagcaggtagacttcttggctttaagcatgtttcccctccaccttgaaagattccttgggtcagcatgtgaaatgggggtgatggcacctgtctggatgaaggtcatgttaaacaggaaactgcctgatggtcttcagctggcctttgttgtcatgtgtgcttgcctgacagtggtggcagagtcccccactgcccaggcaatattgaccttcttggggggaggaggggaggttgatgttttgagaagaggtctttctaccatttcttggagtcatgaatgaatatgtcttgagtctcttggctgttgaggaggaagaagcatcgtttcagtatctaaggaatccagccatttacaaaagcatcatgctctgtaactggcacattaactccaagccaaggcatgcttctgtgtttctctttgttgtcttctgtatctcatggctcttgtagatgtggctaaaccagttataccaacgttgattttggtttcttccccagatggtaatttccagacagaaaaaaaatagggcagttattgtgatgttattgtgatgggaacctgccttggaccgttctgagcagaaaggacatgtctcacagaactgccatgttacagaaagaccaggaaatatcagggaccctacaaactgcaagcacaaactcaattcctgcagagatctgtttgttctcttttcttctctcctcttcaggatcagttgctttctctctctcactgtaactagttttgctctcttagtgagttcatggctggctacagctctcaggcttttgttttatatggctttaattgctgcagaagtgatagctgagctctatcacccatgtctaaatatcccagggaaggaactgcttgttcctcaacctactgcggctagcaatattacatgagaatgttacagtttgaggaatttgggtaaagaaggtggttctggcaatgtggcagtagctacacttatggactctgtcatgttacatagctagtccctggcatctgactttggagttcactaacacatgctaacaaagccagtgttgaaaacttggctgccactgggattattattagccaagcttttgtccttggctgggtgctgctctgtgcctggttagccatctcacaaatgcttgtaccagatctggaggggaccctagtaacagaaagtgtgtaggtggaggatcagcagaactctcttgccaccactggaaagacaacccaaagaacatgtatttatgttagcgcgatcttatattgtgggatttcccctctgcagccgttctccttcactctcagctctctgaagcacagttctggtcacctctacatgatgttgcaatcactgggcaccacaaggctctgcagagaggcagctctgtaagcatcctagagagtggttgtcacatatgtgtacctctggggcatgtttctagctattagtcattatcttttgtagctaccaaaagcactagagttagattccaaatgtgtgcgtttgagtctcaatttgactgttgcagtggccttggtctaggcagtttctctctctgagcactaattctcagatgtaggaaatggggataatggctcccctatgggtgatgtcggtgtgaactgtgaagcaatgagacaactttctttctgtttttgtcatcctttctgggacctgcatgccaattaggatctctcttcttcctttggtattttcattttctagatctgagtgaatactttatcccccagaatacagaactcgggaccattagtaggactttgattcctatttcccttatggtaagttaggcaaatataaatattctttgtacttttctagcattggagggagaatgtctctttcataaggggaccagcttgtagcacctcacagaatgaatttaggacattttaaagggatttaagggtagtggggcattccttccccaaaacttaatggtccttcaaagttaaaatttagggctgggattatacaaacaatctctcatttctgattggctggactatgtgcttcttccccaagggccttgtgagaaacaggtgctactcgcctttagttagctatttagttagctatttctcctgctcatgaggattgtcagagttcttcctgttcagtggttctcttccagggtagacatttgacaatatctggagacattttgtcatggctggtggaaggtgggctgctaccggtagttagtgcctacaggctagggatgctgctaaatgtcctacagtgcaaaggtcagctttccagtaccaagagtgagctgtctctaaatgtcagcacatctgacatctgtgtgatgtgggtttgactgttgagctttcttttgatggacaaggaaaggaaggggtttatgccaggacttttctttttcatcaaaggtgtattttagtattacccactatgtttcttttgaaatttgaccagggaaccacattttctattccatgagtattttcccacttttgttgaagtcagaggcacttgttcctcttgtaaatggcatagtctttccttaatagaaagggcaagctgatcctgcctgccttcctattctcccaagaaattttaggtccccttggctgtaacttattgtctgtagaacagatcaagaaatagaaaaaatcccacaaagaacaaaaaaccaaagcagaaacagataccattctatggtgatagttttcgtgtgtgtgtgtgtttctctctctgtgtgtgtttctctgtgttttgtctttcatattacctatttcatttcagggacctaaatggggaagaagtttctttctgtaatgccatgtctcccgttcttggaacaccgtagtaaagactttcaatgcaaactattttttgattaggagaaacatcaagaggctcatggttatgttaaatcggcctctcacattgattcacctgccttttcagagcagtatccttagaaagaatttgtgtgtatgtgtgtggtgggggtcagtggaggtggttagggctactgtgggtaactttcactagagggtcatgaaatgaacttgtttgcaaccagcattgaacataagaaaggaagtattgaagagaaaaaaaatgcaagtctggcacacatagggtaaatattattttatatcaacctgtcattattgtaaaatacactccctgctttgctgtgatcaaaaggtctgaaaaagaaatcccagtatctattatacttttcctttgttctataacacaggtcagttgaagtcctgaagactattatttctttatagatcggtggcatgagttctatcagctggccatttctaaaccaattactgccgatgacaatagaaagcttgttaagcttgatctggatttatccatagcacgtctggagcccagtgcaagacatgaccacaggatagccctcctaccagagaagaattaattcaggtatagagaccaagtccaagggttaaagagaaagtgagatacctgcaggcaggaaggctcttttggatacaaagtggtgttgtgactagctgacgcaccactgacacatttaagactatcagccaaagctcttagaacattctgcaaggctccatccaaaccaacacattccagaggtcttccttgcctgtgatgtttttgagttctgcagattcgttctccactcttcctgccttacctggttctagccgcacctctctggttttaatatcttaaacatgatgatctcctgtcttcctcgctgctccttctatgttgaagagtttatccccttcttgtttcccctgccctactcataggtcccctttgacctttttacttactttaactgtatcttacactaagatacattaactgtatgttacactaagtgtgataaggatagctacctcctccatcttggcctctgtgggaatgccacctgtgtgctcagtaagcctccgttgactacagcctgggttttgggctttgagatagagctagccctagtggtatcaaaggactacagcatagccagtgggatgaggggagaaggaggctgcttacaggtactgggagttaggcagtcagatgattttctcatcctcagcttccttggttttcctctaatatattttggtcaagttgatttttttttcttttgaatagtttctatgtgaacaatttaataaacgaaacctcttttttctcctttttttttataacaataaaacgaaataaattctctagaaattgatttccaaatcaaatcacattcccataatgtatttaaaggaaatgaagagcataacattgcgtgtaattcaatggatttttgatggatcataatgatttgcatgtgtggttaaagtgcccttggtttggatctctgattgttatgtaagtgccacagacacatagacacatctcctgcgcatgcgtctagattttctgctccagagagactgtatcaatgttcatgagccttaagatggggcttttcttgggctccactgttcctattgctagagaaatgacctataggacagaagcagaaagacagctcctgccataaaggagtttggctctgaatcgagttataaggacccaacaacttatcattcattagagttcttgaagacatgtaaacaaagcatgcctgagtgttcaatgtaacaatccgacttggggactgagtagctgaatattcaatgttgaacagctgtctggatactgagcatagttgtaagctgcagaggctagtgccacttgactcaagtgacagaaccagaaggggcctgaggggcctgaggggcctgtctttgtgttcacctcatttaatagatgaggaaacagataattgcctttctcttccttacctgcaataccaacttatcagatgctttgcatgtgtcaggctgtagaagacactggttttaaaaattattatttgttttcttatttatttggctcttatctcccagtgaggagtctactttgtgtacactcttgcaggagtcttgttcaccttggaaacactaaaaggctatccaagtgcagctaggttgtgttcattgggtcatgctgcttaaaaagagactccattccttcatcttctgctgcttctggggctatagttctcctgttctttgggaccttcctccatcttcaaaactagcagcatggacagcaccttgcttcagttcttccattgccatcttgtccctagacaagtcttcctttgccattttcttagaagtaccttagcatttataaacattgtatattccagaacaatccctcctatcaggatatttaactctgagtaaaactgtcttatttgtagcagatgatattcatagcttccttagattaggacctggctatccctagtacaccaagatccctgctttctgaatttctcagactagttttctgatactcttctaattctgtgacttcctagtatgttctcaaaatatgttggacctgtttggtggggatgggataatcttaaactattttacctttaagatagctaaaatttatttctattgcttgtgaccaagaatcaatgtggtaaatcagtactatgcaaagaaatttacaagcattagtttttaaattccataaccttccttacaaggcctttctccatttgacatgtaagaacattgttgtctcggagtgacaattccgtaagtttgaaggcttgtgctaggattagagttgaaagttgatcagagagcatgtgcttcactcttttcctaaagcagaagtgtggaatgtgggccagaatatgaggtctgaaacattctgttttggttgagaaagcaagggaaagaagaggtggtccaagcaggagaaaggctggagagcaagaggcaaatgcaagacacaaattttaagggaaatgcatggtaaaaattggtgcctttatggaggtacagcactatgagaaatgaagagaaatgaaagaccaatgggtccatcgtggatcatagaatacgtctaaaaaaaacaatggacccaaaccatgggatatgtggactgaccacagtaataataccttggctcaactctgctggacatccaactttaattagatccctttctgaattctggtctccttataatgtgggctggctaaacacttgacacatttttgactaatattagtcaccctctcatgaacagcacacctttaaaaagtgatgcgcagaagcagacaggtgatttttagagggtgggtggcaagcctacgcctaatgttaaagacccctggcttctgtctattctccaaggagaacttgcagatttgctgagggttgggcaacaactaacagtaggagctctctacacagtaattgctggctcccaatgtgtcatgattagctggagtcattacttttgggcactgaatgagactgtaatgctcctgagcgtgtgtgtgtgtgtgtacacctatatacctacatacatatatggtggaacaagatgttcatttcatggtgaatgaaaagtaaaatagtaaagaggcccaggctctacaatcccctttgaagtcacaccatcagtagcctcagatctcccagtggctctacctaggatttctatgagacaggagccaaaccttttaacacacaggccttgagggaattccagatcaaaacttgagcaccacctgagtgtaatatgtagacttcgcaaatagaaatgtaggccgctcagttgtattagttacttctctgattactgtgactcagtcagtacctaacaagaagtaacttgaggaagcaggtttatttcaccttgtattttaagaaggaataaaggtcatcatggtggggaagatatggtggcagaaatgtaagacatatggtcacactacatctgtgttgaggaaatagacagaggatagaaagttggagtgggctatgaagcaccaagctctgccttctgtgagccacttcctccaatgatgctcaacctcctaaagtttttataccctccccaaatatgccactagctgggaaccaggtgttcaaacacatgaatctatgggggggggcacatttcacactcacaccccagcactgtttaatttaaatgccagattttagatagataatgaatatcccacacattattaaaaaaaaaactgcactaaacttacttagttgtactaaaaactatttcagttctttaagcaaaactcaaattccactgagcaacctatattttatctgacaattctaaacataagcccactgctgcggggtattttcagacatggaagtgaacagcagaacatgtctgtaaaaggagactattgccctggattgacaaggaggctaagaaaattccctgaggtcaaaaggaatagaacagtgaagatctgtggatggctgacctgggagatggctaagttctaattgtccagggcatctcttgcatccttgtctcctctgtccctccacagttgccacgactagaaagacttctgtcacatcatcaggatcagatccacctccactcatcacctcagcccctgacaactgaaagcaaaagtattagaggagaggctgagctgcaacagctagactgaagcaattaccagactggactgtgtgtacgacatgctgtgtatatttctggtcatctgccctctgctagggagggcaggaggaattgagtacacctctgtatagaactttccatcctttcaatgcttacaagggaaaagtacatggaaaaaatagagcctctgctcttgaagcgtatatacacagagctcttgggacagccgagagcttaggtttttattaactcagactgaacttatcctgggtggccttcttctgattttgtgatgtgtgtgtaaatattgcagcagatgctacctgccacgaaggcaatcttctagtcatggagacagacaggtacctagagaattctgatggtcctgaaagggatcagtggcaactcacttggtggtttatggcttgggatgaaaggaatcagactcactaatgtgttcagagacagaacatggtgactctgggcaacacactggaatagcattgctgagaagtgctaagtcaacctcacacagcatcagggcacaacaggactaggagagagaactggctttcttttaaccatttaactctttctaagcctggcttcctcacagaagtgaaatgtagacaactgtcttgttagatgaatttttaatgatttaatcatataacatttgaaaatgctgctagcaaatgataaatgttctgtatttgccaccccagcgctccctaaacatctctgtcatgagtccatattcttctatgtgactgcttccatggactgagtgtcaagagccatgtccttcctctcttcccgcattagacttgatagagctttgctgagctgcatatacatcaacacctggtttttcctggagaggaagcttctggcctttgtatcttcctctccttgtcactccctccctctatcattcctacggaggacatccttttctgtggggtcatagttgaggagtgtattacaaggtcctcatcagactttagatgttgggggataggttccttgcgtactcctagatgctccaacatacctatgactgaataatacccagctttcttggcttttctaatctttccatcaggaagtttgaggatacctgtggtctctatcagttattgatctgttcaaattcattcattttttgtcagcaaagatcaggttcaaaccatcaagcatctgtttaataactctgagaataggcctgaggatgtaggcgattctgatgtagactattgatggagatgggaacagggtttgctgggcccccagagcagggccccgttcctcaatccactttgccctctgtcaatcccattgtttctgatcttaatacatggtcaggggagccaagttatagctcctgcccccaaggactttgtgaacattagaaattaagaagcagccagtggctatgtatgttttaaaagctctgttgatcgtcttcctgcactggaagaaaaaaaaagaaatttctaaggaaccaaaaagctcgaggagcccgggctgtgtgagatcctgtttggttgttgggagtgcaagatggattcagtcaagagtacacttgatgatggggtagtgaccatgtcacatggctggctacgtgagtcccctgtgataaataacacattcctctgtctttcatgttcactttgttttcatggtacctttctgacatgaccttccctgcacgcttccccggcacctgcttctccattagcttttatctcttattttcctccttgcctgcatctccacattttttttaaactaggtctgttagcgtctcgttctcctgtcttccaactgcattttcactgtgtatccttgctctcttttaacaatgtcttctgcctctgcctccatgttccaaagcatacctgtcatacccaggcctggggaggaaattttcacttccagcagctctttgtgtgatgtgaaagaacatctgagtacctgggtctcctaggaaacagaactctagtttctgagcagagcagattccatacactatgtttgtgagacaccaggaaggagagtctggcacctgggcagcacaggaggctcagacttgagtccagcctttgttcaagagggatgccgaacaatgcacctgctttccctcagtctctatccctcgcatatctgtcaagtgtctttctctttcacttctttcttttctcttttgtctatttctgtcatagtttttcagttctattttctacatttgtctttgttctttttcctctttagaagttacgccatccccttcctgatggcctcctttaactttgtaagctaaaatgtggtgggggttgggatcaggaaagatgcaggacacttggaaagctcgcctaggacaagtgctttatgagagtaggagaggtttgcttattatttgagattgtatgagcacagaattacatgaaacttttcaatttatgtatgtggtgcgtatgtgtgtgtgtgtgtgtgtgtaagcatatgctttccccgtgcttgggtgtggaaatcagaagacaacttccatgtactggccctagggcaatgttctgctctctatttgagacaggccttgcacttttaggcatctacctcctttctgcctcccatctcatagttgctggtctcacaggtgtgctttaccatgcctggctttttaacgtgagttctggggattggcagtgcaagtattttatatactgagccatctcccccggtccaaagtataaaatcctaaagctgaaagcaatctccactacccattccaataacataatccagagtgagcatcctctctttgtcctaacatgagctgtgcagcacgaaatgcttgaatagtgctaacgttgaaagtgttcttctacagtgaggcagcttgtcaggggccaaagttgtgtgttcacagtcatctctgtgattatgtcatcttggattggtatcctcggtacctgtggatcttgcatctgtatcctagagccatgggacctttcttacggttctctttgcctacatttgaaatctttcagagaggttgcccaaagaatagttaaattggccattctttctactatgaagttttccggatgactcatttcccagtgcttctaaacagaggggctaatcttggagaggctgtaagggataaaaggtattatctcacaaaacaaagaataagctagcaaaatttaaatcagtgttattgatctttgtgtcagaaacaatgtcaattatgcactttatatgtgccagtaccttattattattattactattattattattattattattgcgatagtatctcactgagcaccctatgctggccttgaacttgcagttctcttggctcagccttataagtgtagtcgttagaggcatgcatccccatgactggcccagggcattctttatctttaacacagtgtaattttatatctaaaactaggccattgtacttccctagtttatagatgaaaggcacaacccaaccaaccaaaaaacaaaaaccaaacacctagagtttgagagatttgtatcaagtggatagttctttggaacaggacttaaactttgcttgtctaacacttcgttttctgcctcaccactcacaaatccatatgtgcctttgcccccaccatatctactttgtccataggttctatgcaatgcattgtctccttaacatgtgctatacacagtctaatagtagtcttgtcgatgtgtagatgtgagtacgtgtgtgtttgtgggtgtgactatagaaggtggaaaaatgaaagcacagaaagccagtccaggtcaaagtctggtttggaggcagttagaaaacatgttaataatgtataatgaccacggacatagctcccagtcatgaatgtcagtataatttattaatttggtaagaattctgagcgtcaaggaagaggagagtaagttacttcttcactgaagttaatccagaaaaattccctaaagagaacaggagacaggaatatgtgacttggaaatagaaagcataagggtctggtagcaggaaaggaaggggttgagaagagagtgagggaccagatttggttcaggtgtgggtctttcgttggtgtccatgtgctctgctcatgatctgggactaggactcgagtatgatggtaacttttcctttgcaaagtaaaacccagatggctatatttaattccacttaacgccactggtgattcacttgggctcaggtgcgcccacatacagctggcactagctttgtgtactttccaggcagaggctgctatagtccaaactccccatgaaacaggaggggacagacaggctgtgataaccttgagtcttttgtgtctctctccacagcatcctggccactgcgggaacccacttcaacacccacgtggacctgcggaccctccgggctgtgcgtgtcctgaggcctttaaagctggtatcaggaatacctagtgagcacctactttcttctttctgattggctagtatcctcaattggatccaggttataaagcaatgtcaggtggaagagaaagagttcttcctggagggaaaccctgaacttgcaacaattaaacatagcactgtgcttttaaatttaacattttctcatatttaaataataatggaagataacaaaaaacaggaaaggaaaataaaagaaaagtttattcctattgtattacactgaaataaatgctaattggatgcatttttttcattcatttcccctatgcatccaaatataattttaattattacatatgtgcagtgttatctgctgcaataagtgtttcagtctcctaaggtgaaaaattctatgtattgtcagaggttacggtttgttaatcagtactgtgcttctctcccagtgggtggagggcgggatctgagagggagtaataggaaaggtcaactttgcccctgttttataggattgtacagcagcagggactttagactgagtatgaaacacagcctaatgaattgaatctgtcaaaggaatctatatgtcatcacagaggaaacagagggtgagaaggaaacataggagaagggacatagatgatggcagtcttcagtttgacttgtcttggttacttatctcagaattaatggtttggtttttgatggaagactaggagagggtaactgagcccatcttgtcagggggcagtgaacaaggtctgtgcttcactctctcctctctccctaggcctgcagatcgtgctgaagtctatcatgaaggccatggtgcctcttctgcagattggccttctgctcttctttgccatcctcatgtttgctatcattggcttggagttctacagtggcaagttgcatcgagcatgcttcatgaacaattcaggtaaggtcatgattttctgtcttctcttctcccagtgcttcttccctttagtcataagcataaattcacgacatttggagctttgctgaaaaagtatactctatcttcagccctaggattacagtcagaaacttcctagtctgtagcttttggaggtacaaccagcttaaagatatatctacttgaaagttacattacaaaacatgttgctttgtatatagttggaggggctcaaataggtggtctcagatcctctgtccatgatagagggcttttagaatgcatgccaaaagccgttatgaataaatagtctacagaatatatctttgattcaaagaccagtgggaccctggagaagagaatcagatgggtgtcctggttgagctacaaagagagcacccttttgtgctccatctcacattcctgagaggactgaaggagctgttagtttggcttatcagttatgccttgaaaattgtgggatacacaaaaccccaatttccaaatatttgtatttttttgttcattccaagctaagtagtgtacaataggatgaaagtcagagaggaggttaagagaaataaagaataagttaaagagtcctaaataaataccatgtttttatgaaaagaatctccaaatgatttttattttacctttagtttaaaataaagtaaaaaaaagaatgtgtgcctaaaacttcaaagagttaagaaaatatagcagccggttgcttacaactgtccccaaggagcccagggagaaccaaggttcatcccagttcccagggtttggaaaatgaatgagatttaccattacctcagtgtcttgtgtgtgagccagccctgtaaatttctgtagcagtgcagaccaaagtagagcttcatgcctgaagaagatagagagttctttaggagcattttgagttgcacatggatatgaactgaggggtgtagagagcccaaggcgggagagggtctgaggcaagatgggcaaacatctgtctacagtaggagaaatgcttacttatggctccctaggatcatttccatgtcatactaagcaccgcatggtttgtctcccactctccaaatacatctgcaggtattctagaggggtttgatcctcctcacccgtgtggtgtgcaaggctgcccggctggttatgaatgtaaggactggatcggccccaatgacgggatcacccagtttgacaacatcctttttgccgtgctgactgtcttccaatgcatcactatggaagggtggaccactgtgctgtacaatgtgagtgagctgatggatgtggtgtggaggatggcgtgggattctggtgtcgttttggtccctctggaacaggaaagactggggaaatgttgggattgtccggactcaactttagaacttagaagagcctaacaggtcactctcccacaccccaacccctttggatttttactgagtggaaatacgtaactgtcttattgcaattggtagattgtattcccttattctgtcaatgggtgaatgaacaagttaaatcagatcgccttgttgtggaaagttttggatttacaaggtaatggggcacagtgaggtgttccaataagtgtaaaggtctcagttactgtccccaaagggctcaccgtcagattggaaagctgttatagtggttttcaaccccagtggcccattagagtcagctgggagctttaaaaattatactgcctgggcttcactccaggccaattaagtaggaatgtctagaggtaaaggcctgtcattgacattttttaaagcttcctagctgattttaatatgcagccactgtcaagaactactgcattacatgcccagagaaagcatggttaattgtgagactcattaaaatgcttctctggaaatccaagttcctaggttcctgcccgggagattctgactttgggtagctgtgcataattggtgagctgcactttcagggaacccttggtgattcatgtggtcaggtttgtctgagttggtatatgagacaaagctgaccagccacctgacagagatgctagagattccagcacggaaacagaagttagacaaagtgactgtgcctcttctgccttccagaggctggttgtcataagtctcccaaggcatggtgtagagtccaagttcaatcatgagcactgggatgtgcatgggatgtgaggggggcagagtgagcagagcaactggggaagatgcttgggaaggtttatatcctctgtgcctttgccttcagtcatttggaggcatgatgcgacttatatatactccctttacctggctttaactcaagatgcttacctttttcttctgttcttctctctctctctcatcacatatgtacaaagctaattaagtaagtgcagtgtgacttacatagaaagcagcctttgagaggaaaatccatgtcttaggaagagattcaaccaaacccgatgcccagagaacaaggattatatgaagcctaaatgtgtaggtacttagcaactgactgagtattgcagtcagcccccttaggtcccaatatatggctgctaccagttgtggttgcaaaatattttatggcttgttaggatattgctggtaagtgattaggcctagtttggcagtacctataccaaacttctatagtcaattttatgtttgtcactataccctgactttacaggacaactacttctatagcatttgcactttattgggcattttaagtatcagataggtgatttaaagcaatgggaagttggatacagttatatgcaaatactgtactatgtatgggagtggagaaacctcagattttggaatctatggaaggtctggacacctatgttctacagatgccagggaatgactaaactagtctggatctattcccatacaggatgagtaaggtggaactgagaaatttagtaggcaagatttacaggctgttgtgctaacattcctgggttaggatagggtaggatagaggtttcccacaccaggtgatgctcagcaagccctggatactgtgattcaggaccccctggcgacactctggaattcttattagctatgggaggcagcagggaggaggaggcaaacatggtgagggcatagtcacttcctatctgagatgtcaaggttgtcttgaggcaatctcaccaagactagccaagggaccttaagaaattatcgtgctggccctgcagtggctggtgtcacttgtagagctttgaaagtgatgaacttcaattagatgtgtagactcacctaagtgatgtgataaatgcatggaaagcctacaaggagaagtgttgcatttgaggatctaagtgcgatctgccattcctccgaccagggatcagctgggactgagatgcgccagagtggagcagatgagctgctcatcactcccgcactggtcctcttggagatcattacttatttctacaactattgactttgtagatattctgtatcaagcactatgcagaaacactagcaagatggcactggggcggggaaggggtgcgatccctactggcatggttctctctttaaattcccatctctcctgttgtctgtcagttgtagcaatagagcctacacaaagcaactgtgatctagctcttgcccggagttttgctccatgaagcaagcagggagggaaagaggtcaatgacagatcctctgaaacctttcatcacagcagttcctagggccacagactcacacctctctctgaagtccaacctgttagtcattgaactgaagcctcctgctggccttgatggttggatccaggcatagaagaactggctgagcaataaggttgattcctccaaaatatctggctacaaataggcaaaaagaactcttgtgtactctgaaaaaaagcagtggcatggggcatggggccaggtatcactggcagaggtgacagtcctactgaggtgaatagctgcctcttgattcaggagaaatcaaataaaaatggcactcaattttcagtaagtggaacaaagacaaagtctgtattttttttttttagagagccatcaaaactggtcttagttgggcaaggacctaattgaagcaagacccaataggggctgtgcagaggaactgggtacaccttgctgacttaagcctcctgtcactgcagagatgtgctccatcagactgactctttggaccacaggaaatagggctggctatggtaaaatcctatcataaaggctctctatttgttgaaatttaactattcatctttgaaagaaaagaggattggggaaaggggagaaaataacagtggagatggtgtagacaaacagacctgccaatcctttctgtgtgtttgttctccctgacagctctattgtcagggttacatgcagacaagcacctagaatttgtttgtgtttttttgtttgtttgttttttaaatctttgaaaaccagtgatgttcttggggtttattgtggattattctgggaggtgcgtgagtgcggagttgcttaagagcatgggttactcaaggaagctatgccactgaaaatcacactccagcatggatgctacatacttgaagctccctggccaacttacagacagcatggtgggctagacagtgtcccctccctagcagttattaatgatcttagactctatgatgacaaaatttatatgtgcaaacatgatatttataaagcatggacttaagtatgaacaacaaatcaacttaatatcatgaatacaagtatgtatgtctggatattttatacaggatttactacctccagtaaaacacagacattaggatgtagacttcccttctgtattagtcagggttttgaccagaactgatgggatgaatatttatgaaggagtttattaggatggcttacaggctaatccaacaatggctgtttacccatgtaaagtgcaagaatccaatagttgtttagtccaccaggctgaatatctcagttggtcgttagtatactctggaatgccaaagaagtaggctttaatgtcagtgaagggatggatttgccagcaagagcttgggtaagcaggcaaagagcaaaccatttctttttctatgccctttattatataatctgcccccagaatgtatagatcttcctacctctaaaaatctggattaaaggtggccctttctgcatcagatgatttagttaagaaaaataccccacaagtatacccagctgcttgggttttagttaatttcatgtgtagccaagttgacaaccaagaagagctatcacatcttctgccacttcttgttctgtgatggcccagtccacctaactgatatgtttcatcaggcagagcatgaaaagaagagagctactctctaccattctattgtcccttctttttaatgatacaacaactatacaagactaattggccactcagacgagaaagagagtcttagttatgggtgttacatactccaaaagaaaaagaaaaagaaaaagaaaaagaaaaagaaaaagaaaaagaaaagaaaaagaaaaaaagaagctctcaggcatgaaggttcatcttgaccatttttcccctaaaatgttatcctagttttctctctattgctgttacaaacatcatgagaaaaatcatgtcacatagggaaaggatttatttgtctcatacttctaggtcacagtccattattgagaaaggttggcgtagtaagtaaactcaagcaggaacctaaagtagaagctacttgcaggcttacctacagacctatgctggggtagctttcctatatagcagagaaccatcttcccagggaatggtgctgcccattgtggacttggcacttatacagtaattaataatcaagacaacacccacagacatgcctacaggctaacctgatctaagcaatccttctattgagattcccatctcagatgactctgggaagtgtcaagatgatgactaaagccaaccaggacaaaagcaaaggtttttgttccctgtttgctgtacagacactttataggtgtctttggtgactttggtgacactctgccattgactacccttacattcgtttgtgtttggcttctctcatcattttataccataagggaattagtcagggttccattgccagggctacatggactttcctcaggcttactttagtctctaccaaaatttcaattctgcttggtcaaattccagctgtattcttggcttcccttcctcctgtggtagaaagaatacaaagcagttcaattctgctggctgcttctacctgtttggactacagctcccaaaggtctcctcaactcacaaactctccctggcacttagtaatttaattaattttatttaccccaaacctgatagttgttccttttcatggcagcaagtcctttccttgaacagtgcagttcacttagcaaatgtgtctttggcttaagtattaaacctttaatcctcttcatgaggactagatgtagccaagagaatcaactctttcctgattctgacccgagtttccactcacttttgttattcttgttttatgctgtctgctgattttattagctgttttcatgtttttagaacataatattctgattgccaagcttcccaggtccctatctgcaattatttgggtctctgctattaatgttcaggttttctgtctgcctgcctgttttacatgtctgtagctggtgttatttcttttctcacttattattgatgcagatgtggatgtagaaaatcctagagccttgctgctttcccagatgtatagtttgcctgtctctgcatggagtgctcccagccgctgttgtggaagatgtctttgaaggcttttggcaaaagaggcaacttagagtctgggtgcttcctgagagccaccttcactgctcagaaagcctttggtttatgcgggtggctctctttttatcctgccttctagctatacagttaatactagttaaattcgataacatgtgtttactttctgcctcattgagattttgctcaggtgtgtgatatgcaagcatgttgaaagaatcccaccgtatcccagcgctagtgaaaaaaaaataccattttctttttggagtaattctgttgttgtggtatctacagaagacaccacaggttgaaggatgagagcctaggggacgtgtctaatctttgcctcagtcatccatcctgtattgcttcctcccacatgctttgatgataggaggacatctgtcaaagctcgtttgacagatgagtggcaggagtcctgatcttctcacggagctagaataatgaggtaccccatctgatctagcagctgacctaggtaacatctggggggcacttctagctagtctcactcttgctctggaactgacagtttgtcttcacatctcccatctgccatctctacctctctgtttctgtgtaagagcctgccatccaggtgaagcctggattctgatacctgtgtgtgttcacctgtgactcatctgattaatggagagattgataagtggatcttgcgggcaagtctgccccctttcccatgaaggctacagggcaaggtgtgcttagcaaggagctataacttccccctcattactcccaagtacctggaagcacgtattttttcaagttctccaaggagagaaaagagattaggagatattgcttctagaactcacagtaaatatttttctctcttctgtctactctcataggtatttatagacacattaacttattaatttatttagtatttgttatatgccaggactattgtagatgttggggatatagcagagcccctacatttgtggaatttccatcttaaggacataagtttgggatagatagcaaacgtggaatatatcagatagagatagatgttgtggagaaaattttaagtggagaactggtaaaggttcacttttacatgaagctctcagcaggactattcagagaagatggcatctgagcaaggccttgaagctggtaaaggaatgagctaagtggttttctttcttggttttctatgtcccatgtagctgggataacattgcaaggacctagagatgtgccagttacatttacagaatagcacagaggctagcatattggagtacagcgagtgacaggtaaagccaggaggaggatgcggatcacatggacctggtgactattgcttttttttttcttttcacatcagtgggataaaaagcaatagggcaggggtggaggacagaagtgacacgacctaggttgcatctaaagatccagattgcttgctaagaacagactctaaaggagcaagtctggaagtaggaagacaagttaggacatcagtgaaatggtctaaggcagcatgacgggaactccacccagggaggcaacactgtaagagctaaatggtgggtggttctaggtgtgtagttggctagtttcaagaatgagagaaagcagaacactggagttatcacttggggtagttaatagtttgaataaagattaagaattgagtttgggcgagttaaactttccatggttatttgatgtggtagtatggtcatgacattgaataaatggctttggtgtggaagcttattcaggaaatatcctttgggacgttttcagtgtatggatggcagttgaagttatgagaccataaaggaagtgagtatagaatggaggccaggggagattctaggcctgagttccaaaggtaaagtgttggggaaaaagtcaccagcaaaagtgactgagaaggagcggtaagaaagtgggtgtcccgaggccaatggaataggatgctttgaggagaaggaaggagaggaggggaaagtcaagaagggaacacatcccccctgaagtgccaacatcacacaaagcagactctcttctgtattcctttgctaatagtttcttggagatttattcattatatctttaactcacattcgtattttctctttcaaaaatgctttcctcatttaagtcaaatgtttctagtgggtcaaataggatgctggtgggaaatgcgccatcttaaggcaggaacagttaagggactgtgaagaggttaaacgagaaggcctggcacagtggcagatgaagtgctcgaggaccatacaagttctcttccaattccttcttttgttcttggggaagtaggaaatgagatcatcagctgagggagggaggaggaagaaggaagatgttggagggttgcagagaagatagaagccagctttctaaatgtcggagtggtaaacggggtaggaaaatggtgttggttctgtgcagcactgaagaaccccttggtgtgagtggctatgaagtccacaggagaccagtgagcggcacagagtgctttcaggagcttagccacttcgcagctaacagtggtagataaaggtctggctttttccaaagcaattttgccccatgagctcactcagggagagagggctgggagagtgtttgtagcttggcagtggcatctgagctaggtaaagagaaaagagctagggggtagagtaaaaatggccctttatgaagcccagtgaaaatgtgcagggcaaattcagtctgtggagtaacctacctgttttattattttggaagtagcaagttggttttgaagctgagcgttctgattcatacgtggggggaggggaggtgtcttcaccctgctctcaggagagtgaatatatggtatactgcatgagtacactgaggtcatgactgtagtcaccctacacagcctctaagccagtgcttctcaacctgtgggtcgcaacccctttggttacctaagcccatcagaaaacacagatctttacaccattatttataacagtagcaaaatgacagttgcaaagtagcaaccattttatggttgggaggcaccacaacagagggaactgtgttaaagggtcacagcattaggaaagtggagagcccctgctaagcccttgatgactcaaccccagagagcctgaatcctactgtcactgaagtccaaatgttttcttgagaacatttagtgactgaaagccctcaggcccagctagctgtctcactagcactatgtgcctaaatctaatttcctcccccaattgattttttaaattaaattaacttatttttgagtgcaggggctggtgcatgtgtaaacatggatatggggtcagatgttgacactgggtgtcgtcctcagttgtcccctaacttcgttttgagacagggtctctcactatacacagagctcatgcatttagttggggtttccttctgtctctacctctccagtgctgacatgatagactcatgctgccacaccccgcttttacacttatgctgggtatcaaactccggttctcatgctcccacagcaagcatgttacagaatgaacaatctttccagcctctggatttagtttttaaattagcacacaaagtaacaggtttctttatggcatttccacacttaattaggttgtctaataccctctccccttctgtcctctcccctctactccctcccttccccttctcttctcttccctttcttttctttctccctccccttccctctgtcccctcctctcccccttccttttccatcctcccccttccccttttttcccctcacccttcctctctcctctcctctcttttcctctcttctcctctcttctccttttttctcctctcctctacttttctctatcttcaccttttctctaccatatggctcctataccactcctggacatatgcctaaaggactcataaagatatttacacatctatatttactcctgctctgttcacagaggcaaggagatagaatcagccgggatgtccatcaaaaaaaaaaaacccaaaaaacaaaaaaacaaaacaaaacaaaaaaaccaaatgaatggataataaaaatgtggtccatgcacacaatggaattttatccatctgtaaagaaaagaaaaatgacatcataaaacgtgtaggaaaacatgtaggtagaactgagaaatgtgctattaagtgagctagctcagacttagaaagacaaatgtgttctttctcatatatggctcctagcttcttatctttgtatgtgtgtgtttgtgtgtgtgtaagggcaagagctaagaaggtagagggacctatgagaggggaaacggtgaggctttaaggaagggacggagggagggagggaaagttagaaaacaatgcctgtgattttgaagttgaaggacagctactgggggggaggagggggctaggaggtggtgcagatgattttaactgttgtgtgaagcactgcgccagcctgtttctaggttagtcacatgtcctctttggaagtcctgctatgcaccctgctggaatcacggacctgtagcatcccattcttgggttccttgtatggaaaggaacaggttttcgccctcatatgtgtcacattcccattcatagctgtctctgccttgaaatcattcctacgctctgcagatccatcttgatttcttaataatttgtcaaactagggatgccatcatgtttgggatccgctccaaatgcaccgcttgcctcctgaaccggtgcctgcatttcacaccatgcaccaggctggtctcccagtcttttgtctgcacagggccattaggctggctatgggttgctttgcctgcttttagcccacttaatacacagtttaatttccgatccacgcctcgggtgcctgatgcgtcacacagcctcaggctatgatctctctgttcagagacaatactgagctttaggtgatctgtccctggggtttcggggacagaaattaactagaggtggcgagtggtgactcaacagccatttcaggtacttttcactgaatcaccctggagccaaatgcttccagaatcccagccaggcagggatggcaccgtgacaactcttggcccactgggaaagccaagaggtctctaatttttttttctcaattgatcattcactggggaaaaagaaaaaataagtattgagcaatgcttttcagggcccatcctactgtggcccatcttaaagtcatccaggaactacctctgcaattttcagtcactgggacctgccctgacctaatatgacatcatccccagaggtagaaggaaggagtccattttaataagctccctcaggattctaagattgtgccctgaagtttggagaaccgctgttccacatgactgtaattgccaagcactgggcaaagagacacagcctggagagtgggagagggctgaaggggagacactctgcctccagcctgtgcttcccaccaggtgggtttccatgactccgtgcattgtccactgtctgtctgttatacagtgattgacaaagagtggcctctgattttaatttagggacttgagtcccaatgggaaggcaagtcatgtgaagggaaatacacaaatccatataaccataagacaaaggaaatatcacaagtggctgggagagagatgctcagggctctctgggaggaccaatgggtgtggctgacctaaaaggagcttctgaaaagcctgtatagacttggcctatttagtgtgagggccagggaacaaggagatctagtgatagtgagttgtactgtatggcaaaggtgacagagctcttggtgttccatgggggaacattgtttttctaagaggcactgggatgctagtttatattcttaatgttttaaagggataacttgaaaactgatatcacgaggttggtagttgtgtgtggaaggtctggaagtactaactttctttcacctaccatctccttgatttctctgtaattcttgtatactgacaacagtatgtggagtttgctggtttgagcctcctcaattttacatgttacagctagacatcagttttgttctcagttccagccagtgtaccttgttttccccctgatttcatttcagcctctttcaaagaggaggtagggttagactggaacgtcttttttctcaggttctaaggattcccccttagctgctggagaagagttttgaagggttcctgagaacctctcaccgttgtctagccaccaaataaaacgggatgttctacactcaaagaggcagggaactgaattaactccaaggaaaggaattttatgaaaaagaccattgagaacagttcagctgaacatcagtataggaatatgtctgatgctctgggaatgcacagtagtcaagagaaagaaaagaagccataattataaacatggccagagaggacctagaaggccttctatctttcctccccttcagctgtacttgggttctgtttactttgaaatgaaagactgaggcaggaacctttcatacttgtgttaagtggtcttcatcagccagaacagaccagactaatctccacagcctctggggttggagagaagatggtttatttttctgtcccctgtggcactatccttatctctttgtttcccttcctcccccttcctgccccccccccccaattatcaccaagatactggtccttgctctagaccagggacttacccactgagatccatgagcaatcttgattagcatctttaaaattccttttaaatcattttagtgtgtattaattgtacaaagaagtgatttccatcatggtgtttcctacacgtacataatacattttcatattttgtctttgttttgaatttttttcttcttgagaacgtcacacgagtaaacagaagaatatgatcatatatggttcttacttcacctcttcagcccctcctcatgtcccttttagggtatgaaaatcttatcagtagccacatccccagaaaagaatgatgttccctctcctagaaagcatcagttgccaacctctcctagagctgccaaaagctcttaagtaagaagtggagcctggatatcatctaccctctctgtgccagaattttgtctggcttgttgtcataagggtcttgtttaggtaatcacagttgctgggaggttgtgagtgtgatagccatgtcgaatccagaagatagcatttcaaggtatgtctccctagcctttgactctcaccttctttctggctccctttccaagacattccctgagccttggtggaggggaaacaggactagcaggctttctattggagtcttgtttaggaatcagtgctcagtcttttgtttgtagtactctgaccagttgtaaggccccctattgacacatccttgaatcaaggcccattgatcatacgttctaccaaaaaattctacagggaaggagaaaaggacatcctattttaggggttatatctcaggcttcctgaattctaaaatctttgactatggacaacaacactgtagaactgaggaaatgtaaaattaaggaaaaaaaatctaatttgaaaagttgcacatgatctgtgtgcttgagaccacatgtcacatttagaggccacctgtggtgagctggcttaatttgcttttggttcagactatggagtaaaagctgcctcggccatcagctctgcatccctttgaactttgtggaaatgtgctgttgattcagaaagcttttgatctgtattagctcatcgttcttaaaaaacaaaacaaaacaaaaaaccaaacttaaacttgtgtgcttacctaaagaggtgtgagtgatcccaccattaatattctacatgattcaagattttatttcaatactgtgaagcaaaataaaatacaggaatcaagagggtgccaaggctgattcaagactgcagtgttttttttctgtcacccctgcttctagttttcatcttcccataaacaacctccattttttaaagtgatattaaacaaatatctacacgatgggtccattttgtgaaatgcatataatgcatttatccctaagatgttcacctttgtgagttttatgtattgctattatgacgatgatcttgttagaaatgatgtccgatactaaaggtggaatgacagatgggccctggtcccacctccgctcccttatgacttgggaggctgctaaaagttgtgcttttgtctccttatctatgaagtgagaatcatcttgatcctccccgaatagagttgtgtgatgattaagtgagataatatggatattgctttttacacatcctgactcataataacaccatagcctctgatattattaaatatttttttaaaaacaccatgtagagtagacaagcaaacatttctttccacagcctacttttcacatttcctgatcctcacaggctcttcctgtctctgagtcttgccacttcataccttccatttgcattacctgccagccttgcttcccctttctttgcattcctgagatgctggatttccttgcaaagctctggggtacttcctccactgagtgtttactggctgtgggttgggaggtcagaaagagatctttcctctaagctcttctctcagatctgaaggccagtggcctgcatctggtactttcctggaactgccatatttactcgtcatcttttaggtatctgtgtccccctccctgtgtaaatgctctgccttccagcatcagcacctcaccctaggcatggcttaatggtaagcatccactgatgagcactgtagactcatccaaggcatacctgtgcagcctggctctgtgttcagacaggtcagccccaccaggatggagatgcatcagcactccactgctctctgtcctcacaccagctcagctccctcctgtggctggtaaaagggaaaaaaatatccggagaaaagtaggggaaaggtaatttgttttagtgtttacagagggcttgtgtataattagcagttcatttctgtaacacagttggcctccttggctcggaacctggctcttaaatactcttaaagggatctatacctaggaaggaaaaaagagggtgccctaggcctggtaatgacatgtgatcaaaagcaacccttcagttgaatatttctcgtttctcccctacccttccttactctcccattctctccatgcacccccttcccttctcattccctcctcctcctccccttccccttccccttctcttcttcctcttccatactcttcctcttgacttggaccatttaccagttccattttcacatatgctcacattggcttgggatgctgtggacacgattgctgcttgctgcctgccttcctgtcatgagccccatgaagaccagccaaatattcactctctctttctaagtatcaaatagatgaatacacaaatgtgcacctgtcttttcattatactatgggggcaatatgcctgctgttctaccctagagcaattttacggcaattatgtgagatataccatacaaatgtacttaccaaaacgaattcatctatcaatatgtgaatgctctttgcatgactttttactcatgtgccaggcacaagctggtttgctgagtgagtagattttttttttcttttctctaccttattcaagaaaggcatttcgttagatcaggggcaaacacaacaaaccctcttcctattttctgttccccactgtgttggccaagtctctggtccgtgtctgaagtgctctcttgccctgggcttctgctggggaatacagtttgttcctcatattatccacgtatggaaaacaacaacaacagcaacaacaacaacccacttctggtgtaaaaatggctccagaatgcatgctagagtcttcactagttcttgcaacttgcatgtgctctgagtagctgggggcacagtgaccctgcagctgcttccggtctccagtgctttaggactctttcctgtcaatagctgctgaggcagatttgggttcccgtgcagcagtgtccctggggagctctgttgagcctgtgatgagatctttacaagcctgacagactgagaaaagagtggctacatagatgttcacaaaattacatttgttcaacatgaagttgaattaaagaaattcttttgacattgaaatcatgttttgacatgataaaaaccaaaaaaaaaagaaaaaaagaaaaacaaacaaacaaacaaaacaaaacaaaaaaccaatctaacctgtggtcatcccagtttcttccaattttttaacaattctttgatctttgaaaactaaaaataaatattttgctaacacaaattatgttcctatggtaaatcaatatgatctatttatgtaattataccaatataaataattaacttgtaaatgaatatagctattagctgcttgatacccacggtttcttttctgttctaatgacactgaaggttttgtgtgtatgtgtgtgtgtgtgtgtgtgtgtgtgttttgaggtctaatagtcacttctatgacttgtcaccaaatgagtatcttagggaactgatatggctgagctgactggtgaattcattaaggaatgtggtaatgttaggcattgagctacactgagcacatccatgttggctcccaggttttatttctttaccatttctgtctcctttgatgactttaggcaagccatttgacctgtaatagtcattttcctctactgtgagtttgactatagattcagtacttagttctcaaagtggctttcagtaactagataaaaatatggaggagctctttgtgaaccagataatgctccatggatgtaagctgtcatgaaaataacataagattataagcatacgtgttaatctctattattgagatttataaagaagatgttccacacattatcttctaacatgttttgacagatatggtcagagaggtcccttggaaataaaggtaaaatgtatacccagaatattattagtatcattctcctttctttgtgtacaaaaccttaaaatatcatgaccttttttgatcatttcattgataatataaaacaaagctgcaatagaatagttttataaaaaacacgtttctcagtgattagagacaaaagtaagtgtagtagcttgggttccttcccatgggactccatgtacatctgaatgatcatggtatgtaccccacatgcctttgagggtatctcttctatcatcagagctatcatcagcttccttaacaatatggaagcaaaggcagaattaaaagggcatgaggcatgctacacctcttgtgtgcacaggttcaagacattgatagtacatgtcccccgaaaatgaaccatgctggaagagtcagttaggttgctgtatctgtcgacagcttccctttccctttctctgtgtttccattctggcttctgtcatcttctttcctctctagttgacaggctggttgtccttatcagatggctttgggatggtaggacagccccctaggagtgtgctccagggtcaagctatgaaggaacagcagcaagatatccatgattagatcactgtgatactctctttgcggagagtttttatggttcccagcacttcaaatcccattgcctaaatgtcagtagtctggtgacacagcctatagcccttgctattctatagagatgttactatgagcaccccaacccccattgcatcatatgtccaggaaaggttgccacagagcttaattgctggtgtttatttagtctacgtgtgcttgagtgtgacagagtgagagaggggtacagacctgtcttttgtacccatgttatttattgcatttttgtcttacgacttccatttagagctaacgaagctgcaaagtaggttatttaagctgaatctcgggtgggtgctgttagcaagtggagaagtgggtggcaaagagagagaaagatgggagaccgagctgaagagattcacacagtgtggtgctttgtcctgcagtactgcaggtcataggcatgctgcagcttgcagctatgagcctctttgtccaagggtaaagactttgtctcaggcacttggaaagaagcctcctgcaggcaggtacacacacgcacacgcacacgcacacgcacacacacacacacacacatacacacacacacatacatacacacacacatacacacacacacacacacacacacatacacacacacatacacacacatacacacacacacacacacacacacacacacacacacacacactagtgtagcactgaaaatcatatgcaacctgaagtgagtgggttttttctcttttctgggaaggaggctccttatttaattaacttcctgcctttcactgcagcatgcaccactacctgttctgatcccatgtgcctgataaagggcagatggaagaggaggaagaatgatgcctttaggtcacagcattgtcacctgtccaaatgccatttcaagagtcttctcttgaaggagtggtcgtcatctcctgcacacagctcaatgtgtgtttgtgcagatgtgcatgtgtacctgtctgtgctcagattctctgtgtgcgtgtgcatgtgggtagcccgttgtcctttctgaaggttttagttgatcgaaaccattcatcagtcgtcttttggttgggtttaatgaagggtctttcatgagcaccagaagtcctgtataggattcccaatacagagctagatgaagtagaaagggagaggataacaaccgaggaagtagaagctcccgattttgtatatgctgggacagtgaatcagtgacatgtgtctgaggttgcgctgtccttggggtagggacctaagtcctcaagaccaaagaaggaggaagactcaggaagaatgacaagtaagaatatagggatagagggccaagggcaggcaggactcctgtggctctctctactcttgtaacaaaggagcagcctggggttgtaaatcatctacgtctcatactcctccttaattaaattcctgttgtaattgggaagagtttccatattctctacagctatggccacctatctctttcattagacccacccagtatttatagcctccttgagatttggaccctctgtggctttacagttgggggtctatacagtagtgaatgggcagttggttttagaggagacaagggagtatgctgtgttttgccaatggtattttgttttccagggctgcagttgtgactctctcagtgggcgaacattccgtctccatcagatatctatgggcctcttttatctcctttcttctcttctcccaggacaaaacatgtacctgagatctctataaacatcagactagaaaaaaatatgagcgataaaagacagaaaaactagagacaggtatgcctaatctattcatctgatacctactgtgtgtatatagtcttgagggtgactttgattagtctttattttataaaccaagtgatccaggtctgttcaaggttttatagctactcagatggagagttttgccttgttgaactagatagccccgtttctttcaattcctccctgcttccatgagttagaacagaattggaaaaagtaggtgatttgaagaggtcagattaatttatgtaccacataccagagtgcttactttgtgactcctgggcctattagctatgggaaggcagaagctcctggtcttgaggagagaagcatgacttgtgttctgtgcctgtcttatcttagtactttgttgcaggtctttgagcatatggaccaagcacaatttgtgttctgtggctgtcttagtactgtgttgaaggcctttaagcatatggaccaagtactgcagggcataaagacagccatgaaatatctttctggagtagtcaggagagactttatggagaaaccttttctaccttcaaagaggtagaaagatcctggttagacagcaatattgttgaagtgttgttggtgaagtgcccaggttatttctaagagacacaagcttatagtagatttcctggttctatggctcttagagtctttctgccccctcttccaccatttttctttgaaccttgggtataggagttatactaaaaatatccattatggtcaggcacccctttgtagttgtactctgcatgttgaccagatttggttttctgtaacagtctctgcttgttgcaaagcaaagtttctttggtgagagttggaagctatacctatctatgggtataagggtaagtatttagaatgtatctgtgaattacagtttactagagtggtaataataagttctcctcttaagatttatgaacacattggtcttgggtagttggctaggtttccagttccaggtatgttttcttacttgctgagaggctaagtcaatgagacagctgttggttaccaccaagacatgagtgccaccattgcacttttagggatagcttgtcatgctggtcattgtagttcatagtcttcacaactgagtaggattattggttgcttctttcctttggtagcttgcatagcacctctgttactatgagaacaagtcctgtgggaggagattttcagttagcttagatcctctgaatcccatgtgtcagaagtgcatggtgtcttcagcggtaggaacttaccttcagtctctgggaggcaataaaaacattgaatgctaatgttaaaggagaaaataaagtcctagagaaagacctataggtaactggagggaggacctctcagatggaggaccaacaatgcaggaacctcaagtagttgtctgagtagtttttggaatggctagaaagacaaggaggctggaggactccaagagacaaaaggagagagggagacagtgggttagagaagagagagctagctcagaccattgtgaggagtttgcatttttgtctttagtgttgaggggagagcagttataaaatccatcatgtgctgaagcttcactctactcgctacatggagagtgcctttggtgaggcacagaaagaagaagaaggcagtgggagaagtaatggaatccgaatggttgtgtaggtggaagagctaagcagatctttacataaggtctgtatagaaggtggtactggggctagagagttggctcaatagttaagagcactgaccactcttccagaggtcctgagttcaattcccagcaaacacatggtggctcacaaccatctgcaatggaatctcatgccctcttctggtgggtctgaagacagctacagtgcactcatgtacataaaataaatagatcttaaaagaagaagtaggaagaggaggagggagaggaggaggtcctggcagctttctattgggtggaaggtgagatagaagagaagggaggatttaaagctcctcagctacattaacatagcacaacaacggtgtctttctctgaagtggaggaactcaaagacaggactgcttgcaggtcaaggctaagaatttgtttggagagaaagttagaaatgcccagtaaccccttacagtcatttgattaaggtacaggagggatatgtgggtctgaggctgagttagaacttgaagtagacatttgagactattcagtttatttatgacagtagagccatgagctcagctgggattctttgaagagaaggtatagataaattgaggaccaagaggctgagctctgatagctacagcattttgttgacaccgttagcaggcctcttagcagaccaggctctaggatcacttttgtggacatgacagagactgatttatcagacattgagccaggtacaggtttgtaacaaagtggtgtggagggagagtctaagtcaatctggtcttggttctttcgttctccataaaattacatagcctctcaaagtgatttttgttggtttgtatgtgtatccatgtgtgtttgtacatacttgcttgtatgtgtacatgcatgtagaactacattgaatatctccctcaatcactctttgacttttatttgaggtgagatctcactatgtattcctggtagcttgaactctctatgtagaccaggctaaccttgaactggtagactttcacctgcttctgtctcttgagcactgagattaaaattatataccgccgtgtctggctcaccaacatatttttcaagacagatgagattcattcagagttctctgggcctgctagatcgctggccagcaagccccagggatcttcctgtctatgcctcctcagcactgggatcaagctgatggtttttaaagctggattcctttcctgctctgagtcattgactctttattacacagtactgagagtatctgcatcatgtatccactcaccactgttcagatctgtaactcactattagacctgtagatatttagttttaagatgacaatgttgtcatctgtttttgtcctgcaccttgcccattaggaatttcttttggcccttccttgagatttacctggaaatcccacacctgttctgatcttcagtggtctaggctaccacagtctctttcctgagttaacgcagtatctccctgattgcacaccacctcacttcagagtgtccccttcgggtgcatgtcagagcatgctacttctgtcccctgaaccctttgatggaggcttgtctggatgcgcaaaagacaacactctgaaagtatctacaggttcctaaaaaccttnnnnnnnnnnnnnnnnnnnnaaatgcccagtaaccccttacagtcatttgattaaggtacaggagggatatgtgggtctgaggctgagttagaacttgaagtagacatttgagactattcagtttatttatgacagtagagccatgagctcagctgggattctttgaagagaaggtatagataaattgaggaccaagaggctgagctctgatagctacagcattttgttgacaccgttagcaggcctcttagcagaccaggctctaggatcacttttgtggacatgacagagactgatttatcagacattgagccaggtacaggtttgtaacaaagtggtgtggagggagagtctaagtcaatctggtcttggttctttcgttctccataaaattacatagcctctcaaagtgatttttgttggtttgtatgtgtatccatgtgtgtttgtacatacttgcttgtatgtgtacatgcatgtagaactacattgaatatctccctcaatcactctttgacttttatttgaggtgagatctcactatgtattcctggtagcttgaactctctatgtagaccaggctaaccttgaactggtagactttcacctgcttctgtctcttgagcactgagattaaaattatatactgccgtgtctggttcaccaacatatttttcaagaacagatgagattcattccagcagttctctgggcctgctagatcgctggccagcaagccccaggggatcttcctgtctatgcctcctcagcactgggatcaagctgatggtttttaaagctggattctttttacctttataactattctgttcattcaccaaatattgattggaggcctggctgtactaggcattgttcctatgcatttcgtgcttttccaaacccatgactcctcctaattcctttcctgctctgagtcattgactctttattacacagtactgagagtatctgcatcatgtatccactcaccactgttcagatctgtaactcactattagacctgtagatatttagttttaagatgacaatgttgtcatctgtttttgtcctgcaccttgcccattaggaatttcttttggcccttccttgagacttacctggaaatcccacacctgttctgatcttcagtggtctaggccaccacagtctctttcctgagttaacacagtatctccctgattgcacaccacctcacttcagagtgtcccgaagatcctggtgcatgtcagagcatgctacttctgtcccctgaaccctttgatggaggcttgtctggatgcgcaaaagacaacactcttgaaagtatctacaggctcctaaaaaccttctagcccatcctctctcattttgttcatctgctctaggcacagtggcctcgttactatagaagacagtaggatttctcctgccctttgaacattgctgggatgtttttccctactatggctagctcactttctccctttgagtcttaaacttgaagtcttccctaaccttactgtatataaagtggatctctttctgtatactttatttttctccagaaagcttaactctatgacagtatatgctttctcctttgattttctttataggctaagccatcccactaactgtaagccttttgaggacagggcttttgtctcatgtactgggcaagtggtttccgttagaaatatcaaggtaattgtttagtaaacatttgctgcatagactaatgacagaacaggaattggtgggctctgttagttattgttatctttgcaccaggctgtctggtgatcagcgaggtacatttatgcaatattgagatgccattagggactggatctgcctctcagagcagtgtttcaattctaggaagccatctagattgggcctacacattaggtgtctttagtatcattaggcaaactgatcaccttggatttggggttctatgactccacaatgggctcttttgaggccatgaacaaaatcaacaaccatttgttaaacatccacagttaaagcatgaaattaacctccttagcagggggatgcgtgtcgggatcaggattctcaagggagccctcctgaggcttcatttaggcttagccctggtgctgtggcaagcctcaaacacttgtacatacggtttgaatctaagcgaacttaaaaccaggaagaaacacttacaagcctcaagaagatagcgaggtctcacttagctccttgggggtgtttagtattctggaaagagcaggttgagggattccagcaaatgcttactgcatccatttgagatgcaaggcgctgttctgataggctacgggcacattttctcaacaacttagggaactggatccttgctttcccacttcacagctgagaaaagaaaggcgtttgctctcagagtctgtgcccttctttattgtgctacaattatctcaaaatgagtgtcattaaaagggctttaggggaagtagaaaagttatttaatatgcttatgtgttacacttggatttgtggagagtcgctgcgcatgaagacaggatttttttttttaagtaagccctgcatgtgcaagcactgcaattagtatttccaggagagaccagtctcccactgctgtgcttccttactggcttcattcgtgacactttcctcataagagagaatgctaaagcaggcctgtctttttgatggagatcccaagggttgtgggagtggtcaggagctatttagcacttctcacctctgatcctctgtactgaagaattctggattgcccaggaatgagtttggttatagaggagccagcttcctgctatctccctcttcttgctattgcctgtgtcctgtgtcctgtgtcatgtgtcttgtgtcctgtgtcctgtgtccctgtgtcctgcaatgtatctggctcaccagcaggtaccagggggaggggaggtcagcttttgcttcagcttagtagcagaagagaaacaatgtggaggtggaactgggtgatcgccctcccactaactgccagtaactctctgctctcctctgaggaggaaagagttgggcagttttctctcctgaaaacactcttgaagaaaggtgtcaagcttggatcaggatgtctggactcatcctgacttaaaaggaaggcccttatgacttccatgaatgaggctcaattgtctactttcaagttcccttgtattctggggccttgtgccaccctctggaaagtctacagacagtgttcttcatggaaaggctcctgttcagaatcatgtagaaatggggccggggttagctgtgtgttttcttggtatcagattggccactaagaagtaggaggaggcggtgtggttggaccagtccctgggggaagtgtctacatcaggcctcaattctctgcagagtgccaggccttactctcatgtaattaggcttttaatgccactttctattgacaagggtgagcagctgccaagtcacttcagatgacattgggttgcctgtcatgattcctgtgggactgcggaagaactgtgcttcctcaataccttgccctacttgaacctgtgccctgatctggttccgcacctcctttggaggaggccattcagagcttctctggtctcttcaggcccgagtctgatccagagatactgcccacatcttggcatagagtttttcagtggaactcagaatgagcctaactcctgaccgagtctaatttgtagaacaaagggagagcagtgaccctacattttcctcctgcttgtcattctgagagtggaggaggaatgggaacttatttgtccatcttccagagagtcaggcactgtagctgatcacttcccctctgtgaacagagataagaaaagcaggccagacatggagctaggaaggaaaagaagagaaaacaaagtaatttccagtgtgcatgcatgccccaaacattcatgcgtttgactatggaggaagcagggagaaataaatgggagtcagcggggagggggagagtgctgagacaaggtgagggctggagagaaggagacatgctccccaaagaggcaaagaaatgacatagaggcaggaaaagaagtggggccggaaagagaagcgctttctgggctcaatctttcaggagtttctactgtgagtcccatccaggcttgaggctgagtggaatatgtggaaatctcaaatccaagagcactacacgcatgcactgtattttctttatgtccctgggcctgggataataacaaccaagagagagacagtaaggaagagaaaagggggtggtggtgatggaggaggtatgaaactttaatcaatgcccagtgctcttaagagttcgggagctgcacagattttattatctatgtggctatttctgtcacctcccagcaatcctcagagcagcaccaggtctggaagatgatgcttgattccatcaccttgggcttccttggtggggaggaggcagtgtacagccatgcaacgacaggatagggtgtgctcttcagcacacagaggggtttggctttcactggagttcatcagagggagatttttgggtctacattggtgtgtttgaatataagcttgagctcatgtaaagatttaaagctccgcctttggctggggacgtagcttgacgatagaatgcttgcgcagtgtaaatgagactccagcttctgttccaagaccaccaatgggctgtgctttacctcttagcaactcccccccacccagcgctctaaagcccacagctgtggggtcatgacaggacaccttctgtctgtcttgatgcttcctcccctctggggctctcctctctcctcacagactttctcccaagggattcctgttgacagtcccttgactattcagtctatacacggatgactcagatttacacttctcacccagaacacttctgagctcccaatttatctgtctaattagctcctcttggcatctgctgtggtatttgtgtttggcctttgtattcacgtgttgggaattgaatccctaaagtcagaggttaatgatacttggggaaagaccaactgggagctgactccattgtgagggcactgtcctaatgagtggactttggattagtgagttatctcaggagtggctttaaaacaaaggcagtaccctttggctcacctgctccatcttaccatgtaacctatgttctaccatgacccagcatgaagacccttaccagatgctgtgcagaagctgatgtcagatttcccaacccccagaacagtgagccatatagataagactgtattcattattttaaaaaaaatgaatttatggtctttaattatatacagaaaacattcaagccagtaccttctaagaacctctctattacgcagttggctggtttgaacccccaagctctcattgtctttcttgggttccaattttcctggtattccactacctaacaccttccttcttccttcctatccagtcttctcacagtatttgcttcccattgtcttagttaaggtttttgttgctgtgaaaagacactatgaccaaggtaactcttataaaggacatttaatttgggctggcctacatataggttcagaggtttagtccattatcatcaaggcaggtaacacggtagtatgcaggcaggtatgacactggaggaggtgagagttctacatcttcatccaaaggaagccaagaacaaactgactttcaagcagctaggaggaaggactctcaaagcccactcccacagtgacacactttctccaacaaggccacacctcctattagtgccactccctaggccaagcaaatcaacatacccatcaacttcaagtctttgggcaccacctctaagatgtacctcagctgtctctctatttctagcatctatctatttatgtatctatctatttatctgtaatctatctatttacacacacacacacacacacacatacacacacacacacacacttttaacttgtttcctggggttcttcaggaccggtctcactaactttctagctgtttctcttagtcctcttcattcaccaccctgcagccagagtgcttgttaaattacagtccccacttcctttgccagtgtcatctataaagccctttgttgggctcctattgcattttcatgataaactgtcattcctaatgtgatccacatgcatgggccaaccatccccctactcccccaagtcatcttgcttgctggctcttgccttcttcttctttgtcctctagccatccaggcttctgttggtgtcaatgtctacttccttaatgtccacaaaaaaagccatggactctagaacctctgctcacatgagtatgtctatggagtcagccttctttcttttgggttgtctcccactcactcatatctgagttaaagtaatatatcctcaggaatacattcctgagggtcctctgctctgaacatgaaccaataaccaaagccagattccctcagagctcacatacctcctcaagttgtctttggtatgcttagcaccatgatacaatccaggtatttgagcaacattgtctttaatgttatttctcctactaaatgaaagttctggggcagccagaccatgcctgtcctgttgactgtgatgcccacagaattcggccccatgcccagcccatgtggaggctgaacacatgactaactttgacctgaaatcctctctgcctgtggctttgattgttgcacaggggcagggaaaaacagggcaggatttcagaagagatatgatacaaaaggtttgcttttaaatgcccccctcccctttcacacagtcttgctctgttttgtggtattattaccagctccgtgttcaggttttccaagtggacttcacatgcttcttgaagactgtagcttaaattttgttctcacatccactatgttctgttttcttgactcctatgtctatgtaaatacctcttggttcctgtcttagcagatataccttcttccctcaccttctcaggactaatactcagaattcccccgggcccaaactgcctggtttatgacagtctaatagctgcatgttcttggtcctggttcctgttctcaagaagcttcagctccctgcaagtgagatcatcagtggtagcaatgccttgccgattgttctgatggcgataatgggttccctatgtcgaacacattgaaaaccatgaagttcattaagcttgtggcaatcaagaaaagattctggcaagtgagaagagctgatcagtcactcctaaagacagtggagatgagagcttcccaagaaggtggaggggttgggatggggatgaaagatagtgtttcagacagggttttggccagctacagaagacaacctcagctgaggtttataacagtagtgtttcactgatggggacaggcatataggaccaacaagcaatgcttaggccccagggcttggctctagcagatgtttgctgagtccaaaggaccaaggtgaaaaactggcctgatcagaacccatgaaggctggaagcaagggaggggctaccacactgttcccagggtcctagtcctaccgggattacatatggaagaaagcagacacggtgcacttttcctcctcctgagggcacctcgtcacagggctgaaaaggttggagtggcaggtgaggtcagcttttctcaggtcttagaggtggagaacgaagcaagaaaggcagaaaccaaacaggcacaggatatccaggagaagaaatagtatgagaactagcagaaaagccagacaatattttggcagtattcgaaacaagtaggaagtgggatttaagatgtatgtggtgatagtcaagccatgaaggccattgccatgctcagatgatcttcagtttgttctgaaggtgtgaggcgctccagccagtgtctctgtaaggagagccagactgtaaggagagcctctggcagggggagctagggaaaaggaagcaactgggatgcggaggtcatgggaattggtatgaggggattgcagcctgtgtcagcatatcgagagtgaaaacagaatgttgtcctctggggcaacctggagaagagttaataacaggtgatgcttgggaatggagtgtgtcattcaccaactctgtgcacagggaacatgagatcctgactgatgcccccaggctgccacttcagggtgagatccctttgtctccttctcttctgttttagtctcaggtcagggtctgtgtgaccagggcttctctgtctttctccatcattgctcatttctagagattcctaccttcctgattctggtcacatattattcagaatcagaaatggaggcttcagagcttactgaggtggtggtgtcttctgtgtccatttttctttttggcccttttgccattggtgagaccaagtaggcagctttgacaacagaggagatggccacacccccaggatctggactgtccacaaaggagttaggattggggagacacagagagtgaactctctgcttcctctctttcctcttagagcctggtatttttcccccttagcacctgaaaaaatattttccacagcagggtcacctcctgccatttctttattgtaatgccaactcttatttaacatctgccaagcacaaaaggtgcagtcagggctctgtggaaacaaagtgaaatactggcagtacccactgggcttagtcctgaaggaagacaaacaggaaaataaacagaaccccaggagtgtggagagagagcagcagtgggggcatgcttgcaggactcctgctgtttggcctcctctttttatttctctcttcttggaaagcctcttactttgagagaggcttctgtccattttgtttccagctaggcccctgagggtgaagtcaagatgctttgaaagaatgtattttgggggaggatgttaaatagaaaacagcctggaaggatgggtgggcttgggatggtgaaacttcctggcactggtcacataccattttttcagacttaggaattctggaaggagactcctgagctccctggggcagcggtctatcaaagagcaaaactgaaagagaagagcagggtggacatttgggtagagcacattggctttggcatggttaagagacctcaaaagcaagctagggagttggagaagcctcttcatatccaggacagttgtatgcgaagacagttgtatgttaagaagatggccaataagccagcataagtcctaataatgtattcatggtatcaataagtgctgtgattgaatctgtcttccttgactaatctcaatgtaaagcttgcaatgaaaccaagagtacataacttgcccaagatccagctatacccatttcaagtgggcaaaaccaggattatccatcaccatagcttgtaggtaaggtgagaaggtctcctaactgggttagagagatgtgtcagccattaagagcactggttacttttccaaggcacctgagttctgttcccagcacccatgacatgacagctcacaatattctgacaccttccttgacttctgtgggcaccagcaacacaatggcagacagatatacatgtaggcaaaagcactcaaacatgtaaaattaaaaaaaaaaaagtcctgagttattgatggagctaagaggaaatgccagcagagagcacatctcccacagcctcccacaggctcctccagtcacagaacacaactcacctccaagattagtcctgaaccaaatgtgaatgaatgtggccagggaagccatatgtagactgccccaaataacatagtccaatgtggaaattgttttgtgtggattcttagtcacagaactaaataaagtcatacgttaagttttttttttaaccaatgcattgtttttcaaatatatttggtagaaaaaaagcaggttgtagccacagcatagggatctctgccataggtttctcaccttaccggatggtgttcttagctcttagcttctagattggtgggaattactggcttattgatattccagaaggttttgtctgacaatcactaagatgtttgttatgttagacactgaagtgggcagtgaatggctattaagactagagatagcacaaggtaacctggctccggatttgcagcattccacctctccagagagttctattgagtcaaccttgtagaacctttagtgacgtgaatgaggcttttttttccccctgagagcttcagtttctatcagaatgtgtcccagtactgtgtccagtggcacagctcaagtattcactagctggctggttggtcagaaaaaccctgggaaagctcagacaaatgtccccaacctgtggcacattttttttgagtaagggacaaagatgatttggcatcactaccatagagcctgcagacctttcttaaggccagccttcatgacacctatctaacaggtctagctaactgattttcccagatgctctctcactggaaaagttgagacctcgtgaccttgattgtttgaggtcttatttggaaacacacagtcagacatctgtcacagcagtggtactctgagggattagccactctccaaaaagacaaatgtggttttgattatctagatacattacacacacacacacacacacacacacacacacacacacacacacatatacacacatacacgcccattggaaaggatgaggagagtgtaggaggaagtgggggaatatgctcagtatacttgtatgattatgtcttagtcagggtctctattcctgcacaaacatcatgaccaagaagcaagctggggaggaaagggtttatttggcttacacttccatgctgctgttcatcaccaaaggaagtcaggactggaactcaagtaggtcagaaagcaggagctgatgcagaggccatggagggatgttccttactagcttgcctcctctggcttgctcagcctgctctcttatagaatccaagactgccagcccagagatggtcccacccacaaggggcccttcccccttgatcactaattgagaaaatgccttacagttgtatctcatggaggcatttcctcaactgaagctcctttctctgtggtaactccagctgtgtcaagttgacacaaaactagccagtacagattatatatacttgcatgacatatgtatgagagcatccttatctatcatagaaccatagatcgtggctgtatatagtcaaacatttttcaaaagaaagctttcctgttgcagtcctcttgttagccttgctgggcatcttagtacttttaagggggctctctcatgaccaccttaacccaccttgaagcagcatgcagattttcatggtttaaattaaaacaccgcagtagctatttctgtcctttctcacatgctagacactatggtgagggctttacagttgtagcgtgttcccacctctcactgtcttgcagtgctaacatcactacccttcctttttagatgacatagctgagatttgcaggttagtagctcgccaaggtcacatacctgctccaaacctcttcccggttccaaaggactgaaggaagataaaatattgtaacttgtgagttgtttaggagcccactgccccggcctgagactgagaacaaagcagaacagcccccaggcatgccagggcagggctgttgttaaggtattcctaagaacatcttgactgtaaagataaaaaggtatgcaaggaccagcagggctatattatctaagtcaacaccatctggccagaacctcccctctgtctattgccccttgatgcagggtaaagtcatacatcaactggttgctatgtgaacaaaaataagcccccggcacacaggaacaaagtcctgatgctctgtgatctttctgttaatgtttgaataagccaatagtgtgtcgctatgctgaattccacacccctaagcccctaaccccataaaaacccctagctttcaagccttgtggctgacatctgttatctcctgtgtgggatacatgtcggtccggagctccgtaattaaacgtcctcatataattacatcaagagatggtccttcgtgattttttgggtgcacgccaaatggggaattgggtgggggtttccccactagatctaacaggacagacctctgtccaaattcctttgcatctttgtgatgctgagcctgagagccaggtgaaaggaagatggaggccaagtgcgtccttggcccagtcttctttccccttatagcctcttgtaagcttccctataaccatcattgtcatgcctctgcctctcagtgccttcccttgcagattattttcattaattaattagttcattcactcatccctccagctgatacctactgcctgtcggctgtgtactaggtactctgtgggtattgccctcagcaaaggctctagtttcagttacttctggatttgcttcatgcaaggccagtgttttctcttggaagtcatttgttctaagaacttaaccacaaggtagataatagacagctttgtcaattgacaaaaattgcaaggcatcagcccacagatggtgaggtgtgcacagcaagtgtacttttattgttaagcaagatgcctgcctctttccttaaggatgctaaagatggggccagggggcatagtgggtgagtccaggcatgacttgaatccacctccaaaagccccatgtctcacttggtgactttgtaaattaaaaaacagcagggtatttaattttatagaaatcagagtccagcccttggtcccatccctacattatggctgagaagagtcaccagggttgtgttatgtctatagttatcctactttgctaagagctgtggtgttgaaagatcctgttagcagatattcataagcccttggatatctagcttgtattgtagtttttaaggtgaagactcttatatctgctcattctaatgtatagtttgctgttgcagtagtggcaatggcaaactatagacaatggtgacagctggtgtactctaaatcaaggctaaaatcttctgaagccctctgtaccaaggtaagagcaaggatagccaagccacctgtggagtcagccccaggacaaggcagtgcactgctaggagaataacacattccaaagtgtggcccttagagaagtgttggctacccagggaagcaggaggaagaagagccccagaagaaagaagtggtggtcaccccaaaccctctcacaaaggggtgctctgtctaaggcctgggcctttggctccctctggagagggagccagctgactctactcctcagcttaatgacactgcccattccaaccatggaacatcctctccttgctctgagcagtgtgctacttacaagttgacttcgatgatggcttgctcttagggttgtgggttaacctgagctagtatgggatttggtatcagtatactcttgtcattagcatactcagtgtgatgtgtctgacttgaaaagcaaaccaactgtcatggctgataaatcagatttttgagtgaaccatgtgccagccccatctgggtctgtgcagaatttactggggaaggtatttcattgggatctttctggggaaatcttctctgcctcacccccaggcctttggcaccactcttcagctgatataccatccagctttatgggtcttctatagcagtggagtagggacttgtccatgtacatagacactatttatcacacttcttgtccacagagacactatagactacagcacctagcaatctatctccatattcagggctttctttttaatgtaattttttattattagttttttgaaaatttcatactatgtattttttatcatagtcacttgctccctcactactccttttatcttttctgggccaaacttggaccccctcaccccctcctttcctctttttctttactattattacatatgtacctatgtgggaactaaagggggtgaggggaaggagggggaagggaagatagcccacgtccggccagagttcctcctatgctctgggcaggtggatgcgggagggctgccagacactttccactctgccctgagtgggcatctaagccactgaccccactcgacagggcatggacaaggggcgcccctgaccgggggccatggcgtgacaccctgtagcctcggggttatgggagagagggcagaagggagagaggttcccacacagaagagagtaagctcagtgggccttgatgaacagagacagtctatggttttagagctttattgtagaaaggcagggggaaagagagaaggtagagagagactggagagaaaggggaaaaggggagagagaagaaaggctagagtaagaggttagagagagagtgtgtgtgtgaggagagagagagtgaggagaggagaggagaggttagattagagtaagagagcaaggtggggccaagcagcccctcttatggtaggctgttatctttactgttgctaggtaactggggaggagtttagcctgaaggtcagaagcttgggacattgtctatatgactgctagccaaacttctcctgtgggggctgagggggcggtaacttcaacaggagccttgagtccaggagatatgagggaactccttctgtcccatgtaggtgaattatcaccaccgggttccagggttcagctctcaacttgactggaaaccagactgtctttgcatagcccaatgccccacatacctatgtgcatattaatatttaaatgcaacttgctgagtccagttagtattgtttatatgtatatgccttgagtgtcgaccacttggtattggacaaccaattaagggactgtcccatgtccatgctgccatgtcaactagtgtcattgtttgggtcttgtttaggaaaccatactgttgcaatgtcatatatgtagcttccttatcataaataaaaggcactacttataccagacatcctggtcttctggcttttacactctgcgccctcttctgtgatgttccctgaaacattggtgtaagcattctactttagatggaaggggctgggcaccccacaggcagttgtttccttcactttgaccagttgtggctttctgtaattacctctatctactatagaaatgtgtttctttggtgaagggtataagctctatttatttgtggatataaggatgtatatttagagtgtagttaggaattgtactggtttgggtcagtgtgtattacattttcctctaggtcatatgacctcatcagccatgggtagttggctaggcttacagcagcaggcatgaattcctccctctaattgaccctaagtccaaccagacagtagttggtagcaaccaggattaagtgccactactgtaccattggggatatcctgccaagctgataattgttgtggttcattggtatcacaagtgggtaggaacactgattgcttttctcccttggaaacttgcatagcacctttagctactatgagagctagcccttaggtaggagtctcccagtctgttcaatctcagtttctctaagtcatatgtatgaagagtggtgtcttcagcagtaggaacctacctttaacctctgggaagtgaccgatggcaagcaacagctttatatttgctatgcacactcaagacagcctacaaattttgctcactgtcttacccccaggtcatgatggcattctcctgttttattatttatgagttttattgatttcttttgcatgtgtatgtagtgcatgcatgtgtatatgtatgcatgttcaaccacaggtgtgtagttatacaagtgtgtgtgtgtgtgtgtgtgtgtgtgtgtgtgtgtgtgtgtctggaggtttgaggttgacatcatgtgtctttctcaatcactctccatctcacagaggcagagtctctctgcagctgggttctgccttcaggctattcaggtactgtaggcaccagactggaatgaaaggcatgaagcctgtctggacagggtgggtctacaaaaacttggttggccagagtgcaggggagaagtaaacctctgcaagatgttttttggtgttgcagccctctttttttcaggggtaataagggttatataaaccttggggaatggatagggtttctaagggtgaatgtacatcattggttggtactgagatgatgagaatgcttcatttgcatgaggaggaattccatgtgcttgttggacatgactggtatatgactaacataatggtggtagaggtggggccttgggggaagggggaagcaataataccaggacatgaactggaacatgcagacccaaagcagggacggggtgatccttactcctactggttcccacatctctcatttaaatgcacaactttccaatagaactagtcaactgagaaagcatgctctggaaattgtctgtctctgccttctagtgctggaattacaggtcactgccatgcccagttggcctttacgtgggccctggagatctgaactctgggcctcatggttgcctggcaggtgctttgcctactgagccatctccccagcccttcattatatttaatatttagttttcaatctaactggagttgatttttttcatgcatgtcaaaattatatgagttaaattttatttttccccaaagacatccagttaacctggaattattcattggcagtgcctttctctgtgctcttacttacctgtatcctaagtcaagcctgtttataggtcctgttatcctccactgtgactttgcttttgttttaccttgcaccagatgtcatactttctttaaaacacaaacaaacaaacattttataagatttatgcatttcattttatgtgtgagtgtttttcctgcatgtatgtatatgtacagcatgcataattggtgccttgggggtcagaagagggcataagatcccctggaactagagttaatgatgcttactaaccatcatgtgagtgctgggaattgaaccctgcctggtcttctacaagagcacgaggtactcttaatcactgagccatctctccccacctctagtttcttaataactttataataagctttatatgtgatgatgcaattccttcaaactgaccatatttgccttgattatataatttttgttctcagcatttacacacatatattctagaattaattggtcattttttactaaactccagatggaattttaactaggactccattgaattggtagattaccagagagaattgacatcctgtaacatgttgccatttttatgtttcctctgagtctgattaatttactattaaaagtcacttttgatgctataataattggtattattctaaagttacatttttctaatacttttttagcatataaatgtacaagttaatttttttccattttttattaggtatttagctcatttacatttccaatgctataccaaaagtcccccatacccacccacccccactcccctacccacccacttcccctttttggccctggcgttcccctgtactggggcatataaagtttgcgtgtccaatgggcctctctttccagtgatggccgactaggccatcttttgatacatatgcagctagagtcaagagctccggggtactggttagttcataatgttgttccacctatagggttgcagatccctttagctccttgggtactttctctagctcctccattgggagccctgtgatccatccattagttgactgtgagcatccacttctgtgtttgctaggccccggcatagtctcacaagagacagttacatctgggtcctttcgataaaatcttgctagtatatgcaatggtgtcagcgtttggatgctgattattgggtggatccctggatatggcagtctctacatggtccatcctttcatctcagctccaaactttgtctctgtaactccttccatgggtgttttgttcccacttctaaggaggggcatagtgtccacacttcagtcttcatttttcttgagtttcatgtgtttaggaaattgtatcttatatcttgggtatcctaggttttgggctaatatccacttatcagtgagtacatattgtgtgagttcctttgtgaatgtgttatctcactcaggatgatgccctccaggtccatccatttggctaggaatttcataaattcattctttttaatagctgagtagtattccattgtgtagatgtaccacattttctgtatccattcctctgttgaggggcatctgggttctttccagcttctggctattataaataaggctgctatgaacatagtggagcatgtgaagttaattttgtatattgaagttgtactaggctctcttgattatctaaccaattttaatagcctatctaaagatctttttgaattttatttcatgtgcacttctatacttctcccctgtgctattatactagctaagacttcaagtatagattgaaaagaaggaataataatctcctacccaaaatctagggtggaaaaacttccacactgttgttattatgcatgaagtttgctataagttttccatggttacatttctgagacaattcttaagtgactaattttatttttctgtgctgcagttgaactcaggatcaagcataggctaggctagtgctctaccattgaactatctccttagcccactgtttcttgattcagggtctcaccacgtagctgatgccagccttgaactcactatctggctcaggaggtcctggaacttgtgatcttcctgcctcatccttcaaaggactagagtaacaacactatgaattgcttcaaagttttcttgatgaacagagatgaactatactaacttattattttgtatctattatagtaataacacaaaatttatcctatacttttgaaaaagtgaattacactgattttctaatgttaaagtggaaactttgggccaatgccagctttattgtgatgttcttttcctgtataagtggtcttgattatttagtataatgttacatctgtgctcaatagaaaatgacctgtgattttccctttatgcagtagtcttggtcaaggtttaatgttaaagataaattagagagtcttcttttactactcttgaagattttgtaaaattcagatattcctacctaagaattcatttatggagccatttggtgtcccgtcccgcgggattcagttatttgtgggtgcgagggggacacaaacctggaaggaaatgggaggaagggaaggagaagcagagaccaggaagggtgcctatcaaggtctcgtttattaggctgaggtgccttgattttaaagcatacatcgcggggtgtaggggaggggtcgagggggaattttacaaagaagtgggcatctgctgacatgagggccgaagttaggcgccaggcagagggcactctgcatcttatctcgggaacatagatcctccttgacagccttgggtgtcaggccgggctcaggcgtaactcatgtccttggatggcatgggagttcaggaagagatagggaagaggggactataattcagcttttacagcctcaggttccaggaagggaatagggaggagggagtgataaccagctcccagcacgaggccatttggcctgttagggagattgtgaagggctcggtttctcacgggatggtctctgacgatttggcattgtgggttttgtagaaaaatatttatgtgtatgtacgcacatgtgtgtgtgagtacagagaggccagcggttggtgtcatatgacttccttgagctcattccaccttatgtattgactcagagcctattgctgaatgcagagatcatacaattagcaagtgtgactagccagcttaactaaccaggagtaggggaggagaagatagcctcctgcctctgccttctgtgccttgagattagaagtaggctgccttgtctagctttttaatgtatcttattgggttctgaactctgaacattaccattgtgtagtgagttcttttctgttgagccatgtcttcagcctaattatttcttcttaatttttaaactttgttgcatatgactatgtataatattcccccttatttcaggatctcttagtttttaagattatatctgcttatctttgctttctgtcttttttattagtcttccttgaagttgatcaagtttattaatcctttatttccctggttgtagatttattttcatttctattcaggttctttatatttcttccaaatttggggctcttaatatgctattctgttttagcttttcaacatttttacgtatatatttattctaagcatctttttttataacgtggactctttggtgtctactataattgttgtatctgaaatggtggtacctggcaccccttaagtgtttggccaagtaacaatgaatgaatgtgtgaatgaatgccaaggagagagctaggatgttcagtttgttcagcaacaagctaactgctgcagaaccctttgagtctctgtgctctcttcgcagaatgtggcaggcagtttcatgcttgtctttttcatgccaacccccctaggaggacctttggtttctttccccactcccatcactcctaattacagcagcagcaagaatctcatgttctctgccagcatctaaagggcccttccttgtcaatgttctcccaaggaaagatcgcctcccacacctctctccattacaaaagagcccaaatgactctgggtattttaaggggtacaacgttgtgacagtgacaggctgatgtggcatcagcacaatgactccgttggatgtgccattatggcttttcatgtcatttgggtgactgctgctttgtccacatttagctaggtgagtcccagagccaagggagtttattttcagtgtgggaagaaaggctttttggatctgcatggcttgccctcccctctctctgtatgtaagactccaaacttcacatagcttcccctgtagcttaaaaagcacaaggctataagagtgagtccctatacagcaataaattttaattttactgatgaaccaactatgaactggaaatgtgtgcatacaaacttataaggatacatgcatggggagggcagatgaaccagagagagagatgttcttgaaaagaagtagatagataccaaagaagggtgacagtggatatttcagatgacactcagaatggtaggagggactttgcaaagtcatttgattataaccctctgtctttgtctagatgaaaaatccccagacatttattattgacaacatagagatattttgaagtatttaattatctgaggaaggagttaaaatctgattctaatagcttctgaacttcaaagcccaataattctatttaccttgatgactgctgtattttaaggacttaattctctacctagtacattgtgtgtgctcaataaatatttgctaagtgaaaactacacacatacctactgctagtaaatgttcccttacagttattctcctcagggcatctggctaacctgtcactttagtaattcttacaaatattattattattattatcaataatttgattggcagatagacagatatatacattgagtggctttagatttatgaagtgagagttcaagtatttgttatgcatcacacactggcacagttactgcaaatgtagcagggagcaaagtcactaaaatccttgctttcatgagacttacatttcaaattatgtcaacaccacgataagtaagtaatgtattcctagatgtatccccgagggggtgaaaggagaaaaagtgggaactggttctctccttccatcttgtgggtcctgatggactgatcttagtcttagaagcaagtgagcttgctgagccacgtctgtgtaccatgatggtatctttttaatttgatcgttaagatgggttttatagagacgttcactttatgatgttttatattcatttattcattcatccattgtgtgtgtgtatgttggtgtgcacttgtcacattacatgtgtggaggtcacagaataacatataggatattatacaggccctgagactgaactcagtttgtcaaggatttgtggcaaggaccactagctgctgagcctacttgcaggcccaagaagttcacttttgaacaaatccttaaagtaagaaactaagcatgtgcatgcatgcaaacaaaggttctaaaaggaaacaacaagtttggaagccccaaagaggggagtgcatctgggaggggacaggaaagagctggagagcagcatggatacagttcatagacaatcagagccaggttgggtggaatcctgcaggttatgatgagactgactcttagcctttagagaggatcacaacccacagtgcttcatctcacacttccataggctcaccctggctgctatggtgagaagagactacatgagggccaagctggaaccaagcaacactttgggagagaactgcagaaataaacatgggagatggtggttgctgacttaggggtggcaatggtgtgggtggtaacggagtgaaattctggtgagattttatagatttatcaatgggcctgaagtgagatgtaagagatgaagatactggagaaccaaaagtgttctgaaagttttaccatgagaaattattaaggtggcattgtaactaaactagggagaagaccatttgtaaagtgcaataatgaactcattaagttctaggcatactgactttgatgtagctagtggatgtccacgcaggatattaagtagggaactatgtatgtgattctggagttaagggtagagattatggcaggatgtgagtgtgtgtatgtgttctgttttttttttgtctgtgtatatgaaagtagatatgtaaatatatatgtatatatgtatgtacataaagggtatacagcttctcaatagcttttaagactatgacaatcaaagacaatcaaagctgatgttaagactctcttggtatatgttccatagatattccctccttaaaggctgtatataggttcaggagctctactgtagcagccacacactacaaagcttgagttaattctgcagatgaacccgcagagaggagggtgcatctgtatgactcccattacctgagtgcagctttgtgtgtccagtcatctctgctatcatcctccctgtgaaggggaggacatcctgaccctggatattacaaatactcaggtcagctcacctggataatgtcatttcaccacactgacaccttcttccacatgttgaggtatgggacacggtctgcagatgaattcactttccatttttctgatggctcattcatctcgaggtgagatttagaggtagaagtgatcaatggacaggaggtaaatcaaagcatgcttaggaatggccaccaatcaagaagccttgaaatcccgaacacagcttctctcaacatgtcagagatgttctcttccaaggattcctaaaaagactgtactttcacagtgctacagtgggtgtcacggatgcagagagggagaagatttggttggttcctgtaaaggacttgtctaatagcatgaataataattgaagatggaaggtagaaaagagtagcatgggttggggttgtagctcatgtggtagagtatttgccgagcttgcatggggccttgagttcagtggatttccaactcttcatactggttacagtggcataagcttgtaaccccagcatctaggaggtagaaagaagtggattagaaaggtcatcctctgctacaaagaaagtttaaacttgcaagcctggactatatgatacctgtctcaaagggtagaggaatgatgtggttaacatatgttactgggtaatcagatagcaaattccttgaggctatggagtcagagaatggatattaaaacagaagatagggcttgagctggcccttgagaaatggagaaacttaaataagatgggacatgttggtttctttatgtagttgtgtagttcatacatacataactataaatcatactacttttatatcatatcctatctacattgtcagccttcatttactggagggatgacctaggtgggaaagaccatggataagattaagaggtggaactatatatcaatactttgatctagtcaaatatatacctcctcattcagcaaatgaagtgtacactaattgggaaggccacaatgaatacagtaggacatttatgcagaaaagtggtgacaacagtatatgggttcatgtcacatgtacagccttagatgtcaagtcaactttagacttttatcctgtgggcaatcagtagctatagtgttttcagaaaatgtttgaattctctgtaagtaatgatctgtaagatgtcttgacagcagtgtctaaggaggcccgggctatgaaatgatttatggtagaaatgcaaacacaaaatttggccaggaaaagagtaaggaatgttctcaaggagttaacagggagacatggaattgtttctaagtagagatccacaggttgtctagcatatcagccacatgcttgacacaggcattcactgcctccatagtcctggaaggggtgcagaaaaaaagggagacgtcagctgtctccattatccatctttttctgtttccctgtctcattcttgctgttgcctgtctgtgaatattaagtgcctgtccacacttcaagtgagctcactaataaggaggtcagacctcagataagtagaacaagatgcagtgagtccactcagtaatggtcaagacatctatcattggtggagatcattaatggcttaaaacatgaccatatattgttaaacttgactttctttataatcctataaaactggtatcaccatctcctctttgtgaggagggagctgagatgcagggaggctgaagggcttgtcttgggacttagaaatggcaagacacatcttgagctcatccgtggagctgagatgttggcttatcatctcttatgttgccttgggatatgtttcatggatttttctctgtgatgagcagacatcctgcagagcatataggtgagacagtactgattggaggagaggcaggctttctccattgcttggtctgtttttcaagggggtaagccttgaaatttgcctaaacatttgtcaatgtcaggctcaagtttgatgcaagcacacaaaggggtcttctattcacaggggtaactctgttatctgtgaagagggtcatgcctattccagctgtgggcacattaccttttcagggtagatgctattaacagatcacataaggccatgatatccaatatgggcctttctttccttagtgcctagaagggtttgatcataattacagtgtcactgaatagcaggaaggatagctctactcctctctcattggtccttgcttaactagggctacctgaaactgcatcagctcatctttggcactgacccattaaagctacctcatgcttcttgctaccactatagggaacattggcatatatgatgctagtttctccatttgctaaggactaagactcttacagttacttggaactctgggaaggccatctttgcctaggcaggggactattctctctgagtcagagatggagcctttcctgaacatgaaggtgaagtgaaactagacaaagtgatgtatattaatgtactagggttgccttaaccaaacacacagactatgtagcttaaataacagattcattttgacccaattctggaagctacaattcctgtattgtagcttccatatccaccaatccatccatccatacatccatccatccatccatccatccatccatccatccatccaataaactgaagtctcatcagcatccttgagggtgatctccttggctttcagatggcagatttctcactatgtctgctcatagcatatcctctgtgcatatatatccctagtacgcaacatgtattgaagttgcccctataaggacactaatcagattaatgacaaatgatatcatttcactttaataacccatttaaaggtcactttccacacgcaatcacatgctgagttactgggattaaagctctgacatgaattggatagagagatacaatgcagcccctaacagtagggaaagttctcacctcagtccttgcttcttctcttgtcctcactccatccaacccttccctcttttccttcacaacaggctggatccagagaacaaagggctggtgtctagagtggttgcttagaaataccttgacagcccactcatgatcaggagcgtttgctccaaggcacctgccagcagcattcaacccccgcattgggaccccctgtggtgcaggagactttccagttttatgtattgaactaattaggaaaagaaaataaaattctcccaaaacaacacttttttaaaaaaaaaatcaaatcagatactgcaaatagggcatgattactgatcctcacctgcatgatgaaagttcataggtcattcaacaaactctacccgtcccactcccactttcccacactgcccttcagctgaaatcatcactgtctctaaggtattctgcttagctaacttgggccacaataaactctctcctttccaaaacttctataatatctaacatatatagctcctagctgatatgcattatatggtactttggagcatatatttatatatccatccatccatccatccatccatccatccatccatccatctattcatccatccatccatccatccatccatccatccacccatccatccacccatccatccacccatccatccatccaataaactaaagccttcagggaagaggaccacccattcctcatctaagttttgtctgcttgaagtcacagagaggcaccaagtaggtccgtcatgtttgctgaatgactgagtaattaacaggtttatctgaagatggacgattcattggactcacaagctagaaattccttttaatttaataaggcacttaataggtcatcatgtagattttgtagattatggcctttgaaaaactttgaaatgtagcaaaaataattttatctgcctcggatatgtgaaataaacaaagccctagacccatattaggcttttgcttcctccttgccctcctgggcatcttcaccttaggggttactcaggctctttcatgatctctcaccatttgtaagatgagaggataaactcttagatgccaggtgattttcacttcggcttcagttttcagagagtggaggtaggtatctagagaagggttctgaagccatgctggacccttctatgaggagtatcaggaatgatgaatcatggcaaccaagggacaggaggagggacaggtggcatatgtagacatcttctctgaggtcacactcagcaataaagctctctgaatttatgattcataagaaccctaaagaaacttgtggggccctatagtcatcagcaagaacatttgtgaacattgtaagtaggagtgctcattagcagagatttctggtcaaccaaatgctggctgagtacgtattatgtgacttgatctaaattcaggaaaatgtgccctgggcgtaggacttccatacataaatttgtttaattgcattgatgtaaaatgtgcaattaagagggtaatgagggtggttgtcacccatggtggttgtgggaaatttttactttcctgtttatacttctctgtacttttcaaatgctcgtgtgctatttttataattagaagaaaagaaaaagactgattgatcacccaatcgggggttaagaaaaaaatgaaacctgaaaacttcaaaactggcttctgctcaccttagtaaacatgtgtccgtgtcaatcaacaaacattcattacttacactatcatgagtgcttgagggtgacgagggactgagtcaagatggaatgctgttcacaggaaaagttgtttcatagaaagcaaagattttgacctagaccttggtagagaaggctaacaatttgcataccagggtaagtgggcatctcagggagagtatagacctgtacctgaagggaacagtgtgctgggaagagcaggaagagcgggggagccatacaagatagaccccattgaggagattcagcaacagattggatccagattgatgggctatggtccctaagtgctactgattcctcgtgagggtaaggatagctgccactaactccatttccaaatggagccacccactgaagggccctgagtagaagggcagactcactggctgcagtgggttctgggggctaatgaggctgacacagtatttcaggctattgcagggacgctgtctggatatcctagatctattttagatggggatgccactgagtcctgtgcttttctctagtgttcttgattcttaccactcaaggaaaccagggtttcagttatgtcagtaacatattttcttggtgggcaaggctaaggcttgtgaaacttggagttgtgatcatagcttttatgtcatgtctccatctacctctgttttctctgtctgactttctcccatcccatgctattagccttaggttcacatttgatttaatagtcaaaacaattaaatattatcaagttggttcctggatttattccataatgtaatagggtagcctttttaaaaacaaaaacaaaaacaaaacaatggtgtcagctaagtcagattcttttagcagagaaacctggaaactgttggaggtggaggaatagggtagactacaggtgcctggatgtcagtaagctttgagctctaaacagctttatacaaaactcaacggtctcttagtaggtgctatgctcatctcccgagctagcaataattagagaggcctcatagtagttttctacttatgcactgtcaggtggagcaagccccagagtatagaaagcttcagggagtttatgaagccccaaaggaagggtctagaacagaaatggtgggtccatttcaaaacaaggccagattgcctgttttcctttcctgctttaaacaaacaagcaagcaaacaacaacaacaacagcagtctgtggtctatgtgacctggccctggatggcctagtcttaccaatgtagcccttatgtcagtcttgtatttataacaacccttctgtctctgcctcctgagtactggaattataggcatgttttactgagcccagcttcagaatgtcattcctttatgaaaaaaaaattaaatcctccttcccaggagctcattgtcagcagccttgtttgtagtcttattatgaattcaaaaatatgtcacatctggaagatctgtgcttgaagtgtgaatgctatcacaggaatctttttttttccttttaatcataggaaagtcttttaggtggggtgttattgtcaagactaagttggagaaaattgtctgcagttagggctaaatgacagtgatcattccacaactcatctagagcttgaaaaatgaatatttagatttttgtattggacagaaaccatttgtcccagaataaaatatggtagctggagaatggcagcctgcagccctgatgtgtgggcgagcctttctttatgaaccaggcatattctggagatcccatgtgtcagtcaggtttttgtaaatggaatcttttctttttccttccttaacttgccctgtaatttcggcagtatttaatgttcatccctgatttatcttgagttggtagttagctgctaacattcgactctggatctgagtacttcttctttgctttcttcacttttattctttgctcttttcaacagatgcttagggaatagatgctatgtgccaggtacagttataggtgtcgggaatatgaataaggatgatggggtaaataattggtgtaggagacagtgaaccccaatcctgtgggtacagtgcagctgtcacggcacagaacccctcagtctggggttgggcaggagaatttcctgggctgagaactgaaccatccaagggtatgaggaagaacatgcttggaggatgcccgcttaaagaccagcatcagagacatggttgaggctggttttctagaacattgttttggtgctggtaagaaaagggaagcagttgatgacctaggcttagcttctctgtggaggagaggtgaacagttcagcttttattaacctgacggggttgggaaggaacggcgggtgatttctctcttttatttttttttcctgtgatcattttatagtatgagctgtcttcaagaggatacacccaaatacgatgaagactgatgagagcataagtatatccacttccaatgggagctctaattgttgtctagtcttttaaaagaaatatttacatagaaattacactttttcccctaaggtaaagacatagtgtcaagagataattgatagattaaggggaaaatggtatgtaatacaaagtgctatataatcttatacaaagaggttcttcaaatgtattagaaaagatcacctggaacattggagatgactcccttgataaagtgcttgctatggaaggacaaggacctgaacttgatccccgcacccatgaaagctgggcatagtggcagcacccacataaacccctgtgctaaagaggagacaggaggatctccggggctcactgctggcttctcttagtacattctgggagctctccagattcagtgagagagagagtgtgtttaaaaaaaagaaaaaccataccagcctgagtttgatcattttaaccagttgccatgaattgcatctgtagttccagtacttctgtggggaaacaaaaagcagggacaaaggaattgtccagaagcccaagagcccgataggttggagtttacagaatgacaagagaggtcttacctcaacaaggtggaaggagataaccaattccgtaaagttgcctcctaacctccacagagatgttgtgggatacacatgtatgtacatatacatgacatgtacacagaatacaataacaataaatttaaaaaatgaggtggagaatgagtgaggaagatacacaacattgactttggcttctacattcatgtgcacacatacacacagcagagtgccagccacagaataaaatgggcagaagagcaagcaaccaacgtgatgtagttttcatgcattccactgccatcagtatcgtggtcagttgggtgcttagtagctctggctctgtgtctttatttcaatgacctagatttatgtgtttctctgttgcagatatgtgattgtggtgcgcatgcgtgtatttgaagaaggagaatgtccatcccactgaccagctctgccatggacaatggtccctctacttgagaacacaaccccagatatctcctgggatcatggcaaatgccaaggacttattaatttactgagcattctatgaccagtgcacagtaccaggacatcacatggtcagaagcaagtcttgacctcagaccactcaagatccagtaacagagactggaacataccagannnnnnnnnnnnnnnnnnnntaccagtttgtaggcatgctgcacacaatatatacgcctgatggttgctttggttttatagaagtttgaatgtccctggagataggtgagaagacagatgtatacacatctggccatgagcactcatcacagcagggtagaaagggaaggaaggtggggaaccacatgtttttgtattgcttatgtcatacttggaatgcatatcacttttgtaatttcaccatttacaaataagtatgtaaaaattaggaaattatcagaacaccttttctcccctgctaccttctagccacaatgctgctcaaagcagagacttgtcagatcttatattctgtcagatgagatgtgtcctgcctcctctcagggattgcacagcatatggtaatagtgtcattagcactgtcccatcttgaagcaccctctctttcaggatgtggggttggttcatttattcatttagttctttccttcatcattattaaataaataaaaacgtgtgtgcccattgcccactgtccgctagttctgggctatccccggacactggctcttcccttttcttaccttcccacacatcctgttttgttttgtttttccagctcttgaggtaaatagtcttgaggtatacacactagtgaatatcttgaggtagttggaagggctgaccagcaggagctctggctttttcaactcagtggtaaagggctctttagagacttattctttgccctaccccaatgctgtgtaatagaggcattttctcggctccatgcccagggtaacagagctgccaggcaggtgtgtgagtgttggttaattaggtgattatatgtgtcccacagcctgggctgtctgctgctgagtctgggctgctgggaagccctccctccacctgggaatgaatttcttctgtaaggctctaatgcaggaaaatgtaggaggaccactgcatgcccagcctctgtcttgcctctaaatggttctgcttctttcttctatcaccacttatgatgtggatccggattctggtatgttccagtctctgttactggatcttgagtggtctgaggtcaagacttgcttctgaccatgtgatgtcctggtactgtgcactggtcatagaatgctcagtaaattaataagtccttggcatttgccatgatcccaggagatatctggggttgtgttctcaagtagagggaccattgtccatggcagagctggtcagtgggatggacattctccttcttcaaataaacgatactttcaacccccacagctttggggccactaaggaaataaagtaatgggtcctcgtctcttgggaccagactggaaaatacccattttataatctctcataacaagacaatagagcgctgaggaccagtcatcttgaccacctattctgaactctaggccctgtggcagacatctgaacttcatgtagttttccttaggttcttcaaggctttgccacctagggatgtcagaccgacttcaggtttcagtggctctcatattcccccagacccatgaacttcagaatgccaatataaataacaacgactctttgggggtacagatgtaagggttcattcccgtgtagccttgaagacagaataagctgatggcatattaaatgtctttgtaccctgcagtccatagtaatatcacagaggaatagcagaccggagagctaacatgtttctttacacctatatcagaatttgtgtatttcctcatgtctggaatgcttatatttctagagctgccagtttaaaaaatagtgtgctccaagaatactgcctggtactagagaagctaacctctgttccaaataccatcattggctttctgtgtaaatttgttggtggagagagaagtttaaaggaagacacctcacagtgaggctggggaattaggtgggcaacgcctttatttacagatgtgagctttgtctaatatttaattgtaaactgattattaacaatagcccacatatagcctacttcctgttatggtttgtgtgacccacttttcaactgtgtgctgccaggaatttcatttataaacttccttattgtcaagccactgtgttccagtgtgtgtcaatactgtggaaataaaatttataccccctggacccatgcagattgatttcgttctggaatgaatagaaatataacctgcgcacgtcaaatgcatttctagagcatctgctatccatggggaagcttgggagaaacataaagacattcaaagcacacttcctttcctctaagaatctacagtccagccagcaattttacaaggcttctgggagtggcatgcacgcacactatcatagtctcttgagttttgggctattattattaccgttttcaattaccctgtattgaacaccttctaagatgcgggtaactaccttagattgggctccctggaactcagcgtggtactggagaatacatgcaggctcttcaagggtgtgctcttaggagatgctctcaaggatgtgaggggagccaatgttgaatggaagagaagtggtatggaccgctggcacagggtgtactttcaggggcatgtcccctagaggccagcacaatttcagtgagcgccgctgcaatgtgtctgtgtgctttgaaggaagtcatcaccaccaggattcacatgcatcttaatcactacagtgcagatttttgagggttttctgcttacccttccttaagccagaaagcccttcagagtcattatgccttagatatacacgttgtagatgaggcaattagacaggtagaaaagtgaagtcatttacctaagactgcccaaccattacagggcagcctggcacgcgtgggagctggggactatcagattttattagtcacttaatcttcatatggctgtttcacgacagccatgatcatttgtagtagatgaattgagaagatgaagtattgacagaattggtgatttggccggtgtctcagaactaaggacaggagaggccaggatttccctcttcaactacactgtcttacaggaataatatgtccagtgagggagacgctactgtgactggagaagacatcatagccctcgtgtattttatggcctactgatttgcccttcattgttctgcacagaatcatgtccttcaccataagtaaatgagcaggtcacaaagttagacaatttgtatgatttttctgatctcagtttctccatctatgaaatggggataatgatgacttcccaacaggaatcaaaagaaactgtgtgagaactcttccaacatgacacatttccctgtcccaagctcaaagctttaggactaaccaaagacagtcttcagtggacagacactctgaacatagccatggtatactgatcctgtctcttctcctttgcctccttttcttggaaggaaagacagagagacaaagtcctctatgcaatttgtgctgacactagtctgttagtctaatcataacacagttcttagaaacaaacctagcaacagcacttatatcttacttttaaggtttaattggctgtaaactcgatttacgaggttcctttccccatcaagtgtgtggagtattgctgagttctggttatctcaatgtccccttcttcagccagtcttcttgttatttaagaagccaatcagatgtttgttctctgggcatgtgccctgggagccctaaccattctcagcgaaggtggaggcaatctagtgagccttctgttccgcattatccacaggggtgctctcccactggaatctctgacattgaattcttccctaagttctttttagtttcttccccgtgtgggtgtcctcacccatcttcagggtagctcttccctggtctctggtgcccatctcctgccttgtaccatctgtgataaacctgcagctcagatgagctccctttattctgaaaccagccactcctcactgcaggttccaatgccagtctatgaagcctgtgttccagtatggcctggtgtgctgaaaacacacattggtgctaccctgcttttccaataaagtgtgcctccctctggtgagcttcatgttgctctcatgttaggatcagcctctctagggaggcagccagggcccagcacccacctggaaagagcatcccctaagttctccctcacagattttttttttcaactgaaatttcaatcctcagttgtgtagggttcgggtccctgtgagggtgcctgatgcatggtcatccaggaggaggtggtagaaggggttgtgcctgttgctatggcaacacccagctgagatcatgaacctatttcatttgcagagagttgcaagatgaatcaatctcctcacccactccttctctctagcttcttcgtgtctctccacagccttctgtcatccaccctccccactcaaccttagaagttcttgctcagtgtgctctctctctccctcttcctctccccctccccctccctctccccccctctcatgaatccacatagcagttgatgttactatggtactatagcagattgttgatgttgcttctgaacccacacctttaaactttaatcagacatccctggaatgtctttttctttagacaggtatgctcagcctgttgactgcaagccacatatgtctcaggaaagctatgaatatggccctatgtacttgtagatggaaatgttgtttcacggtgcctaaagcttagatacccctagctgctccaacagaatatctgagaccatgtgatttataaagaatagatttgtcttttggctcatagttatggaggtcaaaagtgcactggcatttgaagagggccatgcttttgccaccatctgtctctgtgatcactacatcttctggaagggcagagtgctgtgttctcatgtagcagaagaagggagggcaaacatggcaaagatttcctccatcaagccttttaattacagctacattccatttaggagggcagagatctcatgagctgagccccttatcaaaggccctacctccaacacagtcatattggactttagtttctaagtccacagcaggtatattaaagtgtgcattgctaaggtttagcagagttcttatctagagacggtgttgggatctaaggctatgcatttccaacaaggtcccagctggtgctgatgctgatgctccaggcccaggggccaccttctgggaagctctgctctaggctgactttctccaattggaattgggagtgactagaataggcctttcttctttgattctaatgactggacgtattctttctacatcacatatttgttaaatccctttaaagtggcagacactgttaggtgcgtgatatctagagaaatgcaaaagcttcttttccaagaattcatggctatgtatagaaggaagacagtatatgctacgatgaacaatttagtattcaaagagtgataaaatagaagaggttgaataggcaattgtttctttgctcatggaagtaaagtatttaggtgagagtataattaatggtgattcattcccccagcctcaagactatctggagagaattggactttatctatataggttaatattaaaatctgatgtttgtagaatatttattctatttcagatactgtagcaagcactgaatatgttgacttttctgccctgtcacttcttataatctcaggcgagtaattcaacccttcaactcgctctccagagagaaatgggagtgctagtatctgcctcaaagaatcattgagaagattgagatttcgtgtcgatgtggatgcaacatctatagaaatcacttaataaaatgttgactcttatttccaataaactctgacctattgccctagaaaacaagctacagaattgtcctagagaacctcctgccatccaggctaaatcaccagcatttggccaagagaattagggacaggcttggttttaaatgtggggcttagaggaccccaaaatatacctggaaagctcctgtgacaccagccagaggaagcaagccttcctgtacattaaggacattggggtcactgagatgagacatgaggaaggctttgcaggatggttgagattttgaaggtgaattgtgtggatgttggagattggattgtaaagttaacaattaaaaacattccccagcaaggactacccctaatcatccttcagtcggggatgttaaagcagcaggcatagcactacttagccctagagagctagggttgatcctgaaggagattttctgccctattgcaccagggccctgtaccataggtgctgtagtactggacacaactttcttagtaggcagtgaagcactgctttctgatgtccctacaaaggacttcctcttcctttcttggtctctaaggattgctgtgtatttttctgaatgagggagacttccctgggtctttgggggtcctccaagaaagtagaccatgcccattcccagctgagctgtcttttctatctccctacccagctttgcatacagctgtgattgtcactgtgtgagagggcagagtctagcagtcttgttttaatcctttccccagctcatcagagataagagtgatagaggctctctcctctggggaggattataagttattctttgtggtaagatagacccaggaagagcttattaaatgataatccctgataaattccctttaatcacctatgccctcttagtcatggaaaaacccctacacattcaattaactctttgaaagacctttctcatccccttccttctctcccaccccttcccttcccttcccttccccaattcctgcttcctttccttccttctgatggcttcaggtttatttgtttagggtatgttcatatacttgtgtgttcatgtgaatgtgaatgctgcccttgtgggtgcttgtgttcttgcacctgtttgtacatagaggccagagatcagcctcaagtgtaattgctcaggtactaatcactctgagacaagtaagacagggtcttttactggccccaggaactttctggttagactaggttagctgtccagaatgccccagtgatccatctgactctacttccctagcactagaattacaggggcaaggctcagcaaaagtattgctaactgagctatcctaccatgtcttataagatttaaccagggccacccattaagcttactaatatttattctttcaacaaacatgtactgcgttcttactgagagctaagttggaatgggaacttggatccacctgctccttgcagttgagtgtcgagccttgtggtagagaatactacattcagcaggtacaggggagaggtcggtgaggtattgggataaagtacagaaaacccaagtgtggtagcctctgggaagtcttcctagtaaatgtcaggttcaatcatgctttgagtccaaacttttcaggtagaaaagcagaggcaggcaccccagagtatagcggcaacatgaacaaagaacgtggagctaggaaagaactcggcattcaagaagctatggtcttgtatttggcaggtgctggggagaaaacttatacagggtcggctgggctcagacacactagaggctttggccaggacagtgctacagcatattaaggggagatatataggttagaaatgacaactgccccccagctctgaagactaacaggatctccctggcagtagaatggcagttgtgcaactaaccacagaactggctgtgtcagctttccagattcaccaggtgtctgaggcagagaagaaactgtgaggtcagggtgcagagttggaagaacatcccatctgggtagaactctgagagtcaggaaccatcgtcctgctgacattgctactgtgaacgcctgcacctgtagctctgttctcagacatactccaagggaaacatgattagttctttctcttccccacccacaggcccaggtaacacagcgtactgagagaagaaagagaaaatctaggtgtgggttctgcctctttagtatattaaccaggagacatttagacttgcatacccttattgtgttctttttaaatttttttgtttttttattatatattttttaaagtttgagattataaggtatacattatttccacttccctttccttctcccaactcctcccatgtaccccactcctttattttctttaaaatcatagactcctttttatttgattttacacacactcatacacccatgcctgtacacaggtatgtatatgtgtgtttgtgtatgtgtgtgcttgttttatatgtgtttgtatgtgtgtgtgtttgtgtgtgtatgtgtgtatttgtatgtgtgtgtgtgcatgtgtgtgtgtgtattactaaatacattgaatacaacctgttccatccatataatgttatttctttgtataaaatttcagggctgaccattttttatcctcccttggaaagacttctttttccagctccaggatctagttgtctgcagttctttgtccagggttgaaacctctcgaattttcccactttcacattaacctactttttgatgtccttgttcaggtgagattttggcagtcttattggtaagacttgatgagtgtatcctctctaaaatttctgggagacacaatctcatagcaaggtttctgctcctctggctcttacgatctttctgcctccctcctctgaaataatcacggagccttaggtaatacgttatgctgtagatggatcaattgggtcttgggtccacatctctactttttgatcagttgtggttttctgtaatggtctctgtctattgcaaagaaacgtttccttgatgaggagtaagaactgtacttttcagcagctataaggataagcattattatgtagctagggattatactggtttagtaaaatggcacttgtaggttctccaccaagatccatgacctcagtgtccctaggcagttatctatatttctagtatcaggcttaccttggttgtgtttagcatatagggtgtagattagaatcagtatatctatatccttggtagagtatccagcccaaagtagatgcttaacaagaggaagtaaaaactacttttatctctttaatatctctttgataccttgaggtcaaagacacaggacaatattttaagatgtttcaatggttttcttagtgtctcagatagagtatctgcctttggacaacttaggtgtgttcttgtgatactcattgtctttaaccctatcacatcacacctggatgaactcaaaagtttcctacaagtagaagacacacaaagcaattctttccaccattctcggattgaggaagtaatgaccattatttattatctgtattctgtttcagatgtatacctcaagtgattaaaaatgttgggttgaattgagctttgtatacatgtgtgagtcaagggaagaatcaacatgaacttctatgagggcagcttcagagtgagccagagagtatagctcaatggatgagaaagatgctggaagtagatgattagaacctgggattgagggcaaagtgaagcatattgagatggaatgggaatagatgtctcacatagacacctactgaaaggacagattcccctttagatagtctcgggcacaggagttagtgatggttataggatactggtgatgtacaccaggcttctcacaagtaaaggggactagcatttagcctctgacttcccctaaattccacagtagccacaagaggggaagaagtggtaccttgtgcttccttgtagcccagtgctacaagtatggggaactaatctgtcatcagaccttagagagtttcacctagctcttctcatgtctcaggtgataagcagacatgtaggtttcttgcattcattaatcatagcaccagtacaagtgaaatttaacatgctttccagagatgctgacttaagtcctggagaaacaaaaactcatgaaccttgggcccttgctttcaagctgttttttccccttttaatttagctattaattttacatcctgattgcagcctccctctcctcccagaaccccccacccacccatatagcctcttctcccccaccccctccacctctcctcttagaagggggaaccccatctctggacgccaccctggcacatcaattctacagtggcagaactagggacatactctcccactgaggccaagcaaagcagcccagttcttattgaaaagcaggaggttttcccgggaccacaaaacccaaaagcaattgctctggagtttcttcaggaagccagcaaggctaaccagcatcacctagggtttggtgcacagttgttaattaacccagatatcttccatgataaattaatttaccttctgttcagaatctggtgagaaggaaaaatgaaagccaaggcaaatgattatcctgacgctttttccttgggtgtctgcgctaatatactgtgaacatttgagctagctgagtgtacctgctgtatgtcaacagagatgccattttgcaagtgatctatttatttccagagaagaaaactcatataggcctgtgaagcagaataatgctaggagatttataatcttttattagtcaatactattattaagaatctcttgtttgtagagtaaatatccttggtattggtagaagtacatgcagaaatatgagataaggttctttctccaaaaagcatttagccctagtgggaagggagggacaatatgtaaaagagacagaacagaacccattttaaaaagatctatgagtaagactaaatgctgaagcatagcacttaatgctgaattttcagttgcaggtggttttttttttcccttactgacttagcttttttatagataccaaagcccttgactacaattttcctttcccgttgatttgatgcccatattcaacatactcagacatgttgaatgaatatacatgctactatgaggtatacctaattgctgagggaaatcctggagtggtgtacttaggaaaagccttatagatccgaggagagtctctaagtatgaaaggacccaagatctggtagaaccaggaataggggaaggagcaaaaccagaaggactcttggacaatggcagatctgtagttcaggctgccgatgagagtcccctatagcctgattcttcttgtcttatactgccttccttgctactgctgatgcaactatttgtagacttatcattatcatctatctcccttccttggaatgttttttaattagccattagagagtttctttttccaaattcagatgaaagaaaggtcgcctaaaactttgcttgatatctttaccctttctctatttaaattgcagtattcatagtctgatgtcagtagccttgaccttaagcagaggtgtcttcctcatgtccttaaactttatggagtctccagatataatcttgtgataatactaattccataggaaatactaatgggacatgtggtcatatgcaagattaagtaccaaaaagaatatgtagaataggggggctttgcagagtggtttggaagttagaagcctggtattctagttttacttgtgtatatgttagacttagctgtattcttcaggacagttcctgacaatgcaggccaagagggacaagttagctgtatcaagctcaggtacctttgactgaccatactccacagagagcattagttacttacagcagctcctggctcaggcaggtgctgccctgggacttgcttgtgtgtacttggcatgtttatgaagtctgctacaggtcctgagacataatgaaatgacttgcctcctggaactcaggaagaactttctgtcttctctccttccatctgctttcccattctcctccttgctgggggctgggagggtagctggggcttgcaggatcctgcttgtgtttgttttccctaagaacagtggttctcaaccttcctagtgctgtaaccctataatacagtttttcctgttatagtggcccccaaccataaaattattttgttgctacttcataactgtaatttgctactgttacaaattgtaacgtaaatatctgatatgcaggatgtctgatatgtgacccataaagggatcacagcccataggtcgagaaccactgccttaaagatggtgacaatgtggatgggattgatttcaggcattctgatgctaccggataacaagagtcagagtctcatgaaactgagtcactacagctctagagtgtggatacagatccttcagtaatttgtatcctcaaaggagtcattatgcctctctgggtttcagtttcttctagaaaatgatagattgggccatgtaaactcataattttcttcctggtatgcagggaaccagcttcaataatacatgggtgggattcagaatatccaacagcttataagctatactgttcattgtgtcattttcctaaaacacggggtggcaaaagcatccagtggctctgttgatagaaatgtcaccaaacagctatgattcaggtgctgtcagcctgttaaggttagtcaaagccctggcacggacggtataaaacatctcaagtcagattccttagaaatcgactctgggatggaggtgcttgcttactggatggattatagaggaatcagtgctaggagattcctgaaagaatgggagaaaagtaggtaggttggggaacttgaggcagagatgtggtctcagaagtgtttgtatcagccttgttcaataggcagttccaagtgtgaatgcataacacgagcgtttcatccagcctgacagaggatggaccatcaacgcttcttcagctcaggcagctcttggccacaagtcctcccattatcaccacaagggtatgaagttcatgttgaggctggtcttttatccaggaacaggcttctaaggaggggccaagaatgaggctatcatgagagctattcagagatagcacccacagcagctggggatgaatattcttgtaggttatcggtagaaagtctggccaggggcagcacaaactctgtcacacccaaaccactgactcctatgggtggtttaacatatggaagggagcattcacatggcactaaccaatgatgagtcctgcctagtggatacttagagacgtcaagacttggttacagttaagaaaggaaaatggtagccagaagaggcccaagggctactgaatactgatgtagtaatgtacattatgaaaagactcatctaagaggtatcctgtgagttttattcttttttatgtttcagaatatctacatgggatcgggcaggaggaggtactgcatgatagtatcattcattcaaagaaagcaccccttttccttcttgtagaccacacctcactttcattcatgggattctttctcttaagacacatcatttcctttctgttgaccagagtgaatccatcacttgcctgagcaccccactgtcccttaccaacactggcctcatttgcaattatacttttctgtgtgttttacctgttcacatgaatattcctattatactacaagttccatggtgagcaagactgtgactgttcttctgttcgattatctttagaggaaagaatttgctccttggtaggtaattcatgaatgtgtaggatgaaatcacttgagttccaaaacagaccacctaagtcccttgaggtaggatggaggccccaaggcatagtgttaggaggaaggagggacaaggaggaatagttacttggtgaggaattgtctgcctggttcgggaccttaacagaaggtatttgttgagaaattgcatctgtattcacatttcacaatcatgttccttttcttaggagtggttagcattggctgagacaaatggtctgtctcttttggcagtctggtagctgctccaccaccttccaacctgagctattagtaattagtgaaattgaagatctctaattaagatgcagtcctgaggccagaggtttttagtctgaagctgtttttatctttccatgcaaaccatttggaaattctggagacattttcatttgtcacaactcagggattcccactggtatctgttaagtggaggccagggctatgctaatacctgacagagatatgcaaaaccctgacagagaatccccctgacctcaaatggaagctgtgcttcggctaaggaagcctgcaatctggtttgggtcttctagctaggactgcctcaaacctgggaataagggggttccccaaagactgtttctaaagaattcaggaacctgctctttctttcccaatactttcagccataagcatggcatgggggagttcagcctttttgctcagagctgctctgagaagcaagagcatgacttgcaggtgcttcagcatccttttcacagagctgggtaggaccctgtaagagttctgaatgtatgtcctccgagaggaagaactataaggcccctttctccttgctctttccattcctatctttctctcccatttggctcatcctgccctatcttcctgcatctctcccaccccacccccgaagattaatgtgataattgccatgtgtgcctgtttacacagggagtgggtgagcttaccaccctcaatcaggcaggttcccaaagaaacgcagtcccacgatgtcaggactggtacccgctgagcactcctgtgcaggtgggctgccacccccaaacttctttctctgtctgtcatcatcgttgtcatgtgcacatgtgcatgtgtgtgccattcagtgaagcgacaggtgagaaggaggagaaacagctagactagcatcaggagaagggccaggcagaggaattgctatgcattataggcacatcagcccttaaaattagaggacaatgagccaaggaaaagctctctctaatgcctgtcacgtggtaggcctgctagggtactccagggaaaagcaacgggccaaggaggaaagggttcagtaggagaatcagaggctgggatgttcacatgaggctgtttgcaaactggtgaagccagtagaagccagcagaaccagtatgcctctacctaaattgggagctttggaacaatggaaggtaatggtacagctcttagacccaggccaaataaaagccacaagtctttgggaggttacttgttcaaatcccaatgtcaagttcagctggagttctaatgtctaaggtcaggagaatagcatctggttctaaagggcaaacaatcaatgtgaggtttgagattgtcatatgaggacatgaggccagtgattccgccttttcatttccgctacgcccatctcagatctagcaagtgggaggcacctataatccaattgaggtgtcttccatacctgggactctgatccacaagcaaactttctccgggtatgatatatcacacagaccaagctttgccagccactcagacatccttcagtcccaagttcgtcattgtggcaagtgttccataggtgtgaaatgatgaggctgttctctacgtgacattcattgcagagaaaggcctagtccacagttgtttcccattggaggtctgggtgggaaagattctcctatgagactatactggggcaggaactagcagatgatattttggaagctgcagtctcatgcgtcaggattttatcggaagaccttagcatggctatctcatgttcctaaaggtaaaaataaggtttgagtatcctagacgcaaaagtgccccgtgagcattgcaacagtcatgggcacagtgacgagcaaaagggggagctccttttctccagaccgtgacctcctatcccctctagagacagtcacctggacagcccaagagaatgacccggctctggccacactgccaatggtaccctgactcacagcatcaggatgcttcatgccttcagagttgttgattgcttcatttttttttaaagtctcaaaatatacacactaaaatatagacatctctcctacactggacaattttaagtttttaataatgatgaatcagaaggagatgaaagctccatttagcatctgaaagaaccttgccattttgaaggagggaatcgtgagcaaagtcctctgcttgcccactttctgatgaggagtgtccccttcatcccgttggcttttggaccacaataaacatgtgaaggggtgggaagccacctggtcagaaaaggtggaagaaggaggacaagaaggaaactgcttgttaggagttgagtgtggagggaattcagcagtgatgttgaaaggccctgagtgatggcggacaggcgctatcaagcttctctcttctgcaggaccttttgagctgccagtcatttccttaacccccagaacatcaagctgctggggctgatgtcttcacagctatcatttcccccttctcttcctcttcttcctttttcttcttccaggatgccccattgctgaaatagatgacgtgtgtaattcagagaaaatttcacagatggataaaatgttaccagaatggatttgtattgatctatttttaacaagcgtgtcgtcatcttcaaagtgtggccatttattaattaattacctctgtgtatgccaaaatcttcgtcatatcccagatattaaaatactcagatagttaagagtaaacccaaagcattctcagccaactctggctggaccagtactgtttgtcatgtgagttttgtagaggtattaggaaggacatttcaaagtcttagtcagtaagggagagattctcttatccttttgtctcatggaatatatcctctgatgtattcatagagttgtttttgtttgtttgttttttttgttttttttgaaagagaagggttcaccaccaaggaagttaatgaaatggtatagtgaatgaagtaagcaatatggctttccaccattcttctcactagctgcgagacatagataatctgccatttccctaactttctctggttaccaaacccattttccacaaaatgccatccttgccttctacaaatcacagcaatgcagagtacgcagttttatatagttatataggtttcactctgtagccgccctagctccctttcaaccacagctcagtgggagatcagagatacctcaaaatccacaatttcaacattgccactgctgatattgacacttttatgggcagctgagctctgatccaggtgcttggtgtaaactttgtccctgctgccaaagaacactgaaggagggactattgaaatcttaaagcaagtggattatattcatctggagccactgaagttaacaagactttaaagatatattagagtccccataatcatgaagacaggcagagctctgtggtgagcatcaatgtctaccttagctcacagcaagatgcacacctcagtcatctcagtcacacccacctgccccgttcttcacaccccacttggctctcagcatatggttctgctgcatcttctttctgatgatgagacatggctttctctgggatttgccctgtgtcctctctacttgtatctaaccaagactccggtaagccaaagtctctgacactgaagtaaggcagaactttgttccatacagtttaattttttttcatgtagtttgtttgtgtcaaattttgagtcaactttattccagtgatctgatctgtgatcagtgcagggccagaacaaaaggcacaaagttgccaaaaggacttgggattatttttaatggaagatttgactgtccagtgacagcggccatagacaatccacagataagttatgtggcttgacattggaatggggaaaaaaatgagacaaactggagagggaaaaattgattgggtttataaaagtccacaagaatcatgagaatgaccactttaagatatatttccagggtttcgtagtaaggattaagaggcacatagaaggcatggatggtgggccagcactgcgccacagatgttctgagctctggatctggcatttgatcttgagggacccatttccccaataaattagggacaaaatatccattgtgagtttcaaatggatattgaaagtgattcatgaagggtggggatagggagagtgttcaaaggtctgcatgtgggaagtacaaatccagaaaatcccttcagaaaaacttgagcaggaagaatccaatgaacaagacccattgttgagagacagcacctcagtattcttggagctcaaatttcaagggtctcataagacatggcaagtcaccctttctcagttctgggcgcctcagcaactctgcatccaacttggatacaagaatccataatctatatttctgtgctttccccccacttctttgtatcagcaagaggtagaggagaagggagcatgatgagagagcttgagggagatcagatctcataccatcactctgaaaaatctagacatagtctttgttctgcccagggctttgctggggccagacctgggccagctctgtattaccagcttgtgatgggtaaaggacagctaaccccagaactgggtaacataaggaagagcctaagtcgtcctaaggatcccttctaagggcttttctaacacccatggggtagggtgacaagttcagcctgcccttggttttttgttttttggttttttttctctttttctatttatctagcttaagagtgcaaaggatgagaataaatgttaccaagaactataaagccaactcacctttttatatccttggaaaaaaattttttttgatttttccattcagttttcactctttctaagtaagggtattagaattctctcactcaggatattgcagagatactgatgtggccttcactaggcacagggtaaaatgtgagttgtcttacaataaagtggagtggggttgggggtgaggtaatgttgaactgtatcacgccatgactgttacatcacccacggtatggaacctctggaatgcaagcctcgctcctggggtggctttaaatcttacgaaaccatttttctttctttcagaccaatgatgccttaggagccacctggaactggctgtacttcatccctctcatcatcatcggatccttctttgttctcaacctcgtcctgggagtgctttccgggtaagccatacttttttaaatctccttttctgagctgctatctgggggctaaaacctcctgattgaagataggttcactcacttacctgtcacgtcaaagacactgggcagacccttgtgccagtgttatcccagctatgtcagtgcggtaacagatgattgttttaatcaccttgattatttttagactttaaaacaatctatatgttgtgtacagttgtaaacacagtaccttgtgagttctttgacccattcatatttccattcaataactctgtgtcaagcactgtgctggttgctgtagacatatagttaaggaagacagagactctgtcctcaaaaaaaaaaattggttgctttgcagtatattggacatcacattacatgtttgtaannnnnnnnnnnnnnnnnnnnnnnnnnnnnnnnnnnnnnnnnnnnnnnnnnnnnnnnnnnnnnnnnnnnnnnnnnnnnnnnnnnnnnnnnnnnnnnnnnnnnnnnnnnnnnnnnnnnnnnnnnnnnnnnnnnnnnnnnnnnnnnnnnnnnnnnnnnnnnnnnnnnnnnnnnnnnnnnnnnnnnnnnnnnnnnnnnnnnnnnnnnnnnnnnnnnnnnnnnnnnnnnnnnnnnnnnnnnnnnnnnnnnnnnnnnnnnnnnnnnnnnnnnnnnnnnnnnnnnnnnnnnnnnnnnnnnnnnnnnnnnnnnnnnnnnnnnnnnnnnnnnnnnnnnnnnnnnnnnnnnnnnnnnnnnnnnnnnnnnnnnnnnnnnnnnnnnnnnnnnnnnnnnnnnnnnnnnnnnnnnnnnnnnnnnnnnnnnnnnnnnnnnnnnnnnnnnnagaccgtgaacaaaccatttttattcaacaaatggttaacgccacagtagttgtaaaagctgaagtttaatggcctccaagggaaaatgataataaacaggcagactgacacttcttctgagctcaagaaaggattgggaactagagacagcaaatattcctgagagctggagtgtacatgctattgaaaacaagagagtgataagaaatcatactacctgctcagtctctagataatactggctagtatctgccccctgaacacattaggaggtcgaggtctgagccatcaaaggttagactggtgacactcactgcatcttaaggtggtcttgacaatgtcatggaaataagaggcctaagtgacagttcctaaggtgagtgtcagctccacgacccacttctgtttctcagaaaagcagcaatctggcaatagtttagaggactctactgaggggattctgtcttaaaaggaaaagatctgtctttttgacagtctgatgaggtcagagaaacaggttccattccgtcagccccccagcaaagctcaccacgctcattccctatggctatcgcaataaacatcacaatccaggtagcataaaatggacggacatttaatcctctggtagtttttgagttacaagttccagatctggcaggcccgtgctccctccaagggctggagagaatcatttcttccatctcctacccggctttggtagatccaggcatttcttggactatcaccatgactacacgtcaccccagtctctgcttcagggctcacatggcctcttcctctccccggtctgtcattgccctccgtcttgctcttataaggatacttgtgatttgatttagaatcactgggtaatctagtttgatctcatcttttgaatacacttaactttgctggtatctgccgactcttttttccaaataaggtaacactcaggagttccaggaattagaatatgaatggtcttttgaagccagttgccattcacccactgcactgatacaccactggccccagcagaggatgcagagtttccactgccttgctcataagtgtgagcacacagccagggatcagcagcattggagggaaatgcccagtgtgaaggtcccttagcagcataataaggagacaagagacatgcatgactgtgagcagctcaggtagtaaaagataacgtacaagctcatgtctgataccagcagagatagagacagaagttcatacataaaataatagcttatgatgagagggtgttgagatgaggaagggctgtgggaactatatggaacatacacttgatgtgaaagcagtacaaagttgagttaatgtcaacatgtaatcaaaccaaaaagataataaagttggagtgagaaattaagggtaccacttagaaagtatggttaggggagagacaagagacagagacagagggaagcacagacagagagacagagacagagagagagagagacactgatagactcgaagagcaaggaatggtgacaggcactcataaccccagcccttgagaagcagaatcaggaaaaatcacatcctgggctacatagtgagaccttgtttcaaaacatttacaattgagccaacgctttagtaagaaagtttaataaagagaacaatgaagcaggaagaaagaattaacgtagaaaaatatgagagaagttcccagaacaaaagactcagcattgccagatttaaataaaaccgtggactcgtgtgcaaagatgttatttctggtgtatttcttggcagtgggcatgggaagcacggggacatcccaagctgggaatttagataggtaaactgttggatgcacccctggcatgtgctgtagcaataagagtaacagataccgtgtacacatggacgggagggtatcttaagaatgtttcagtgaaaacaaggagacaatgtgatatgttatcacatttgtatatgtataaagcacagttggtaaaatgtgtttaaatgtaaagttatgcatttggcaatattgtaacagttcatgtggcggaatgcagatgtgtaaactaaccattaaaatacccaagcgttaaaaagtacactccatataggaaaaccacaccaaggtaaattgctgcgaacttcaggccatcagagaaaagaatgttctgaaagtttctagccattgggtatatggctactaattggtataaggaaacagaatgccagggagtttctcagtggcaacactgaaaagcagagagctcctaaaacttcccaacagcaaaacggctttcacgatcaaatgctctgcctacccagagtgccagttatctgtatggacagaatatggacattgtcaggtacttttgggggaaaagcttgataaagaacacacgtcactaagaataaggaagcaagtaagaaagcaaggaatggagctggggagatggctcagaggtcgagagaggaccatgtggcagttcataaatatctgtaaactccactcccaagagatctgacatctgcaggctgtgtgcgcacacacacacacacaaacacacacacatacacacagagaaagagagagagacagaaagagagagaacaaacatatatgtagacaaaccgtaatacacataaaataataaagtaactttcaaaaggaaaagacataaagaaaaccatggtacgcatgtacacaagtgagtcagtagaggacaaagacaaagggattgagccctggtgttacagtgtaatggaattagggtaataactctcagtgacctagaggacatcatcatccaactaacatagggcgacagaggtcctcacatgctatctttagaaaacaagtgaaactaataaatgccccgttgtgttatattctgaagggctctgtgatttcttttggtccaactccccccccccccacacacaaaataatgtattctctctctctctctctctctctctctctctctctctctctctctctgtcagcatctctgtgtcgcctctccccatcccattaccccaacttaagcacttaattccacatcatgcacaagtgttactcctaacgaaatagaaacacagcaagtcttctgtgtagctcagctgacaacctggttttcactgttgatgctgaagcctgagctagtctcttgcaatgttgcaattgcctttataggactggagaatacctaataaaaaatatattaaaaaaaaaagactggagcaggggaggctaaccatggggacaggaagagggtatcaaaggccaaaatcttaggttccacagtcagcaaatcatcaagcagttcctaaaattgaaagataaagaaatagcagtgtcttaagtataatatttagaaaatgtgaaacgaataccagaagaaacagaagagttgaaagtggctgtctctggagagggagattctgggctggggaaaggtgagacagagggctgctagtttttttcattatgatccttcaaaacctgtttgacttttaaagttctatatgtacatctttgagaaaaataaaaaccttaaattttgaagtaaaatgatcagaaaacaagtaggatggacagacagagtaaggacacctatctaataccagcatggttggattgacatggagggaacagacacaggataatcaacaaggaaataattgcgccagtgttaccagtgtcacactaagaaacatggcagaactctgtaaaatggtcaaggagaagaaatggtggccactaggaaggggtttgtaactgtctgtgactatttggttgttcccagttctgtgggcatcaattcctctctggctgggagaccgtcttcagtcagaagatgccatgctactggtctggctgatgcctctttactacctgaaacctaagaagtggtgttggcagctggcaacagctggtgtgaaagaataaattctgacatttaaaggagtgttaacaagaggaaccttgcgagctggggctgaactacttttgccttggttttatttctgtattctggtgcttcgtacattgttcagcatttagaggattttcactggtgtctacagagggctcagtaccactgggtcctgtggataggaggggtcatgggctttctcggctacctgatctgtgagccctggcctctagaaaggatgaaacctctccgttggagtggagctttgtttggcattcacaagttgagcctcctgggatgtagctttgaacattttgtctccagggaacagggttctgtgacctgtgagtgtgctggatgttatgtgcccatgtgattccaggagtggagaatcaacaatttctgtatatataaggaagatacacattgctccctacattgagtaagagtcccccgggcatcaagtatggcagtgactgaaagccccatcccagaggttgagacactgatgaaaaactgtgaggcatgtttgttggcttcatatttaagaaggaaagatggatagaagcattgtagcatttttacgtgtctcagaggaaataggatttgatgaaaaccattagcttaggcttgaagagaagcagagcttcctgtctccatggcaacaaactagggctgcataagcacatcctgaagtgctgtcaggggctacagggcacaaagctcacacaaacagaaaatgaccctgagctattccagcttctccacctattgcttccagggcttgtgagagaggaagacaagtgtaggggccaattgtgctatctccaaataggggcaaggaagttaggccaaggactacttacagatgcactggggagcaatgagaaggctcacatatgtaaaatgtcttgtagttttcagagcaccttgcttccaagatcttattcatttcttgccacagcttgtgttggcacacaacatctttaaagacgaaggaaagagctaaagaaccgatctccgacaagttcttggcagaaacaggccagaggtcattgtcgctcaatctctggttaggtgcttatcttattatcccaggtagccttcagaaaggcttcctagagtgatgtcctggccacagtacaaagggtaggttcaaagtttaatgtgtacatgcattagtcacatgcttattcttaacacactggtgtctatatatgcaatgttaccttgtacatatgaagaagaagaagaagaagaagaagaagaagaagaagaagaagaagaagaagaagaagaagaagaagaagaagattattccaagacccactagcaagacctttttgctctaaggactgatggaaagaggtgaactgttaataagagaggaagggttcttctggttgcatttcttcaatgaccagagtagcttccatagcaagcaaaaagacaggtgcctatcttgctaccggctcatttactggctggatttgacaactggataccattcatcaaacctttgtttagtatttgctgcacaaaagacactttgttctcgggttgcaaatctgaataagacaaggtgattttagattaatgaaggaaataatttaagacatctaattgattgatgttcccaggatttgttctttcaaagtgtgtctgagccacatagaattgcagttacttgtgcatttctgctgcccctcttcaggtattacacccctcccccactgtcaagactcctttctcattaaccttctctgacaatgaaacaaagcaaaaataaaaggcatgtaatggggtctaagttctaggatcttgagattcaaattttgcgaaagttattacttaagatttttatatttatgttctatagtttaggttcaagtaattttgcaaggaattattaagtacataaaagtgagtaagacctttatcttggacttggtcatagaaacagactaactgatgtgtcttcaccttggatatcctgactcatctgtccttgcacattaggaggtgggaactgagccttttctgtgtctgacttgagacagaaatagttgctggtcttataaaataaattttccagtccaagttcagcagtccagacgagatccgagtagtgctggtggatattaattgagatgtgtctgatctctagcagacacgtagacacagttaaaaatcactgtgtgatttaactacacagcggtgttactagaatactaaaactaatgtcaatcaggagacatcactcagtttctcaggcagcagttactgagcatgcgctatagtgttacccagggtctgtgggtatcagattagacaagtccagagaactgctatccttagggagctcataatctaggtagagagacagcaacagggcaagcattaaaaataggtggatggcaatctgtctcagtaaggaaagatgcctacccccaagctcaacaaccagagtttgatccccaggacctctgtagtagaagaaaagattatcccagattatcctctgccctccacctggatgctgtagcaggcacatgcgacttccctactaatacagacataaatgtgattacaaaaacttagattagagggggaccaagatcaaatacaaatagctgaagagtataacacttctgcaaatttttgagagtggctaatagttagctagaacagagggaataaaaaaagacctttcagttgggttaaaaattacagagactcttgagagagtagggaggcaagctggaagcaagagttccagagagatgcaaggaccctatgagttcagtgcagtgaggacagaaatgatgtggtagggtgagacctgcaggatttgtgactgtaggacggtggttctcaatctttgggtctcaaccccttgtgggaggggtcgaaggactctttcacaggggtcacctaaggccatgagaaaacacaaatatttacattatgattcataacaataacaaaattacagttatacaatagcaacaaaaataattttatggttgggggccaccacagcatgagcatctggtatcaaagggttgtagcattaggaaggttgagaaccattggtgtagtgtctgggtgtcactgggataaaaatataaaagaagacaatctcttggctatttctggatttctgaattgagcttccaggtggctgggagagaacagagaagcaagagttaggttttgagggaagtgggataggttttggatctattgagttgagagaacataacacactttctgccttttggctagctcacagcagtggagtagggtttgtttcaggttgttatttttaaagctgtgatttattgagtctgtgctgtgcaccaaacatggtgccaattctacgacatacattgtctcatttaatcctcataaagatcctatgaggtattgctttcttctcctataaatggggaaatggtggtagggagggttggtagcctgcctacagaaacaaagctgttaagctgaaggatcagaatttgttttaaggtctgctgtggctgaacacctaaccctcgtgcatatctgccatgcagcacctatgatttgtccagaaagatatgttattgtctaggatccaggacagtgcaatttgatgaatacagaagggactatcagtggttaccagtacaatcctgtagacaaagactccatcttaaatcttatcaaagcaattacaacagagattgcataaagcctattttgagtagaaagatacttgtgtgaccatggggtaatatatgaaactaaatgaaaagatatgcaattctttaagatagttgtcaaaattgtaccttagagtatgataaaaaattctatgaggaaggaactctatgttatctttttgtacttggctcctggcctccatactacacaggaggaacctcacatagattataaataacttatttagtgactgggtgtcaggtcacagctaaaacctaggtttctttggttcttaaccaggaaacttttccaattctgtgccatggctataggtagaagtaaacaaggtttaccgtgtaaaccttgcatctgggtttttgtacagacgttgtacaaagatatgttgtagaacaacatatctttctgctcttatcattttgtggctatatgatattaattaagtctttttacttttctgtatcttcacttatacaattgtggcttaagatgcatatattcattatatacatgattattgaggaaatcaggttaggttgcaagtgctcagtgtttagtgtcttgagataatcaatacttaccactgggaaggaacgctctgttttacttaccacctacatccattgagccaattagcatgatctcaaagacttcaaatgttattctaaggctgaacatccgtggtaccctacaggtaacaggagaaatggacggggtccttatgccccacatagagacatcaacttaaacattcgatcatttgcattcccttggaaatatccttgcttttctaccctctgtgatctggagtaagcctcagttcgaattttaagtatcctttcacagtatattttaatattatttctcttttttattttttattttatattaatggcatgtttattagtactgtattggtaaggctctggcagagcctctcagaaaacagctaaatcaggcttctgtcaacaagcacttcttggcatcagcaatagtgtctgggtttggtggctgcaaatggaatggatccccaggtggggcagtttctggatggcctttcctttagtttctgctccactctttgtccttgtatttcctttagacaggagcaattctgggtgaatatttttgagatgggtgtatggccccatctttaaaccaggggccataccataacctctgaatatggtctctacaggttctttctcccctttattgggtatttcagataatgctatccccattggggtctggtagcctcttgctttcctggcatctgggactttctgatggctatctccagttccccatcacccattgctactcgcctctgttcagtttcccatccatacatctgggggaagaggatcataatttcacccattacatgatgttttccaggtccatagtcctgtccctgttctgcagtttaaagtccccccccccgatattcctgtagcactatgctatctttatagaattgattactaatcgtaatagaattactttatagcatttaatactaacactaaagtcaagtgctaacatttattgagaacttgtcatctgcctgccactgtgctaaatatgttgtgtaaagtatttcacttaatttttatagcagctttgtgaggtgggaacaattttcaactccattttacacatgaagaaatggaggctagaaggtcagagtcttgactaagcttgcctccctaggatgggatgtcgtccttgcactgaaattacaaatttcactgttgcctattgggttttttttttctttctcatattggttatgcctttctacacagttggatctgtatttgtatcctagtaactttaaattttttttttctgagttgaagaaaactgagctatgccaggacctccttggggaatgccatgcccctttgaatcccacagatattgaaatagcagagaaatggaagctctgatatctccagcagagtcacagattttggagatcttaaaggagtacatgccagttgaatggttctcttatgttcttgttgtttgtttgtactgagtgtgagggttacaaaagaggagagtctcctggactatttctgagtttctgagttgtttggtactgaaggttagaactacagtcttactaagcagtcactagcactaagtatatccccagacaaggatgctcattttttaattttatttttttatttatttacttttattaggtattttcctcatttacatttccaatgctatcccaaaagtcccccatacccacccccccaatcccctacccacccactccccctttttggccctggcgttcccctgtactggggcatataaagtttgcaaggccaatgggcctctctttccagtgatggccgactaggccatcttttgatacatatgcagctagagtcaagagctcaggggtactggttagttcataatgttgttccacctatagggttgcagatccctttagctccttgggtattttctctagctcctctgttgggggtcctgtgatccatccaatagctgactgtgagcatccacttctgtgtttgctaggccccggcatagtctcacaagagacagctatatcagggtcctttcagcaaaatcttgctagtgtatgcaatggtgtcagcgtttggaggctgattatgggatggatccctggatatggcagtctctagatggtccatccttttgtctcagctccaaactttgtctctgtaactccttccatgggtgttttgttcccaattctaagaaggggcaaagtgtccacactttggtctttgttcttcttgagtttcatgtgttttgcaaattgtaacttatatcttgggtattctgagtttctgggctaatattcactcatcagtgagtacatatcatttgagttcttttgtgattgggttacctcactcaggataatgccctccaggtccaaccatttgcctaggaatttcataaattcattctttttaatagctgagtagtactccattgtgtaaatgtaccacattttctgtatccattcttctgttgaggggcatctgggatctttccagcttctggccattataaataaggctgctatgaacatagtggagcatatttctttcttactagttggaacatcttctggatatatgcccaggagagggattgcgggatcctctggtagtaccatatccaattttctgagaaactgccagactgatttccagagtggttgtacaatcttgcaatcccaccaacagtggaggactgttcctctttctccacatcctcaccagcatctgctgtcacctgaatttttgatcttagccattctgactggtgtgaggtggaagctcagggttgttttgatttgcatttccctgatgattaaggatgctgaacattttttcaggtgtttctcagccattcggtattcctcaggtgagaattttttgtttagctctgagcccatttttaatggggttatttgattttctggagtccaccttcttgagttctttatatatgttggatattagtcctctatctgatttaggataggtaaagatcctttcccaatctattggtggcctttttgtcttattgacggtgtcttttgccttacagaagctttgcagtttcatgagggcccatttgtcaattctcgattttacagcacaagccattgctgttctattcagggattttttcccccgtgccaatatcttcgaggcttttccccactttctcctctataagtttcagtgtctctggttttatgtggagctccttgatccacttagatttgaccttagtacaaggagataggaatggatcaattcacattcttctactcgataaccaccaattgtgccagcaccattttttgaaaatgcagtctttcttccactggatggttttatcttccttgtcgaagatcaagtgaccataggtgtgtgggttcatttctgggtcttcaattctattccattggtctacttttctctcgctataccagtaccatgcagtttttatcacaattgctctgtagtacagctttaggtcaggcatggtgattccaccagaggttgttttattcttgagaagagtttttgctatcctaggttttttgttattccagatgaatttgcagattgctctttctaattcgttgaagaattgagttggaattttgatggggattgcattgaatctgtagattgcttttggcaagattgccatttttacaatgttgatcctgccaatccatgagcatgggagatctttctatcttctgagatcttctttaatttctttctttagagacttgaagttcttatcatacagatctttcacttccttagagtcatgccacagtattttatattatttgtgactattgagaagggtgttgtttccctaatttctttctcagcctgtttattctttgtgtagagaaaggccattgacttgtttgagttaattttatatccagctacttcaccgaagctgtttatcaggtttagaggttctctggtggaatttttagggtcacttatatatactatcatatcatctgcaaaaagtgatattttgacttcttcttttccaatttgtatccccttgatctccttttgttgtggaattgctctggctaggacttcaagtacaatgttgaataggtagggagaaagtgggcagactggtctagtccctgattttagtgggattgcttccagctcctaaccatttactttgatgttggctactggtttgctgtagattgcttttatcacggttaggtatgggccttgaattcctgatctttccaagacttttatcatgaatgggtgttggaccttgtcaaatgctttctccgcatctaatgagatgatcatgtggtttttgtctttgagtttgtttatatactggattacattgatggatttccgtatattaaaccatccctgcatccctggaataaaacctacttggtcagaatggatgattgtttaatgtgttcttggattcggatagcgagaattttattgagtatttttgcatcgatattcataagggaaattggtctgaagttctctatctttgttggatctttctgtggtttaggtactagaagtaattgtggcttcatagaatgagttgggtagagtaccttctacttctattttgtggaatagtttgtgcagaactggaattagatcttctttgaagttctgatagaactctgcactaagcccgtctgattctgggcttttttttttttttttttttttttggttggaagaccattaatgactgtttctatttctttaggggatatggggatgtttagattgttaacttgatcctggtttaactttggtacctggaatctgtctagaaatttgtccattcgtccacgttttccagttttgttgagtatagccttttgtagaaggatctgatggtattttggatttcttcagggtctgttgttatgtcttccttttcatttctgattttgttaattaggatgctgtctctgtgccctctagtgagtctggctaagggattatcatcttgttgattttctcaaagaaccagctcctagtttggttgattctttgaatagttcttcttgtttccacttggttgatttcacccctgagtttgattattttcctgctgtctactcctcttgggtgaatttacttcctttttttctagagcttttaggtgtgttgtcaagctgctagtgtgtgctctctctagtttcttttttggaggaactcagagctatgagtttccctcttagaaatgctttcatagtgtcccataagtttgggtatgttgtggcttcattttcattaaactctaaagagtctttaatttctttctttattccttccttgaccaagatatcattgagaagagtgttattcaatttccatgtgaatgttggctttccattatttatgttgttattgaagatcagccttagtccatggtggtctgataggatgcatgggacaatttcaatatttttgtatctgttgaggcctgttttgtgaccaattatatggtcaattttggagaaggtaccatgaggtgctgagaagaaggtatatccttttgttttaggataaaatgttctgtagatatctgttaagtccatttgtttcatcacttctgtttgtttcactctgtccctgtttagtttctgtttccatgatctgtccattgatgaaagtggtgtgttgaagtctcccactattattgtgtgaagtgcaatatgtgctttgagctttactaaagtttctttaatgaatgtggctgcccttgcatttagagcatagatattcagaattgagagttcttcttggaggattttacctttgatgagtatgaagtgtccctccttgtcttttttgataactttgggttggaagtcgatttcattctatattagaatggctattccagcttgtttcttcagaccatttgcttggaaaattgttttccaacctttcactctgaggtagtctctgtctttttccctgagatgggtttcctgtaagcagcagaatgttgggtcctgtttgtgtagccattctgttagtctatgtctttttattggggaattgagtccattgatattaagagatattaaagaaaagtaattgttgcttcctattatttttgtttttagagttggcattctgtttttgtggctgtctcctttttggtttgttgagggattactttcttgctttttctagggcgtgttttctgtccttgtattgtttttctctgttattatcctttgaagggctggattcgtggaaagataatgtgtgaatttggttttgtcatggaaaactttggtttctccatctatggtaattgggagtttggctgggtatagtagcctgggctggcatttgtgttctcttagggtctgtataacatctgtccaggatcttctggctttcatagtttctggtgaaaagtctggtgtaattctcataggcctgcctttatatgttacttgacctttttcccttactgcttttaatactctatttagtgcatttgttgtcctgattattatgtgttgggaggagtttcttttcttgtccagtctatttggagttctgtaggcttcttgtatgttcatgggcatctctttctttaggtttgggaagttttcttctataattttgttgaagatatttgctggccctttaagtcgaaaattttcattctcatctactcctattatccgtaggtttggtcttctcattgtgtcctggatttcctggatgttttgagttaggatctttttgcgttttgtattttctttgattgttgtgccgatgttctctatggaatcttctgcacctgagattctctcttccatctcttgtgttctgttgctgatgcttgcatctatggttccagttttctttcttaggttttctatctccagcgttgcctcactttggattttctttattgtgcctacttccctttttaggtcttggatggttttattcaattccatcaccttctttgtcgtgttttcttgcaattctttaagggatttttgtgctttctctttaaggtcttctacctgtttagcagtgttctcctgtatttctctaagtgagttattaaagtccttcttgatgtcgtctaccatcatcatgagatatgattttaaatccaggtctagcttttcgggtgtgttggggtgcccaggactgggtggggtgggagtgctgctttctgatgagggtgagtggtcttgatttctgttagtaagattcttacatttgtctttcgccatctggtaatctctggagttagttgttgtagttgtctctggttagatcttgttcctcaggtgtttatgttagcctctatcagcagacctgggagactagctctctccttagtttcagtgttcagagtactctctgcaggtaagctctcctcttgcagggaaggtgcccagatatctggtgtttgaacctgcctcctggcagaagttgtgatccactcacagatgtcttaagatcctgtggagggtcctgtgtataccttgtgggtgtccgcagactccacgcccaaggtaccccggtgctggcgtggaccagaagggattgtgcccctgatcaggctgggttttttgcttcactatttaatgcagtctcaggtctcgcgagattggattggagcagcagctgtgttccactcaccagaggtcttaagatcccatggtgggtcttgtgggtagcttgcgggtgtcagcagactctgcgcccaagctaccctggtactgttgggaccagaagggtgctcatttttatatatggttgttagtaattattttctttcatgtaattgcttatgcccctgcccattttctctgtgctgtgcttatctttttcacataaacttaaagtatatacttagttagtaacaacattagcccttttatgccagatgtggcaaggtgtcagcctattggggatcatggacaaccacagctacagaagttgaatcagttgctattactttacaacactccatttaggaaacattttatgggtgctcacttatctatttctcacaagcagaattagacaagtctgatagttctcttataaatcagagtaaaggttacagtgaacattgcaaggtctagaaaagcttatcagtgtggattctgagagtcactcagcctagagtcccttggaatccaaagtagaacttggctggggggttatttctatggggatctttgttgctggcttctgcacaaaatgaggtaactcacatatgtgctgtaactcaccagaaaaatgcttattttgagtttattaacagtgaatatttgttgcaccagtgggtggtataaaccattcttgtagatgttgaagatttaagttccttcccctagggagtttgtgttcctaatttgcatgcataacctataattaatgtactgttcaccattgtagtaccccatgtttgggacaggatcctcagcattcttatattgaaaatgttgtgcccctgtgcccctgtcaaaaatcatgcttgtgggttttttttttttttttttttttaccgaggagagcagaggtacattctaagggtgccaccaaggtgaatcatcaagtgacaaaacatggttgtaggtaaaagtgaaattgtacctgggaaggacccatagttgtccccagatagttcagttcagataagcgaggccaaagtgtgaaaggaaaagaaagagaagtcagcaagcaggaccatcacaagagataatggaaataaggtcctattttataaagatttatatgctctgaagataagctggaccaattaagtcatgacatcattgagtgcctggtgatgatgaagacaccagcgaaatgtaaaaatgtccccattttgtattggaagattttacacatatggaatttctgatcagctacattcttaagtagctgtgatagtcctagtatccctaggtaatactgtaatttaatagagattcaagactctgataatcttatatgtatgtggatgtacatatatgaatatgtatgtatatacatatatatgcatacatctacacacattcatacattcatgtgttgtctctaatatatattctctagtctttgtccctctgtaaagtattcaaggatctcatgaaatacctatatcattatatcaatttgctttacttggtgactaaatttcaacctatttcaagaatgtttccaccttagaattaattttacttaccttctttttaaatgagggaccaattttttacctgtagagtaatatgaattgaagtaacatgtagagatgcccttgctatgagatgattgtgaatttaatttacccacctaatgcaaagtcccaaagtgtacacctgtacctatcccttagatttctaacttaggatgttccaaattgaattcagtatctcattgttggggaacattgctattaagatggcagtccgccatgacaggatggtttctgagctcagcacaaaatgtggggattctctttctcagtggaactttgcctgtctttgttgaaaagtgcctagacacaggtagctggcctcttcaggccttgactgaaaggtaaccttgtacagagctttctgcaaggctgcaaaactcagcacacacatccaactctggctgaaggcccacaagataattaggtattgcactataaccaatcagcccttcctgctaacttgatgctgtgacctaatagcccctttatacttgtacccataaaaaagcccttatcctatccctgaatcagtcaagttgactcatctggctgcaatggtctctcgaggtctctctgtcattccacctctcctctctttgctcaggttggtagccaaccctcttggtagaaagcgggtggggacacatctcattttcccattctaccattaaacatgcataccaccattcattattctctctctctctctccccgtctccgtctccgtctccgtctccgtctccgtctccgtctccgtctccgtctccgtctccgtctccgtctccgtctnnnnnnnnnnnnnnnnnnnntctccctccttctcccccctctctcccccttccctctctctcccatgctttatcattctttttatccaagatgaaatatcttaactaattttgattctttctcttatttattctctgaacctacttgtttatccagacatgctaatcctactcagaaatgtattgtgaactaaatcttggaccattctggactctgagtattctccctgcttttggccagcctgaaacccaggatgaaaacagttagttgcagttttgtttacctttgttgcttattatggcttcatattgcttaagtaatagaaccatacctgtaccctttatttaattaggtctttaggaaatgggtattgatcatctgtgtgcagtgttctaaatgttgggaacattaaaaaaaagcaaactaaagattcttatcctcatcaagcttgcatttgtatcccaggagagtctaaaaacaatgttataatttagataagtgaaaagacaatacccctccctttttaaagaatactgtaaagcacaagggatacgtttcccttattttagtctttagtgtagcattagagtatgcgatgaagatttttttacttgttgaattatgttgaaatttacttgaaaattatgtaaatatttttggataagacatttcagacaaagaacaatgggaaacagattttttttaaatctatatgtgataaaataagttccaaagtaaaaaggataaaaacagtagtatattctaggcgtaaagggactcaaatacatattatggatttatatatgaatttataatatataaatcatttgaaattggtgaaaatgaatcattcagtgaatggtattgatgactagctaattactttgaaagaaaaaaatggagttggatctccatcttatgacttacaccaaaataaaatggtggtggaggttgtatattcattttaacatttaaattgtaaaatgttattttttaattgtaaaatgtttaaaaattatggagaattaaaggtattttcaagcaggaaaggactttataaacatgacataaaacaaattccataaaggaaaaaatggatatatttggatgtataaaaataaaaacagatgctataattcattagcaggaacaaaagaccaaacttgagtttgttttgaattttatataattagggaagaaagtaacacaaggaaaggtcactgttgagcaggaagactgtaagaagtctctgacttcagagagaggaccatgatccctaatggctaaacagtagaggagaaaatagcctggcagatttaggtggagaataggacatggtttccaactccacgttcaagggaagatcctgtaaacaaggatggcaacctgtgaaaaccttagagggctttgggtccatttcctgagatgaatagtattggcaaaaagagaaatcaatagtctgaaagaaagatgctttcagtctcagacatagagggtttgaggtttaaaaagaacaaaaaaatagatcagccaatatctgtatacttagaacataggaagagaagatgcgacaagttatcagaacacaacagaggaaactgtatcagtgtagacaatgtgatccaaggaaaacattgaagaaagaaaactcagatctagggatggagatgtggagaaactaagtttaaaagtcaggaagtctagactgctcaaagagaatcactaaacctaaagaaagcattgctttgtaggggacaaagatgtgtgggccttcaagagagagtaaggaaaccccaaagggtaaatgactcacagagaaccaaaaagtagctgtcaaagttggcaaatcggatctatctgtctttcttttcctttctacttagagaaaactctaaagtcataagaagatagagaaaaaagttccaaggtagcctttcctttagctccccgacataacatcttacaaggctatagcatgatattcaaaccaggaaatagcattggtataattcattaagctcatggagatgttctcagtttcacatgtcttctttgtatgtatgcttagctctgtattatttctgtcacatgtagatgtgtggaattgtcattataactaagatatgggctgttccgtcaaaagaccccatcttctcttcatagccatcctcacaatcttctactataaccccaacttcttcgtatttttaagatggtttaaggagtataaccctatgaaatgtaagattgaagtctatccccaccgaccctttctacttttgattagtatcctattatatggatgttccacattttgtttaaccatttactccttggaagacatctgggttttgttcatcttggctcatttataagtaatattacgtagctttttttttctgcacaggattttgagtgaatatagatttttctttctctggaataaatgcctaacactacaactgctataccatatggaaagtacctatataagaaacttcctaaacttcctattttccattcagagagaatttaccagtttatatttgcctatactataaggggcttgtgtttttttaccccacacatttcctgatcgtttaaattttcaataataaataatgaatattaataaccatcacaagcatgtggaaggtttaagacagtatcaaaaatgtacaccaatgacttttaagtagcatgtttcttattaaaatagaaaaataacatcacataaaagtattgagtgggtagaaaatatgaatacagagttaacaatgtctaattttggcagttaaacaatcttgaacaaacatcttaatcactctacattacctcaccatcaatcagcctttcagtgaaagagcccaagtcagtgtccctcatcttggataccctccaacctcaattctaagtttcctctaccttatccctgctatccagttgctaggtgtagatttcccagataatcatttctttgcctagaaataaccaagctataataaccatgtctatgttttgccttatctggggacctctgacttattcttcaaggtcaagttcttttcgcactaatagaatttatttaccttattttatcagactttttcccctggaactctgttcctttaacagcattatgaaggcaggcaccatagtgagttctctttccttttccccagcacttagctagcatatttaacaagcacgtgggtaggctctgggaaaatgtcctctggcaaacaaatcagaggtcaacttcctgtttgggacatctgtatctgtcagtaattgtctcaagattttcaggaattattttcaggggctataattccccagaaagcctagttcacgttagctgacatgcgaggcacagggtactgcagtagaaccctcttattctgacagtgtcaagggacacctctgcaaacagtatcatgcatcttccccttcacttggagaaagggacaatgagtataacctcagtgtaattgtgtcttttctgatatagagaccctttaattggcttcctttgttctgttgtaatttatccagtacgctcacttcacagtagctttcaaaccaaaaatcttagctgtttgagaatgactttaaaaacaaaacaaacaaacaaacaaaaaaacctggagcttacatctctttttctggtctatagaacatcttgataattggcttcaccaagaagaaacctgagtgttaaaattcattctgatcatatagtgtatagtcctgcccctgcagttagacatgttttctatgaacttgccagtgccatggctgaagtacaacctcttgctagctctggttgataatcaccgtctttacaacttggcttgtatgcttggtgcttggcatttctagattttaagttcagatgctgagagagctgtagctgaattaagagttctttattttccccctggtgtcaagtgcatcactaaattctcaacacttaattatcattgcgtcccaaaatattcctcatttagcaaaaatattgaaatgactcgttcctgttgaagaagcaagctctgatatgcagaacactgagatgtatgcgccatcgagaacccgagggaatgaatctatttgagagcatctgcagggaatagtagggaccacaaagcccatttaagggccatgtgcctcttacctgtattgggctcaatcgggcaaccaatgtttagtggcaacaacccactgtatgaagttgacagaaacagggaatcatcgcactctcatccgagtttattggagtggcattaaaacgagctgtgatttccttccccgtccccacactcccttctatactccacacaggtgtctcctctatccttttgtctctgggatttcatatcataatctctacttagatcaaggcacccaatagtaaaatattacatagcaggatggtcttattaatagccagaagcatcttattgagcaagaactggaagaagaaggtgcaagctgttggtttttccatagagtgaagtaagaggagaaacatctgtcaaaatgcttgctcagcaaatagacattaaacactcattcatgccagagactctgaacaagatgaggcctctcaccatgagcttcatattctgatagctagaaaacaacacaagcagaggtgttacaaagaaaatagacatacattggataacaacattggttcttaggaagaaaaagtggaagactcaaaagatgactgtcagcatgctatgtgtaggctggcctgacggcccctgtaggttctgggggatagatgccacacccagctcaaatgcccactccctcactgttcccatgagtgtggttttcagtgggcaatgtcagtctgagaatgtgaagacccaaccaactgacctgagcatctaattgtattaactaatctacttggggacagccctgttctttacacgattttaaaaaaaaaagaaaaagaaagaaaatgcctctcagttaccagcttaaagctgtcgtagtggattaaagtaactcagtatacgtttcagagataattatctgacaaccatggatgttccttttattgattttgttatttgacattgtcatatgtgtatatagtgcattctgatttctctctgtccccccaccttcttaatcttccccacttcccatcaaccctgcctcacccttctcaaccctacctcatccctatcagttcctctttcaagttcatgacttttggggtttttgactcatttagtttaaccaggcccatctgtgtgactgttgtgtttaaatgatccactggagcctggcagggtcattactgggtacccaaccgaaggcaaagatttcctgcttctattgctgtcctttctacttcctagacttctgtatatgcctctgtatataccttctgcatacatttgtgaagaggaaaactacattttaagaatcataaggctgaaaagagttggagggtagttcaatgtcaacttatgcatccccagagaggaagattactcatgcagcctggtactcatttccggccctcttatccagtggaattctcagaggctgaagcaaggctgtctgggttgggctgtgaaggtcagttgtagagataagtcaatcacacatacaccttctttctaggaatttcttgtctttctatccttctcaagatttttgtcatggaaaatttgaaaagtagaatttcagtttatattttaggtcatgtagctgttctgccctggcctaacagccccctttcttctcctttcttccctgttgagtggtcaatcatttgataaattgcttagcttagtgttttggactgagttcccttaaaacaaagacaaatagacaaacaaacaaacaaacaaacaaacaagaactactttaaaaaaacagattggctggtttatttgagtctttagctacaaaggagaccaagtggggaatttgaggcacagaaggggaatgaactgagaatgtacgtggagagggtcaggctcattccactggaaactttcttaggagctatgtacagtgtgtgcgggaattgcttcaccaatagacagggaaatagagaaagtgtgtgagtgtgtctgtttgcctgtccctgtgtctctctgtgtgtatatacctgtagttctatttctcccttattaattaccgacctttctcaagttagcacatttggtttgtgctgcttgtgggctgagtgaacgcctaggttttagagaaattccccaagcagagatgtagtaagatgtggacagttaaattaacatagttttacctgtcagtgtgtgcagattctgtcctccacagcttcacactcagaggtagctgtaaggataaggagtgtgtgtgtgtgtgtgtgtgtgtgtgtgtgtgtgtgtgtgtgtgttcacaactcccacttctttggctccattcaaagaatagttccttcattccatatttgttaaacatttgccatactaggaatagcttttctgaggtgattaatgaagtaaaagagcagaattgtgattgggtttagctgagacaatggaagggtggccaatggctccgggtcagccatcacaagcaccttacaaggccaggagataggtgaggtgttatgctctagccatcggggtggtgtggggcagtcatgagctggacactctggccaaaactgcatagaccagcaagagtcctggaaaatgtggttgacattgtaccaccccgttcctgcagcgtaatctcattccccccacccactcatcaatttataccttgacatctgcttggagtccttggtcatttctcttctgccttttcttcttggcataccctactccattttatttcagtctgcttgtgtcctgctcagccatcctgctcctttccaaaaccctcctcactgcagaacagagcgttctcaccatcgctaggtagctccccagttacgcagctagttccctttgggatcattttaaggcattttggtatatagagcttttatgccttctgcacttggagaactctctttgttacagtctttgacaggataagttaaccggagtctcagttgaagtactcactcaggtttaatggcacagagtcaggtcctaagctcggttggaccttacgtttaaaatgtcattggtcctttctacctatgagcttcttatccacaagtaactattgcttgaaaatatttggaaaaaattacactcaggggtaggagatagctcagttaggaaagtgctccacatggaagcaccgggacatgggtctgatcccaaaaacatacattcaaaaaaaaaaaatagagttttgtttgacactgcacgtttgtaacctcagcccagatggatcctgaagggcttgctatttggtgagatacaggctagggactctgtctcaaaagtaggtggtctgtgcttagaggatgacatctgacaccaagaatgtcctctgatttccatactcatgtgcacactgtgtaccactctcttgcccactcatgtgtacacacacacacacacacacacacacacacacacacacacacacacaatgcatacacatacatataaacatgcacacacatgcattcctatagactgaaaattcacttgtactgaaaatgtaaagatgcttgttattgcctttattccctaaataatagattgccaatttgttgagggagcgtgaacagatagcacctgtagatatttgcatgtagggtattgggtatcctacagccaatttctcacgatgatgaggaaaacttacaccagttctcactacccagagggcttgcatctgtcaggttcatgtctattcaactaagaatccctgtgtcgattggcctgttatgctcccttgacctggttggtgggcagtgtaacagagcatgggctgtcaggaggaagagaggcctctgccataggccatcatgtgtatgcttactctcattgtcttcccctgggttaccagaatcccagatagtgttattgcagaggtcctccaggttgtcaagcagctgtgtggaccatacaactgcctcatctcctgggtcctggttataggcggaagcatgcaaccctccttcaggtgattgtgtgaaccaggtgggaagcatacttcttgacttcctcagatggtttgcatcccacgtgaaagttcaggttctttcttccctgttttgattccttttccttctcctacttgcctggttttagatggtaaaggttaaagctatataactagacaatcagtgcctcaaattttcttcatcgaggtatgtctcctccattcattttggtaatggtaggtcctctgatctcaaggggaaaccccctgtaaagcacatctgagggacagccactttctgtctcctagagttatagtcctcttgaatgtttctgagggctagacgtgaaaaacaagacacagcatgtttgcggtttatgtaagcaggaagaaatatatctgttccctgcaggagagagaaacacagctgatggctgcttcccaagccttgctcccaaacaccacagaccactgggagcctaggaatattaacatgagccatgaagatggggtgatttcatgtaaccagtcaggggcatgctgtactgaaatgtagagcatgtgaggaaaaaaataattacctgacagagataatggtcttactgtcttctgcattttgcttctcatgcaaaacacatacgtggtaagaggaggagagggagaggagagttcatgaaagggagaagaggaggagaaataaactttgaaaattccggttgccatggcaacataatgagctccaaaagtggcatctctgaaccagttttgcatgggaagataggggagcccagaagggaaagaattaaaataataaaaacaataaaactgcgatcatgaagtaaaggacacaggcaaagaggccaatagcacttcccagccgagtctggaggcctggcttgtcagctgcttgcccccagctggccatagctgaaaaggtgtaatctatgtcctgcgctggatgatctcaccagtccctgactctggacgatgtgacgctaagggattctgacaaagaagaccctgtgaattatatgtggaatgcactctgctccagaattgtcgagagcagcaggtctcaaccttcctaatgctttgatcttttagtatagtttgttcctcatgttgtgatggcccccagccataggattattttctttgctactccataactataattttgctactcttatgaatcgtaatgtaaatgtctctgttatctgatggtcttaggcaacccctgtgaaagggccattcaacctccaaaagggtgatgacccacacagtgagaaacactgttctagaaacaaggctgtgatcttgttctgttcctccctggctcctcccttccctctgccctttcttataaagagcctaagtgtgttcccttcagtgagcttcactgaagtcctgctaccagtgaggctgccgcatcactcaacccactagctaggacaaaaagtccctatgctggggacttactactccagatggctctcctcttcaacatgccctagaacaatacatgctcatatgaaagaaggcagcactgaatgcttaaaagatacagaccaagaaagatttgtaggctgtttgtttgtatgccatactcaaattgaaaacgaacccaaagcagattagaaatgttacttgtaacataaaaaagatgtgttttaatgaagataccccttgatattctattgttctcactcaatagtgttcatttctttctcattagaatgatgaaggaatttgtaatacataccctctcatcatgtaaccattgtttatctagaaacattttgagccaatctatcaattaacttgttcttagaatggttgcagttggggatcctgctgccaccttgtgcctacttgatattggaaacctaccaatatttgcctgtattctagtacggctcttccaataagcagtgtgtctgacagatgccaattaatatgtttgaagaatgaatgaatgaatgcatgaatgaatgaatgctttatctgaattaaagagtcagatcctcattatacagtgccataacttgaattaaacatgtcaagcttgacagaggatatacagatgaactaacatattacaatgagtacaatgagagtggcaactctctctctttctctctctctctctccctctccctctccctctccctctccctctctctgaaataagcaaatcgtttaattgattatattatatctattaattttatagccccttttgtatattagccaggtaagtagttaatatttatataatgagttctatactttagaacaattaggggatgaggggaacttccttttccttgcttccttcagaaaatgattctggtccccaccctcctcacacataacatgtgaacatagaagactggctactcttggtcctttgtatccatgagctgtaaatctaaagagtcagctaaacttggatgagaaatatttgaatgcagtaatcccacctgtaccaaacatctatagactgcttttcttaatcccataaataacacagaccaacaactaattacacagaattcactttgtgttttgtattgcaagtgaccagagatttagagagtccaggagggtgtgtgtaggttaagtgtcactttatagaaggaattctattattcaagggattgaacatcagtggacattggtatgtgctctaatccacagatattgagggctgtgtgtttctgattctttctcctattaggctggtttgagagttttgaaggttttgaatgggcccttactaaaagaagaagagataccctagtgtgatggttttggattaaaaaactaggaacattaacccatcttttaactgcatacatgactgttagcaatgtttttcattctttgggggcctcagtttgtcagtctgtaaaatgaatattataagacgtcaaaggctatcactgattaaattggagactgaacctagacaatgcctattacagtagagctgtctagtagcatatgactttgatccttaaggacctcttaactcctgaagttggtactaaccctctttactgcgaagttaagggtttgtaagagcctctgaacatctaaaaaatgataaatgctattattacatactttctctcttgtgtttttttcatatccatgtataaatccattagtctaggaatggcagagctgcccaaacagatcacagtcatctgcataactggaaagtggatttatgaaagacaaaggaatatggggggaaattaaaacagagaaaaattaacaaaatgacccaagtaaccacagtagcaggaaaatgttttatattctctatttaactttcacgaaaaaacttggcaagataggtagtgctcccccctccccccaaatcacaagatggacaaaaacaggggctcaggtgcttgtccaaggatatcctgctgggaaaaggaggtctggcattttaacttaggcttttcttaatccaaagcatatgtactttgtttgacaccctgctgccttctcgaaattgcacaaagcaacaccattttttcagggggaggcacactcatggggcttactgatctggacagttgaggggggactaagaacataattctggaaggtcactctgatcacagaaaaaggaaatctgttaagcagagaaacagggggaagggtatcctctaccaggagattgcttctgtgttcttagggatgacttgatctaggtggggccaagaagctgagttcacattcacaatgctttttcaggacagtacttgagggtcaagggtcctggaaaagtctgttcacatcctgacctgtcaatggccgagcaaagaacatgcttgactgagaagctcaaagggcgtggggttgacaagacaaacccatgatcaggaggggcccaaatgtatgaagccaacattctgaagttgactctctggtttcaggaggccatttagagactagaaagcaagaggtaggcaagggaaatcagaatttataagggaggaagacaggatattcagaatgggcccttgtgaggtggcctgggcaggtttttcttaggcagcgaatatcttgaaatatttgcaaggactgaggttgatgtgctatggtgaagaattctccagacagcatggggtagatagaatttgagttggagcgaggctacaagccacaaatgtggcaaccacatgggcccgagtgagtgaaagctaccacactggggaaacatgtgggctgcaaagcaacagagccaagagaggcaagagctaagtgttccctagctcatgttctctgttctgcatgcacactagcctaggtgaccctgccttccattctcctgcttcctgacgggaaaccaagaatgacttttgcctattacctaccagtcatagggccattcaacagcaaaccttaccacaccctgtccatggtcttcatccttctcagggaacacatgttgcccaattaagagtctcttctagtcatgatgtgttagaacattttatgaggtctttttcttcccttaggtttctccttttccagttcctacatttctgaccacagcctctcagcattcctcagagtagatagagccatatttatgtcttagtgcctgtgggtactgtaacacaataccacagacttggtgccttataaactaaggaaatatggctttcatatcctggaggctgtaagcacaagatcgaagcagtggtagactcagtggatgccgacccttttgcggtctacataagacaaagcagacaaatgagctctctgggtgtgttacaaaaagtaattcacccacaaggatccatcttcacaacctagtcaaggtgcaaagactggcctccagcaccatcattattggagttatgatttcaacactgacatttaagaaggacacagacaaccatagcagggtctagagctaatgggtcaaaggacctcaccacagatgccacttagacgctcaggctgaccttcattgctgaattcagcgagtcacattggaggagagctggaagggagcataggtaggtgatgactcagagcagatgtgccacatggcaattctgcccacgtttcatgagtcggagctagtcacctggctgtctaacagcaaggggaaaagaacagcttggaagaactggatgatcttctcttggtctgggagaaatgccgggtcccccagagggagtgttagctgcctgtgccttgtataaggtctcatttgccacctcagctaccagctagccctgtctttagggtcctcggatcatatcctaacacttggcctttcctgtgccaaacagccctccatgtaacccaattttcaactttgagatccatctgaggtgcttttattccagtacccccacctcctctttctaatgaccccccaaccccatttagttatcttggggagacagttctttggaattcctggttcttcctttcatggtctgcagaagccttttcattctctgagaaatctattgacctttccatcctcctgtctgtttttcagtctctttaattgtgttgcatccgtgtaccaaatgacatcatctccccatctatagttcttggcacaaacataactaatttcctaaaaaatagatctaatcacgcttctcccctatgtgaaaccactatggttttcctgtaactcacagaataaagcgagtcacatggagtcaccagagagataaaactgttgacaggaactagatagacatagatttgaatcctaagttgctacccactagcttgagttatgtaatatcactttccagtccatgagacaaagataatttcttctccacaggattgtatcatatgtctttcattacacatgtctgccacctgattagtgagggactctggaaaagtcatctaaaacacccaattaaaaacctaggctattgggcttgccattctctggtccgatctgtctcagccacatatctcctgattgtcatgggggaaagaaaactcaggagaattttgctctggcaatgaattatcttaaacatacctgacataactagtcatgtgattccattcaatagcatggcctagaagacaaagccaaaaatatttttatgagcaacattgataactgaccctttgggctacctctagctggatcaagctctgatatttgggttccatgactgtagctcaggtaatattaacacattttccttagtctacttctgaagaggatggcacatacatctttaagacaagagctgactttccaagatgctctagctagaaagaaagtgggtgatgttttagtgacttctgtcagttataggtaagaacactgaaggaccgagaggaataagatgtccaccctgctatccagccgactctgagcttcagcctagctatcctgggctatcatttttcccttccagctattccctatatctggctttatttttttcaggggctagtttttccactcatttcctgtatagccttcaagatacaatgtcttggacaccttccccagctcatcccacagaactgaatgttctctacctccatttcatcaagcccatttataacgtttaataagttttattggcttatgtgtctgtctccttggaagattaaatttacttgcataccacgatggcatcttcagtatcttgtattacccaatctagcaagtgattcttttaacttgtgactctggacaagattctgtacccgagtgacagggaacagacaaataacaaacaaaccccaacaatttctgcaaccacacaaacatgcaagacagggttcataccaaatcctctggcttctggctttttaaaaactgagtcagtttgtcattcagcagtgcggtctggccatgaaatcctgccttggcttctgagtagccaggactggatatgcagatcgagatgtgcagcaaagatttatgacttcttccctagtcattttccactgcttgtaattctccagtgtcttataggtatgtattcaatacctcagtatggggcttaagagaccgtttctgatcagattgccctctttggtcttcattagcttggctgacttgctttgtatctgcttgatgctaaaaccacatttccattcaagatggattcttcccctaaagaaaaggctttttacaaaatctaattattttaacctttttagtgtcatgctacagaaaacaaatcggctaattctaggttgcagtttgacagcttttgaattaaaggagtctaaatggctttgggggacttaacgtattgcaaagactgagttactcctgagatcgtttgtatgaaaatggtttgtaaattgtgaagtggcctataagtatgatttggaacatcagtactcatgtatagtatgtgctgaatgagaatttagtgagtgaatgaggcttcttttttccctcaggcatacgcttttgaagagaatgcctttgctttgctgggccgctcagtcttctttacatatgtcatgggagttttccccctccattcttttctgtttccccgagactgtgtcctctgtttgaccccatttattgaatatgaagtttcaattatatccaggttgtagctcagtttgatggacaaaacataaataaaattacttttaagggactctccaagctttgcttaaaagaaagtttctcacaggttacctctgcctcatagtgcttttgatagggaaccaaggatggcaagtatctgatcaagactggagtctaggctctctggcttctttgtctacctatcctagtctactgaattttctgataatcattgttcatcatttatctttttgtcttcacttggtgataagactatggtctctatcccttattagttctctactcctctaagtctgcaaggctatagaggccacgggaacctaggctctagtatttagttcacagcttcatgtctctaagtgctgacccttctggctgatatactctggttcataggaagatgaggatacctctgatatccaggcagttcatcttgggttgctgacggtagtaattatgaggcctccccaacccagtgagggcagtagaatcatgggggaattacccactgtctgaaggtatttaagaaggagggttattgatagcaaaatgggagtactcagagaattctgtatcagagttttagaattctatcttaccttaaagatggatgaagatgttggatgatttatgatgattttcttttgtcattgactactggaattatcttcatagcccttgttgattggcaagattggaaatatgcaatagagggaaaaattaattaatttcccccttcattcatagattttgagaggtggtggtggtgggtacataaagcttctgttgaaaagaagggtacaaccatctaacctttaggtgctgggtagggactgaaactacgaattaattgggcagtaggggcctggataagaactagaacaaatgtcatattcatcctagttatctttgtcctctaatggactgttccaattccccatccttccctttaatactccctcagtgaatgaagatatctgtacttttatgctcttatggctcactcagatttagggccaactccccactggaaacatggtttgtattcattgatttagtgggtggaggttgtcaagaccacctctccggtgactagagcattgtcttcgaagaagcaatgtgcccatagtcaggagaaaagcagcttaagtcctactcaggtaagtacaaggcagctgagctccagagactatggctacagttatggatgtagctggcatatataatttcttggggtggaatatgtttataagagttttgtaatcatctgtgatagtatatggtatattgcagtttccagagtgccttgattatatttattcttttatctctctcataacgtcaagagaaatcattgcacccattttgtaaagagaggctttattgatgacttgtgtggaatcacataactcaaaaatgcccaagtagggacttgaagcaatcccttcttgtttgttgctttttctcttactgttcaactctttcccaaccatgaaaaactattttttcatgaccatggttcactgattaaaaacaaactcaatccaatcaacatatccatcacttcacatcttctcatttattggtggtcacagaacattcaatatcttgtcttactatgctgtataatagacattcagaatacatttatgttatttaaagaaactttgtttcatttggccaacatctcgtttgccttcccacactaacttatggtaactaatattctttctgtttctaaaaggtcaaaattttagatgtaattgggatcatatagtatttatttttctgaatgtaggatatatattcttcagatttacatccctctaatctaaatgcctggcagacactcttaaggaaagataccttttggctctgtttcagagggttgggtctatgatctgcttgctttgtggctggggacctgtggtaagagtgtggtagatgaaagtcacacaggggaaagatgattacttcattcagccagggaaggagagagaggggtggctagaatcctgtccaagagatactcttcaaagaagatttatagtaattcacttccttcaaagaaccattcagtatgaactcattaatggatgaactcattaaagtgtttaatctcctcataagtcttagtgtttgaatccaccaaccagggactcagtatttaacacacaagctccagagagaatactttgtatacaaaatctgcctgcctcagttatatataaaacacaacataatggcctttaaatttacctacgatttcacatatgacagaatctcttttcagatgcaaaagagtattttgttgcatgtgcatgtgcgtgtgtgtgtgtgtgtgtgtgtgtgtgtttgtgtgtatctcattttccttatctactgttttgatagacacttagattgatcgcatatcttggctattgtaaataatgctttaataagcatgtgagtactgatgtccctctgatgtactaatttcatttccttggatatataccatgtagtaggattgctggcgaatctggtagttctctctttaattttctgagcacagtatttctttaatggctatactgcttatagcctcaccaacaatgcacaaaagaacctttcttcacattctcaacaaccttagcttttgtcattttgaaaacaggcattcaaacatgtgtagtgtaatagctctttgggattttactttgcatttccatagcaactaatgatgttgaactggttttcaaatacctgttcctcacctatatttctgcttttgagcagtatctgctcaggtcctctgtctaatactttgtcagatgtgttttctttccccgctgtggctgtcttttaaattgttgtacattttagatattgatccctcctcacatatatcattggctgatactttctcctattctgtacgttgcttctccatcctcctgcaatgttcatttcttttggtactcagaaggttttttaatttgatggagtgctgcgtgtatgtggttttgcttttgttactggtagtttggggtcagagtctagaacttagatgcctagaccaatgtgaggaggttttctcttgtgcctttctagtaggttttagtctctcatcgacatctctatcccattttgagttgatttttgtgtggtgtgggaactcattttcctgcattatcacactcaggctctctagcactgttccaagaagatcatctctttcctctgttgcatatttttgctacctttgttgaagattaatgatcacacagatttatttctgggctctgtattgccttggtttggtctgtatgtctatttgcatgccatggccatgctggagtcttgttttgttttctatacttgcttgagaaacgatcttcttatgttgcacaggctagtttcacagttacaggctgcaatgatccctctgcctttgcatcccaaggagctggtattgcaggcacatgccacttatccaaatactatgtggtttttgaataccataactgtgtaatttttagattgggcaacgtggcagtttgttctggactatgcagtactttatggctgggattgcttctttatatttccaaaagaaatgctattagaacttcaagagattatatcaaatctctagattgctttgggaagaagagacacattaagagtgccagcttttgtaacccaggaatacaggatacctttctagtccctgtctctccttttgattttttcctcggtatgttatagcagtaggcatgctataagagatcatttacttccttgagtaaatttgttcctccttttcatactattgtctgtgggaatattttcttgctttgtgctttttagaaaatgtattgttactgtatatggtttctatatgttgattttgtattttgcaacttggctgaattttattataacacttttgttgtagcaatttggcattttctgtatataagattgtgtaatctgcagatgcgaatgattgtattccagatgtctttctttgttgttctcatctaattgctctggctaggacttcctccagtaatatgttgattggaagaagcaacagtggatatgtttgtcttttcctggtcttcaaggaaaagcttttagcctttggccatagagtaaaatgtaagcgttgagattatatgcgaccttactagtggttctcaacttcctaatgctgcgaccctttaatacagttcttcatgttgtggtcatcctcccccatccataaaattattttttgttgcacttaataactataattttgctactattattaatcataacataagtaactgtgttttcctttggccttaggtgacccctttgaaaaggttgacccaaggggtcctgacccacaagttgagaactgctgttctgtgcctaatctattgagagctcttatcttaaaggaattttcaacaaaaaagctgatataatttccttcattctttgatgtactatatcaaatttattattttgtgtatgtgtatcatagtgaagaatctttttagtatcctgttgaaatcagtatgttaatatcatacagggtatttttaccaccccaaaaatctctctgtgtccttcatattcattcctttccccccaaactgtaggaaaccaatatttttattgtctatggttttgcctttgtcaatatttcatacagttgaaacagtccaatgagtagcttggttaatttgctatagctataacataatacagtgggctgtattatttataaaaggaagaggtctatttgccccaaagtcctagaaattataagtcctaaagtcggtgtccatattgttataggcctcatactataccatatcatagcagaaagcacactggcaaggaaagacatgcagactgaacttgatattaacatttagttgtaactgtgaactcagtcttaagagagaactcatcaccagaataattaactcagtcccacaagaaagacaccccttttgaatatttattcatccatccctgaaaggcccctcccaccactataatcatagtcaggtttcaacatgagtttataggggacacatcctaatctaacagcctttttcagattgaatttttgcacttagtaataagcatacatttatgtttggccatttcatggtgtaacagatcatttatttttagcgcaaagtaatacctcatttctttttagtactgaggtctggaagtaccaatttttctaaaactatttacctactaaagggcatcttagtgactccctacttgtagcaattatgtataaagctgctataagcatccatctaaaggttctgatgtagacagaagttttcaattccattgggtaaataccaaagagtataatcgctagatcatatggcaagaatgtttaattcccaagaaagtgccaaattgccttccaaagaggtggtgtgtgccattttacattcctactgtctatgaatgatagttcctgctacttcatagcctcaccagcagctgatgttgtcagcattacacattctgaccactcttgtcagtatgtaatgatgttactgttgttttaatatgtacccctcataacatatggtgtagaacagtttttcatgtgcatgcctaccatctgtttatcctctgtagtgaggcgcctaattaagattactcttaatcttgtttcttttcttgttgttgggtttaagagttattggtatattttagatagcattttttgttttttgagaaagggtttctctgtgtagccctagctgtcctggaactcactctgtagaccaggctggcctcgaactcagaaatctgcctgcctctgcctcccaagtgctaggattaaaggcatgtgccaccactgcctggctagatagcatttttttttagaatattttctcagtttatggcttctctcctcatcttcctgatgtctttcttagagagaagtctatagttttaatgacgtatgcttagctcccccctccctgggtgctttttttttcttcttaaataatatttttggtggcttttctaaaaactcattcttacaaccaaatccatctgagtatattcttagattgtcttctagaagttttatgatgcttttcattttaggctgaagttcatttgcttattccaattgcattactccatcaaaataccacagatcaggtaaatttgcaaatagtaattgataaaaactataaattgtttagttctaaagtatggacatctaagatcaagaaacaaatggatttggttgtagggtaaaggatctcttctctcaagatgatgccttcaggctgtatcctcaggggggcagaaggagaagggccatctggaggggcagaggttctatgcttcatgacacagaagacagagtgacagacagaagatgtgaagctgtttccctgcagccttttataagactccggtcttctttatgaaggcaaagtcctaatggctatttacttcctggtggcctgtgttctcaataaagttgcaacatttaagctactgcatctaggttgtttttcaacaaaaccttactgtgtagccctggcttacttggaagttactatataaaataggctggctttggacttacagagatcttcctgccttggcctcctgagtgctgggataatggtatatggcacatgccttactttgttgttgttgtttgaaatgttcattgatttatacaatatattttgatcacatctggcaaaaaacaataacccattgagcctattagtgatgcacatggatgtggtgttatctcttggtaagtaaaatcatgccataggccatgcttgatataaataaattgtccaccttctgtagcatccttcttaagcatccctcacttagggatggggccttagaatcacctactctgctagaatttttaacattctcaatctcatacaaggagccacagttcctgtgagttcatggatgtaacagccatgttgtgtccagaggcagcatttcatagctctcctctccattctctagagctttccttctttctccaaattcttttctgctattccctgtgacttggcaggggtatggagtggggacaatagcaatgtcccatttatagccgatcactcactgtcatgtaattcatagcatattgagcacttaggaatctcttcattagctagtatccatggcaacaagaagcctgaggttgagagatactcaaatctggatctcctgggctatgtggggcagcacttgagttaaacttctatggaaacttaaaactctataactatttttaagtttgtggaagtccattctgacactgttgaaaataccatccttgttccattgtgttgccttgggccctttggaataggtattcttgtttgtgtctattactggaccccaaagtctggctcacaaattcatctgcctattctttaacaatactacattgattcgattactgtagatatatactaagtcctgaaaatagccattaactctgctctttctttaacagggtattacatgctcttttgctttggcatataattgctagataatttggtgttccaataaccacagaactactttctgggagttttgtggtgattacagtgaatatgtgcattgggttggaaagaactggcctcttgacagtattgacccagcctatacctcccaacaattttcttatttgaatttattcacagggttttttggttttattcgtgagagttttgtaagttttatatatatgttatagttttttaaaatcacatttcatttttgagatgctaatgtgaatgacacattttaacttcacatttaatatgttcatttatgatatatagacaaccaattgttaactttgtgcttataatctccctaattggttattaattctaggagtgttgacatttaaatctttttatatacaagtgagatatatatagtctcttggaacttctttaaagacattgtatttggcatgaaataattttattttaattatagatttactttttttaatcttgattttgtattgaattgttcttaatgaagctgcatgtctgaatagttcaccagatctaaaaaaatcttacattgcaatattttctcaatatttattgcttttttggagttatgagttgattttttcaggatcttcattgtctctaatttccactgtacaaaataaaggtatctatctatctatctatctatctatctatctatctatctatctatctataactctatttatacagatacacacacgtgtgtgtgtgtgatatatgtgtacatattcacacttatctgccctattcactgacatttccttggaaatgtcttctgctatgtaacttacctgtgaaatataaatattaacaaaattataaaaatcagagatgataaataaaaagaaaaaaatcactgcagatccaggagactaattattcactatatactttaaggatatataatgaataattttcttcacccaatgtaatggcttagatgacatttcaatctctttgaaaatataaattactaaaagtgatataacagaataaaaatctaaaaaatgtatctattaacctacatttctaatctaaaactttctatttcaatttactttgttttacctagcagttctaccaagctctgagaaagaagtaatgatgttctttcacaggctcctttctttttttttttttaaattggatattttctttattttcatttcaaatattatcccctttcccagttccaaccccctcccagaaacaccctatcacatcctccctcccctgcttatatgagggtgttgtaccagcttgttccagaggggttgtaccagcttgcattcctaccagcaacacagtatcccttcaaatgcagagaataaatgacttcccaattcactcagtagctaccaccacctcaacacttagcctctcaactatgtcataagaaataaaacctaaattgtatccattatgaactggggtacaaatacaaacaacaaaatgttacccatcaaatctggcagaatataaggacatattattactaaacaatttttgattgcaagcttcatttatcatttgcaaaccaatcatcatgtataaagaaaagggcttagaacatctcaacacaggcaccaaaaggacttagcaaaatttaatcttcctgtttaataaaagttcatagtgaattaataatagaagataacattcttggtctgacaaaaggacatctataaaaaacctactgttggcctcagacttgatgctgaaatattatgaaatattgatcctcttctctgtaatctagaaatgtacaaagttgcttttgccacttcttttcaactcattgttaagtaaatttgagccattttaataaggcaaggaaggaaaaataaagggtatgtaaaattaaaagtgaagaggtaacactgcaagcttttcacagcagacatgatttatactgtaaaactctaaccatggtctctccataaaccactggagctggtaagtgagtttagcaagatcacaggatgctgatatcccgtgtaatatatacaaaaatacaaacatcctttgtaaatatacaaaaatagttggactatatatacttatgcactcataattatcaacttcattttcaatatgtgaattttaataattttaaaagtaatagtcaaatattcaagaataaataaaacatctatccatgcctcttcaaccaatataccgagcatactacagtaaatgaaagaaatcctaaagatgagcagaacacacttatggattgaaaatcataccagtgttaagcaatctgttatccctggactgatgtgtagtttccacatagtaatagtaaatgatatattagatctagtagtaccaaaaaacaagctaatgtaaagaaacagacaagatgattcaaaaatagatatgaaatacatgagctttagcatagccagaattattttgaaaaaagaacagtgttgcaggacttccatcatttggttttaagagttaccaaaatggtaatataaccgagacaaaagtccctcttttgtacagttggtgggttaatccatgagaacagaatggggcgcctcctctgttgtgtgggtggccagtttttaaatgaggtacaaatattttaattaaatctgcttcgtataactgatgctcccatggaaaaaaagaaaatctaaagccttgtcttttccagatcaaaattaatttgaggaaaatctttgaaaagttggagaaggaaaatttacttgaagagaatgtaaaaaaatcccaggtaatgcagtgagcagtgggagtccactctaatagcttccattgggtagcctttgttaaagtttgaaaacaaaagtttggctcatcaagatggacccttgagagataaacacaatggactaagggaaacagccccatcagatacatctaattttcagttttgactttggacattgtgctactttattatgagcttaggaatacattaattaaaatgctcattgcctgagtattttgtgtgaaaagattcctctccctccccccagaacatgtatgaatcattctgtcagaagaaattggttctttgatctttcatgttccttgcaaaatgtacccattttctaagtagcagtaggtaaaaatacagtcagagtgctaaagaactaccttacttcacaactaaacaaggttctatagctaaatctgatccctttctttggaaagcagagcctgtactttctaggggcatggctaggaggcattactacagagcaacagacaaacctactgtaaagaagtaagctaactctgaaatgaaggaataggcaaggatctgggaaagaatgctgacatgacatttacctctgagtgtcagtttttataaaagacaggttctggctatacatgtacccatatgtgcacatgcacttctttccctaaattcaggggtaagcacatttatgcagaaataatgtgttttctgctaagaactatgtaatacttaaactttgaatgcatcgtgacatttgtatgaggtccgtctaagagatcagtgtttattagcagaacatgtttacttgcaaaataatacagctgtttatgttggttaaaaatcagtgttgttcatagaaactcattctagtaacatctatttatgatataagggcaatgaaagttcccatctccctgtgcaagacaagaatgtgagttaaatgcctcttcactgatccacccttcaacatctctgagcaggatgagcgtaatagatcctatttgcagtccaggggccatggtgacttcatagtctagcctgttagctgagcatatcttggaggacaagagacagaagtgaggacaaaaaaagaaaaagaatggaggagaataaatgataccagaggaggagaagacatagaaagaagagaaaaagaaaagggcattgaaaatgctactcatacaccctagggtgctgagtcctgcaggtctccttgtcctccttgtcctttcaacctactggggtcagaggatatgattttgccactgcacgtgtatatgacctttgaaaagctttcaaacctctcttggccttgttatgtgtggtggagggtactgagtgtggacttcaggcctcatatatgcttgggaattgctctctgactgagctataaccctggtcctttttaccaatgaaagaatatcatgtattttgtgaaagttaaatgaggcagtccttacaaagcatttattggcatttctggagcatcaaacccaaactgaagggaactcatatgatgacctcagtgccacactttcttgccacaaagaaatggatttgctccagggagtctgtcaaactatctgtggtgaagaattactttttgaaatctccagtcaagtgtatgtgatatttttataaaacacttttattccaaaatggattaccagaaaaaaatgaaagtacaaagagatataaaacaaaacccctaatttttattctttttttttaattggatatttctttatttacatttcaaatgttatcctatttcctggtttgccctctgaaaaacagtctccccctatttcctcctccctccccctgttcaccaacccacccactcctgattcctgaccctggcattccctcacactggggcatagagccttcataggacaaagtgcctctcttcccattgatgattgactaggccatcctctgctgcatatgcagctggagtcatgagtcccaccttgtgtgctctttggttggtggtttagtacctgggagctggggggggggagtactagctagtttatattgttgttcctcctatagggctacaaatcccttcaggtctttgggtcctttttctagttccttcattggggattctatgcttaatccaatggatggctgtgagcatccacttctgtatttatcaggcactggcagagcctctcaggagacagctatatcaggagtcagcaagcacttgttggcatccacaacagtgtctgggtttggtgattgtaaatgggatggaatcccaggtgagtcagtctctagatcatttcttcagtctctacttcacactttgtctctgtaacttcttctatgggtgttttgttccatcattctaagatggatagaagtatccatactatggtcttcctgcttgagtttcatgtggtttgtgaattgtatcttgggtattctgagcttctgggcttctgagctaatatccacttttcagtgagtgcatatcgtgtgtgttcttttgtgattgggttacctcactcaggatgatatactccagatccatccatttgcctaagaatttcataagttcattgtttttaataggtgagtagtactccattgtgtaaatgtaccacattttctgtattcattcctctgttgaaggacatctggtttctttccagcttgtggttattatacataaggctgctatgaacatagtggaacatgtgttcttattacaagttggaacatcttctgggtatatgccagtggtatagaagggtcctcaggtggtactatgtccaattttctgaggaaccaccaaactgatttccagagtggttgtacatcttacaatcccaccagcagtgttcctctttctccacatccttgccagcatctcctgtcacctgagttttttattttagccattctgactgatgtgaggtggaatctcagggttgttttgatttgcatttccctgatgactaaggatgttgaacatttttttttatgtgcttctcagccattctgtattcttcagttgagaattctttgtttagctttgtaccccatttttaaataggataacttgtttctctggggtctaatttttaatcttacatttaatagacataatatttttgtcaaattgctctgattctgagagctttccatttctgagtgtatctcatcatggataggcaatgaagaaggaatatggcaacatttttgtttcatagaatctgaacacactgtgaggagcctatctatcctgggcaggaatatatgagtagacttagttaacttgaaaagttttaaaaagtctcttcttgggtggagggtatagtctaagatggcagctccctcatacttccaaaccagaaagaatgctgtacattagatccatgtcagggattctctagagtcgcagaacttatgggtagtctctatatagtaagggaatttattgatgacttacagtctgtagttcaactctccaacaatgatcagcagaagcagctgtgaatggaagtccaaggatctagcagttgctcagtcccgtaaggcatgaaggcaaagaagagagaatattccttcttccagtgtccttatgtaggtctctaggagaaggtgtggcccagattaaaggtatgtaccaccatgcctggatctgggacttgttttgtcccagatgaccttgaactcagagatctccttaccttagtctcctgggattcatagccacgatgcctcaagatccaggtcagaaacttgtatctcccagcctcaagatcaggatcacagatgagccttcaaatcttggattgtagtccattccagatacagccaagttgacaaccaggaatagccactacaatctacttcccaaagtcccatgtgaaaagtttcttctgaagatggtgaatagttagaatggagaaaaatcactaagggttcagaaacaaagactttcccaaaagatactgtcctccctcctccctgaagctcattagtatcctcttatgatggtaacttgttaccttgagtccaaatgtctggtttaatatatcaaaatgatgggtaattcagaattatccattcatagtactttgtacttctaaaagaacatttggagcctcagattcaacccatatctattgacagtctatcatgatggaggctatgtttggtgctttggctatgtgcctgttgacatagcagcttggtaagattggcagcattatcaatgccatttgttcagaaattgaatttcagagagttatataatttgtgtattcaaagacagatgtgctaactataaacacttactttctgctgtgctgtgggtttaattatcactcataatattttgtcacttctgtttattatggccttcactttccagggaggacagcaatcaataaacatacaactagatatttcctaaatgtctatctcaagtcatctatctgttcagaacgagaatttgctcacctgcttttgcacctcttacctctaataaacaatgatatttcagtgaggtggtaattagttagcttcatctcaatgaagaatttagcctatctgtaaggccacctaatgaagttggtgatttactaaaaatcctcaattttagaaagcctttgaaataaaggttgatgatcatcaactttaggtgaaactacagaggaacaaaatcccaactgtagcagaaaatacttaggcatagcaaacagtgtctggctacaatgataccttatagctttaaaatggttttaaagctcatataaaatatcaaaaggaagataaaactgctggttctaagattggcttggttgagaatgatttattaaaggtagtggtagtgttattgattgcatcaccagtagagatgatctataagactatgttacctgtgttttttcattcagtaaatattagttgagttccttctaagcatcacatatactattctagacactgaggaaatgataagaacaaggcagaagatacccttttctcatggaatttgcatcatatagaaggatagaaagtcaagtaattaaagaaagagcctttaagtgatgtgtgtccttagcaaaatgaaacattggaaaactagagttttacaggtagtgggatagtttttgtttttgtttttatttttgttttagtgaaccagtgactttttattggtgttattcagaggagtatgggtaaggggttacttacatgagcaggcataactaaaataaaaagcagctgtaatatggaaaaacccagtctaacatagaattggtactcatgaaagctctctgagaatctgttctcacagctcagctagtcttgagcctacctagcattgttccctatccccgctcctcccccctctgtctgtaacaccaaggaaagcccttggagaatttttcaagtttaagctttcccagatatgtgatgttttattgacatcctaagtattatgagccaatacctccctccaaaagaaaattttgattttgtatttatgaaagaacccctaaagtcaaggtgggagaaagataaagacatgatccatcaaatgttttataaactgtagtaagaactttggattttaacagtgggaagctggtctgtgccagtgtatcttgggtgcaaattctgaaaccagccccacagcccccagaggaggccctactctcaggccctctagcatacccaggattacaggattcaaagatcccagaaacttggtcacaccaggatctcagggtctcagaggcagcttgaataccaggaactctcacacacctagaatcttaggatttcggaatcactggatcacagagacagctggactctgaggaattctgactcaaccaggattataggaaggacaggctaggattataggaaggacaggctccagtcagatatatagagagtagggagcactagagataatcagatggcaggaagcaagcataagaacataagcaatagaaaccaaggttgcctggcatcatcagactcccaccacagcaagtcctggatacaccatcacaccagaaaagcaaagcttgcatctaaagtcacttttcatgatgatgatgatgataatagaggactttaagaaggacataaataactcccttaaagaaatacaggagaatacaggtaaacgggtagaaacccttaaaaaggaaacacaaaaatcacttaaagaattacaggaaaacacaatcaaacaggcaaaggaaatgaataaaaccatccaagatctaaaaatggaaatagaaaaaaataaagaaatcacaaagggagtcaaccctggagtttgaaaacctaggaaagagatcaggggtcatagatcaggggtcatcaccaacagaatacaatagatcaggggtcatcaccaacagaatacaatagatagaagagagaatctcaggggcagaagataccttagaaaacattgacacaacagtcaaagaaactgtaaaatgcaaaaagcgcctaacccaaaatgtccaggaaatccaagacacaatgagaaaaccaaacctaaggataataggtagagaagagagtgaagattcccaacttaaagggccagtcaatatcttcaacaaaattataaattaaaacttccctaaccaaaagaaagagttgaccatgaacatacaagaagccttcagaactctaaataaactggaccagaaaagaaatccctcctattacataataatcaaaacaccaaatgcattaaataaagaaatagaagatctcagaagatggaaagatctattctcatgaattggcaggattaatatagtaaaaatggccatcttgccgaaagcaatctacagattcaatgcaatccccatcaaaattccaaattaattcttcatagagttagaaagagcaacttgcaaatttatttggaataacaaatacccaggatagtgaaaactattctcgacaataaaataacttctgtgggaatcaccatccctgacctcaagctgtattacagagcaatagtgatagaaactgatattggtacagagacaggcatgaagatcaatggaatagaattgaagacccagcaatgaacccacacacacatggtcacttgatctttgacaaaggagccaaaaccatccagtggaaaaaagacagcattgtttttattagatattttcttcatttatatctcaaatgctatcccctttcctagtttcttctctgaaagttccctataccctcccccccccgccccccagctctgcacccactccagcttcctgaccctggcattcccctgtactagggaatataatcttcatatgaccaagggcctctcctcccattgatggccaactaggccattctctgctacatatgcaactagagacacaagctctggaggatacaagttagttcatattgttgttcctcctatagggttgcagacccctttagttccttgggtactttcaatagctccttcattggaggccctgtgttccatccaatagatgactgtgagcatccacttctgtatttgccaggctctggcatagcctcaaaagagatagctatatcagggtcctgtcagcaaaatctttttggcagatgcaatagtgtctgggtttggtggttgtttatgggatggatccctgggtggggcagtccctggatggtcctttcttctctctcagctctgaactttgtctctttaactccttccataggtattttgctctctattctaagaaggaacgaagtatccacactttgatcttccttcttgagtttcatgtgttttgcaaattatatcttgggtattctaagtttctctaatatccacttatcagtgaatacatatcatgtgtgttcttttgtgattaggttacctcactcaggatgatatactccagatccatccatttgcctaagaatttcataagttcattgtttttaatagctgagtagtactccactgtgtaaatgtaccacattttctgtatccattcctctgttgaaggacatctaggttctttccagcctctggatattataaataaggctgctatgaacatagtggagcatgtgtccttcttacaaattggaacatcttctgggtatatgcccaggagtggtatagctgggtccttaggtggtactaatgtccatttttctgaggaaccactaaactgattttcagagtggttgtaccagcttacaatcccaccagcaatggaggagtgttcctctttctccacatcctcaccagtatctgctgtcacctgagtttttgattttagccattctgactggtgtgaggtggaatctcagggttggtttgatttgcatttctctgatgactaagaatgtggagcatttctgtaagtgattctgggccattcgatgttacacagttgaaaattctttgtttagctttgtaccccattttttgatagggtaatttgtttctctggagtctaacttcttgagttctttgtatatattgtatactagccctctattggatgtaggattgataatgatcatttcccaatctgttggttgcctttttgtcgtattgacaatgtcttttaccttacagaagctttgcaattttatgaggtcccatttgtctattgttgatcttagagtataagccattgttgttctgttcaggaatttttctcctgtgcccatgtgttcgaggctcttccccactttctcctctataagtttcagcatatctggttttatgtggaggtccttgatccacttggatttgagctttgtacaaaaactccaaaaaaccaagatacaattcacagaccacatgaagctcaataagaagaaagaccaaagtttaggggcttcagtccttcttagcaggagaagaaaatactcacaggagcaaatatggagataaaatgttgagcagagactgaaggaaaggccattcagagactgtcccacctggggattcatcccacatagagttaccaaacccaggcactattgtggatgccaagaaatgcatgctgaaaggagcctgatatggctgtctcctgagaggccctgccagagccttacaaatacagaagcgtatgttcacaaccaaccagtggactgagcacaggttctccaatagaggagttagagaaaggactgaaggagttgaaggggtttgtaaccccataggaagaacaacaatatcaaccaaccagaccccccagaactcccagggactaagccatcaacaaaggagtacacgtggctccagctgcatatgtagcagaggacgacggccttgttgggcatcaatgggaggtgaggtcctcctcggtcctatgaaggctcgatagatgccccagtgtaggtgaatcaaggacagggaggtgggagtgggtgggtggatggaggaacaccctcatagaagcaggagggagtatgtgatagggtatttctggtagggagggaaaccaggaaaagggataacatttgaaatgtaaataaagaaaatatccaattaaaaaaaaagatgggaagctaagggaagaaccttaaattatagtgttttatatttgttttgtattaaaagttacctcttctctttcttctgtgatggtaataggagattgttattggagtataaacaggaagtcagttagggagcttattggatggacactactgtaggtgggaagcatccaggcaagaataacaagtagggttaggctggtagcagtgttgttgaagagaatttgcaagaactacaaatcagtaatggattggattgggatagacataagaaatacacaggaactagatggtccatccttttgtcacagctccaaattttgtctctttaactccttccatgggtgttttgttcccatttctaagaaggggcaaagtgtccacactttggtcttcgttgttcttgagtttcatgcgtttagcaaattgtcttatatcttgtgtatcctaagtttctgggctaatatccacttatcagtgagtacatattgtgcgagttcctttgtgattgggttacctcactcaggatgatgccttccaggtccatccatttgcctaggaatttcataaattcattctttttaatagctgagtagtactccattgtgtaaatgtaccacattttctgtatccattcctctgttgaggggcatctgggttctttccagcttctggctattgtaaataaggctgctatgaacatagtggagcatgtgtccttcttactggttgggatatcttctggatatatgcccaggagaggtattgcgggatcccataatcagcttccaaacgctgacaccattgcatacactagcaagattttgctgaaaggacccagatatagctgtctcttgtgagactatgccggggcctagcaaacacagaagtggatgctcacagtcagctattggatgggtcacatggcccccaatggaggagctagagaaagtacccaaggagctaaaaggaactgcaaccctataggtggaacaacaatatgaactaaccagtaccccggagctcttgtctctagctgcatatgtatcaaaagatggcctagtcagccatcactggaaagagaggccctttggacttgcaaactttatatgccccagtacaggggaacaccagggccaaaaagggggagtgggtggttaggggatcagggggctgggtatgggggacttttgggatagcattggaaatgtaaacgaggaaaatacctaattaaaaaaaatgaaaaaaaaaagaaataggtaggaacaactctagtgtaagtttaaaagacattaaaagagaaactatttaagaagttcaaatttcatattggactctttacattttaaattattgatcttcaaatacctaatatcaggtacacagtaatgtgtaccaaggagaaggtgaggacgactgcccctatcctcagttttcagcatccgaggcttgtcagtgagtaagcagacaaactcaaagagtggaggtggctgacgccccacagctcctggtgcaggctgtatgatttgaagtccaggtgctaagcctgtcagaaaaatgggacaaagtatgaggggggctttctaacataccttgagcatcagaatgaatggatgtagatactgtacacaccattccctccccacctaggtgtttacattcaagacagaagcaagaggtctgcctataccaggtccctaaactctttcttcctccctcagcctcccttgtatttccaccatcccttttcccattagctttgaaccttctctgtattccactggcctaatctaaagctcatggtggtgcttgttttcataagccagagtttttgacaatgagctgtgacatttgaccttttcgaaagggctcttatgaaattatctgaggaggtatagatcagtggattctgagaagcataatgctcattacaaagaaaacaaatatatatactcacagattggtgggtgtgtaatggccaacctgggaatagttctcactcacccctttgagcacagcaacacagctccttcctcctcctccttacccccctcccccctcctcctccccctcctcctcctctgcacctcctcaatttttggggagggagccacttgctatgctgcctcagaggagagcaaaatgtgtctcttaaaagaacacagccatttgttctctgtcaggatgcctctttcatactgtaattagagtgctgtggggggtgtgagtgggggagaaagaagaatatgaaatgctcctacttccctgtggcttattcttcctgcaccacagggttttgaacccagtgaaatattgtgactgaaacatacactattatatgcgtacacagagagaggaagcgacatgtgcgcctttgagttcatgccttgatagtatctatgtgccaaactgaggtggcacaggctggtgggtaattacacagagtgagagagctgaattctgctctgtagctcttgtctttcaccgtttcctagctcttgcaacaccccagagcctttatagtcctttcctaaaaggttttgtttgtatggatatttgtttagcttttgcaaggcttgggattgaactcaggacctcatacatgctagctaagcaagcgctacatactgagctgtgctgtgctctgccttgaaaggttttaaagacaaccatgtgagaactgtcacttgtcactgcccatagtacatgctcttccatgatcatccatctaatggaagggaacagagaaatttgtggaacaaacagtgcaacattcaagaatatttgcagtggttgttttgttttcagttttatttgtggcagtagcaacaatgggttttgttcagctgaaaattgttagcatctttctagcacatggcagcagaggagaaggtggtggagaagccaccctggctctgatcaatccacaggaatgatctttgcagcactggacacatcttgtgtaaataacagagcaatggtgctattggttcttctgttctttaatataaatgtgttatgaaatccagctgagttgcatgcagagatgagcccctgatcttcctctactccaaaccctgctttgcccaatgctcttcccactttggtaaatttcacttcttccttcttggccactaaaatcctcagggtggtccttgattaccctctatatcagagaggtcagtgtgtcctcttagccctaccttcagattatatccagaacttgaatatttctcaatagtcacactctgtccaaggccaaggtcaattgaatatgttctagaagcctttgctgattctgtctctaagtcccctccagtctctcctcaacagggcagcccgagacagtcttagcaaacttcaatcaaatcttgtaattactctgctatatcccaagtgatggtgtcctagttgtactgtgaagaatcgattcttctccccctccatctagcctcacactttcttacctcaccacattcatcttccactgattcagtcatctctgtccatattgctttgcttcttgcattccatgcctctgcccagaatgttccctgtgctccaatgctgttgtgtccttgctgccacctcccacctctccctggcatgcctctcccgagatacatctgcatgagtccctcctttgtatacctcttgcccttcccatgtatactcattgaggcctttactggtcatttaaccacaaagtctgtccttccctccagacctactatacattgtctgtcttctgttcccttgagcgtgggtcagtatactccaggctgcatattattctcatctcctctgccattgccttgcatgggaatgtaacctatccgaggataaatatttgcatataaatgattgatgttgagtatcatcatatgtaggttacttttgcttcagtgtgacaaaaacacctgtcagaaaccaattaaatgggagggacagggggattcactttggttcctgttttcagaaggtccggttcatcgcggtatttaatgtccattagaatttgtcagttatatcctttcaggccagaaagcagagaaagggtgatagggttctgctaggtttcttcttttctcttttttaatccatctgtagcctgagcccagggaacagtgccacccacattcaaggtggatctttgttcctcagttaattctctacagaaacagtctcacagacatgcttggtatgtgccatgccatcttctaggctgttctcaatgtgttcaagttgacaatgaagattaaccattacaatcatattctgaaacaatgcccaggatacagcaggcacttggaaattgtgttttggagatgggatggacggataaagaggagaatcttgggaataaattatctctgttatgctatattctcagaaatggcattagtacttacaaaagacagagtaaattctatgtgctagctatcagactggatttcttgttcttgttatttagtccccataatgaccatttaagatggctgcagtgtttattctgagtttacagatgcagaaccagatttaagagatttcttcaggttatctgtggtagagatgggatccaaaccaacgtgtgtccaacgtcagagtctttcatcactgtacttcaatactaccaacatcaacttttagattaaagagcaaaacaggaaacaaatttccactcattcattatccccacttcaggtaaatagcctggccttctttccctgtatctacaaaataaaaagacttcagattagaaggtaaagcaaaaaatgttatcctttctttgagttcctatggcatctgcctctttgaatctccatgattaaaaggctatgagagcgtggagcttggcaagctaaacaaatgcacaggtcagcttccatgtgttgtaaactatgggctgacaagccagtggtcctctctttgctttagcttttctggatatgaaagttgggctagggcagataattttgtaggttgtggctgcaagatatcctgatgtgagagatctgtggtctttcctttattgttgtggatatagagcggaggagcagaggctggagatttcatttcatagaatgccatttattttccataaccaatttgaagaagaatcactgctcttaggaggcccccactaaagtgcctagtttggagtgtggataacactgcgtgtctgagcatttgcatcggaacactcaccctgattatgagagtcaacaatggatgggatcttgaaggccaggttctgttttagccatcttttattgacaacctaagtctccttaaatccttcctggaacaagtcaagggccaagacataaataactgtaatgttactgaactgtgtgaccttcagcaaagtgtttgcctgctctggggctgtgtttgcttctctggaaagtgggaggaaaagttccccaggttcataacattgaacaccgaaaacatagcggtgaacagtcttgccctggatcaccccagtctcctttccaacagaaccacggtgaaagcaagagctcccacacagccgctgacttcgctgatttctgtgtttgcttcagaatacttaagcctgacaatgttttttttcttggtacctaacctaaatccctccttccagaagcaaggatcatagaaggatattggcaaggttcccttgtgggtagcaaagccttctgaaatgatgaactctgaagattgataggaatgtgatcgggtggcatttgtgtgcactgtaaagtccctccccttccccccacctcctcacccctgccacgcatatacttcagagtgctggtggtatgagcatgtgaatctatgccaatgtgtgtgtgatgaagcatgcaagtgtgtacaggagtgtgggtaaacagatctttgagtcatacaggccagtccatcctggcaggctttgtcttcctttctggttgccatgacagcagcaagagcctctgcatcagtaaacaaagctccctggatgcactgaatcaggagcagtgctctggaactaggggataagccaagagctggtagtctttccccagagggttttacaacagttcttcctaaatattttgtcagtagatgagccaagcaactccctttcgtttatgttggggtaggaggtaaggcagcatggcccagagcaaggctttagtgaccctcacttcaggtccctaggattcagcaaacaagatgatacatcctagatttgtgcttgaccaaagctcctcttgtcattacctcatgggctaacaccagctacagagatcaactgagatgtgaattatctgtgacaacagctcctttatagcttgataaattcacaaagtagaaatcaattttcatattaatataagcatgatttggaagtgaaatctgtcttctctccttttatccctccaggcatatatgatacatgcttggggcatccttcctttgtttgagattattcatgtgatatttctactttctactttattttattgtgaaaatatagaattggctgcatataggagttgattttaacaatttatggctcccgtggaaactactggaaaacaaacgcagccacaaatataaatccaataacaaaaatgaaataagccctctaccacagtattcaaaaaccaagtttcttacatccaataactgaaatttaggaactcgaacttagcatacacatgcagagaccaaaatggagagtcagccagatccaactccagctcaccttctttcaggattctgtgtcttgaggggacctgtaagtgatcctcacaggggatcagaatgggaagaggggcaaccccatactatgaatggcaagagtaagaaaaggccaatgaaggccaattcaggtgtgtttgtgattgtcctatctctttacaggtcactgttcctagagaagacttgttctagctttgcttgggaacacagagttttaatgagataatctctcaatggacaagtcctcaccaattagcctagaccagtggttctcaactttcctaatgctgtgacactttaatacagttcctcatgttgtggtgaccctcaaccataaaattatatttgttgctactttataactttgttattttgttactggcatgaatcataatgtaaatatctgatatgtgactcccgtgaacgagttgtttgatccccaaagggttcacgacccataggttgagaaccactggtctagactgactggctagtaacccccaagaatcattctttttactgggattagaagtatgagccattgcacccagctattctgtttgtttggctttggtattattgttgttgttgttgttgttgttgttgttggtggtggtggtggtggtggtggtggtggtggtgatggtagttctgtagtttggattcaggtcctcttgcttgcaagtcgacactaagtccccagccctttgggtttccttctaatgtcagctctgactgatgaggaaacagagaagttccctccctgttcattagcagcagatgccgcctggatgctttgctctgagaatagagctggtggtgcttctgctgcctcacatgctcatttatttttgttctggtttggaattccaaagactagacacaacacatgggcactccattacaccacggatgtagaaatagaggatggaactgattatatacattcgcatcttaaacccagacatatgtcaggccatctttctactatatgccagaactctccctttaaagttcagatgttttatctatagaaactggacatcgtgagatattaaaagggccactctttgaggttaccaaattcctcaggaaatttagtgacaggatctggtctctacataaggtcaaggccatgtgttctgactttgtaacagcattatttgtgtaatcccttgaattcttatacagaggaaacaatacttagattcttatgggaaaagaccacagaaagaacatgctgccctttctcaggcctagccacctaaatgcttagggtctgatggacatgtacgatctaaggatcgaatggctacttatttctggcaaatagtggagataatattatttacccctttcccttgtaaattcaatatgaatacatggtaacaatggcctgaacacaggatggcaaatataacagcagtctgactagtgctgtgaattattttctgggtcttttattaatccaacataggaattaattaacctctattctgttgtctcaaatgaaaagctcactaaaaacaaaacaaactaacgaaactgttctcatatttctacatttctcaaatttgagctaaaacaaaaatccagtctgtagattttaatcattgacttctcacagcaagggaagagggggagacagcttaggcactgtgggaactgtaactaacctgaaatggaaggtgctactttgaattccaactctttctctttgtgatcttgggcaaatagcctttctacacctttcagggttttgtttaccagggttgtttgtttgttttacaaatataacacccagaaatgatttttaaacaaaaaatataagtgtattatatgaacattaactgcaatattttatttttatactttatggaatctaattaaagagatgtgttaaaattctcagcttctgttcatatgtgatgccatgaaggctttgcctggccttatggagtctacagactagcaggcatgcaaatgtgaataaataacttttggcacaaaagtttgttctcttttctaaaagtatttttatgcagatatttcgaaatgtagttctgcttcaataattacgagtttttaactgttttcctctgtgcacacatgtcacctgttcttgcacccatgcatgtatgtgagcgctggtgcacatgtaagtcatgaagaagtcagaggacaacgtcagtgtctgtcttagagagaagaggacagcaaagaagaaggtggggagagtcaggaaatacacagttgccaatgggcaaacagaacagagttaaagccacttgataactgaactgccttccctttcctcagtgctgcagcagccagtgagggtggtgatgggtgtgcatctttaaaaaacaaataaacaaataaacaagcaagcaagcaagcaagcaagaaaaggcttggttctatttgtgtggctctgggccagtaagatccatccaggaaactaggtagaagggaaccagacctaaactgcagagaaaagggaagccagccagaaaaacaaaggacccagaaactttcaaaacatagagaggccagacagggacttgctggctaagcctgcccctaatcaaaccgcaccatgataatagaggcaaaaagaaggtgacacgggatgtgctatatatatattaattctacagaaattgtagttaaaaaaacaaaaaaaacaaaaaacctggcatccatgttctaggattccagcaatgcccctggctccctcgagctggtacagtgatgaaggttctgccttactgaaacttttatgacccacggcagaggagtcacctgcttactgatgagcacattcgatgctttgcattgttgaacatatcctgtgagtgaggcttcttctaatatgggaggatgaataaaatggataacatcttaacaaaatcttcctcttgttgggcatgtggtcacatgcctgtgtttcctacacttgaggggcagaaaagggtgggtcaggaattcaaggctagccttcgctatattagtgagttcaaagccagcccgggccatagtaagtgggttcaacacagaatagaatagaaaggaggtgggattttgaatatcccacctaatcaaaccacaccatgagttatggtttgaattatggttcctttctgtgcttctctagtcttggatccttgccatttcaaggagccacttgacacacttcagaattagttttctgagtcagatactggaaacacttgtactgcttaccctagatgctcagggatttccccattcctctggttagatcctactgagattctcctttgtagtaaaatattaaaaaaaaaaaaactacctcaggttgaatttttcccaggccagctcccagagctagttggaagtttaagacatgagcatatatgatgttatgaaatggaaggagatgctgatgggttattcgcaattaagcagcataaccactgaatacctggggctctgtgtgcagccaggcctgagttgttctaacctctccatgtcatacttagaacataacttttaaattttaagctaagaatcaaagaaccaatggtaagaacattggtgtttattgatgccatgaaatacccaggccactgttacttcttaatggatgaaatccagaaaagaagactacaagaagcatcccataccatgagttccactacccagaccctcagcatctctggccactctccactttcacctttgccttctcttcctccacagtaccatcaggaacttactgcatcttcagtcaagcgcatgccttgtcctcgcatcctcaacttgatcacaaccattgcgagtgggtcctatgcccaaggaaaccagttcagtgtagacaggaaagctaagcaaagcagccatctttcggtatcatgttagaccagtgtccctgctccctctgctgcaacaaggttacannnnnnnnnnnnnnnnnnnnnngttctttatttatgagtattaccttgagtacagcttccaactgtactcctgtgagactatcgtagcaaagggtagctggcctggaagggtagttgtagaatgcagtttatgctaccctgttttaagctctgagtggaccatgctactagccccactcaggtttctcagatctgcagatgaatagcacgtgcgcgcgcacgcgcgcgcacacacacacacacacacacacacacacacacacacactagcttactgctcaatggtcgggctcttctaagccttctttggccatcatacccttcttttcactcccagatcagcaccctaaatctgccctcagcttcagttgctcaattacctttaatcccagctcaacaccataaatctgccttcagcttagttatgtttctttttaaaaattagatattttctttatttacatttcaaaagttatcccctttcctcccttttcctccaaaaaccctctatcccatcctccctccccctgctcaccagccccccttccctctcctgattcctggccctggtattcccctataatggggcatcaagccttcaaaggaccaagggtctctcctcccattgatgtctgataaggccatcctctgctacatatgtggctggagccatggatccctccatatgtactctttggttggtggcttagtccctgagaactctgggagtactggttggttcatattgttgttcctactatgaggctgcaaaccccttcagttccttggatcctttctctagctcttccactggggaccctgtgctcagtccagttggctgagagcattcacctctgtatttgtcgagcaccggcaaagcctctcaggagatagctatatcaggctcctgtcagcacctcccacctgctatgccaggcccagtcagggaagtggccaatggccaccctatcctagatctcacctaactggtggctttttctccctccaaagcatggcgaatctctcctgttttgagtctgctagtcttccttcagggaaaactggaattcccacctattccatccagctcattggctgttagcatctttattgatcaatcaagaaccaactgtggaacaagaccttcagtgttcacatgcagattccctatcaaaacatcagaaccactcctttacaggtagtgactaggaaaggattggtagtgatagtttctggggaaactcaatagcaggtgattggttattccccatctgataacccattggatatgctcttcttctcttttttacttaccaaggaactctagtatcatttttctacctctctttcctcttttcctccatctctttcttctcttcatgctccttctgctctggagcataagaccgtgtggggttttgtgtatacatgcatatggaagtcagagataaagagataaaccttgcttatcaggactcaggggccatctactaaattgcttgaggcaggacatttatcttgagttagaccagttgaccagtgaggcctaaggatccacctgtccctgtattttccccagtgctggcgttacaagtgcatgtcaccatgcctggctttttaacatgagttcttgggttggtcaagctaagggcctcatgcttgtgtgtcaagtattttgctaactgaactgtctcccaaactccaagatttaatctcttatgccatagaacagctttgttcttctacctgtctctgggctcttccttcctcttgaccttcacttcaactttccgtcaggcctagtgccctctgcctcattcaccttcccatgagctaggtcctagcccatctttcttcctttcttatttaatggacatcagacacaggctgccctttagtccttaacagtatgagggttactgactttcagcaccatgccctactgaacaccacaatatactggacactgcgccagcccagttgcaaattacttctctaagtcttaattgcctcctctgtccaatggggatgttaacagtattttatgagagctttgtgaggattagatgggtttgtgggcttgaaaaccctcatttaagactggcacacacttattggtgaatgtaactcaatcacttatggaaaacataagagcagtggctttgagagggttaaggattccattgtggctgaagacatagaaactaccacatggctggaaaagatcttttcagtctggagaacagggcaaggatggggaggcctcctgcctgtggttgaataaagcttacttctgtagaacactagagggagatcatcttgcagaaagtagaaatgaagtgaacaggggcgtctactcactcttgctctactctttctcttcatcatcgtggtgttatgaaaattcaagggactgtccttgttgtccacagggaatttgccaaagaaagagagagagtggagaaccgaagagcgttcatgaagctccggcgccagcaacagattgagcgagaattgaacggctaccgtgcctggatagacaaagcaggtgaggtttaggatgagtggatggatgggtaactgtgcatgcgtagtcaactaaccctgcctagtgtcttttaagactcccttcctactggcaacctagactagagcagagagtaacagtgagcgctctgtgagtgtttaggctcctcttctgtttcaagagtctaactctccccccttttaactaatcaccttccacaaaaaggaaggattgtcaaactgagttcaggaaaagaatacaaaaaccagtgctgagggaaaaaaaggacagcctggtaatattttatatttgtgtcaccctgtgactgataatccatgcattcagtaaatctagattgagtgcctactttgtgccagggactcagagtagagggttgagccaaacagaccagcatgactccaaagtttatgtctcctagaactgattcttctccagttgggaaagaagcaataaacagaataattaataactcacaagaaagtggtatgtgcagtgggaaaacagatcaagcaaggtgaggctgtgctacagctttcacaataaataaataaataaataaataaataaataaataaataaataaataaataaatacaaacaaacaaacttggagaaggtaagggattgaccatggaaagatctggagaggagaatcacagggcccaatcagatttaagggaatggccactgctgccccagcagcaaaggagacaagaccatggtaaaagtggagggggcagcgggaaggcagtcatagaccagtcacagcagttacacgtgtgacctataggtcactggactttctagtaagcagaggtgacctgctttgagattttaaaggaacatatgtttgctgtacttgaattagaccctagagaccaaggccagaggcagcgaagagatggccacttagctgtccaggcaggagacaggaagaaggaaaagcattcaccggcacctgagttatcatcactgctcacttatgggaagaatttggacccagctctagggatgggtccagacctgccacaaaggcattaatacagagccaccagatccaaggtggctcaggtgcttatgagaagcatcagtcaccaactgtctgacaataactgaagcatttgctttccttattattttaaagattggattgcattggtgttatatatcttcgttttcctccagagcaaagagtaattttttaatataataataatataaaaaattcacctggcagtcagcatcttactctattcctagtagaaagccaaccacaaatgggaagtcacaaggggacaatagggaccttgatttgatgcttcattctgcaagtcggattcttccatgagaacttgcaatgacgcagttacacttcgtgggctgccaacactccaaagccctctttaagctcaggagtcaactcttgattatctacaagggcggagaggggatatgtatgtataagagccagacatatactccctgttttgaatatccacatttctttgtcatccctgaaggcaggaactaggcattttgattgtgtgtgcatttcacccctttcttctccagcctactgagtaagggtgagggggatataaatgttgcctccctcttcccagaatggtaagtctgccttaccttgggaaggcaagcagatttgccttcaggccaggcaggcagcttgaagtttccaactgtccttggtgtcctcagtagtggagccatctgacaaactgctgaatgaactggcagaaaacccaggaaagacttctccgaagcctgaccatgatcctacccagggtcaggtgccatggagtgtggctcctcttgcagtatgctttctcagtccttgcaaaactccaacctttccctcttttccagttagcaaaggcagccctcgtcccccccccctaagaaaaagaagcactgcaacatcaaaccgtgcttcctggccctcccctttacaagtggagcgtgagcaagtcagacatatgggtaacatttccctggaaagacactcaagttcgaaagcgaacttggcaaaaggcattggtgggggaagggtggttttagcacatctagagcccttgaagtgcttctcagaaatcctcagcagccctgcacatcttcagcctttcctgggagccctcctatctgcccatttcaaagtcaggcactgtgcaaagcaaatgcaacgtctggctaaggtaattatgttttctggaatatagtttatcagggatttgattttatagtgataccctccaaatgttttataaagtgccttaaataccttatatgtctgcaagaaggagcaccctacctgtaacacttcacctgtcaatgtggaatttcaccagaggctgtacttgaagtcctaagctaaacattatgatgtattataatggctacccttcatagtaatgtccaaacctcaaaatgttccctgggaaatgaattctatatgctctcaattttatattaaggtagaatgacagcaatagctttatccttttctacttgctgttaattgctatgagtgcatacatcaaaccattgtttgataagacctgctgcaagcttttccccaacagcctgtatctttggaaatgactgtcaaagcacttatgggctaaagcagggtagagatcaaaattcaacaccatcattcttagaagggtaccttggaaaccagcagatatgggacagaaaggctgttttgttggtccttttgaaggggatggtaatgagttctactcatataaggctctccattagttgatacctcattgatgactctgctcctgaagagaagaagcctaggaaaagaagcccttaagaacttgtgatatctttttatataccaacgaaggattgaatgccctaacaccaatgggcccttcaatttgctggcacccactgtgcattcaagaatggattctgacattaaacatcccctgaaggtagcacatactctataggttaaagccttattctcaggctatctctatttcagaagccagaaagtgggatccaagatgggccttaattctgtctggtcaaatgtacattttagaaagctttacaatccctgcctctcatcagttcattgactttttttttaaaaagaataactttttttttaaagaataaagaataaccttggggaaaggatactgcttaatataaaatacaacttagaaacagtatagatcatggatgtacaggataaagtctaagatgaggctcatgagcctctaagcacacagaggtgttcacagacctggaaactctcaaagtacattcttttggaagtctgtggagatttccatacataggaatgttggattaaattgttagtcattggtaatagaccagtggccccagggtcccctctcttcctcaaaggtaggaatggataaacaaattctacctcttgatcacgtggctgagtttttcctggctaccagctcctgtccttaagttatcctgggctctttcctgccatgaatcatctcattagcatacaaaagacagctctgagccaggaaccagagacaacacacacacacacacacacacacacacacactcatatacacacacatatacacacacatacatatatacacacatatacacacacacatatacacacacacatatacacacacacatacacacacacatatacacacacacacatacacacacacatatacacacatatacacccacacacatatacacacatatatacacacatatacacacacacacatacacacacacacacacgcacacatacacacacacacatatacacacacacatacacacacacacacacacacacacacacacacacacacagattcaagaatgtactcacacactcacgcctccttagcttaagtacagctcaacaaaagctagatagaattggtggggagatacagacacatacctgcctttttatctgaagacccttgggctcttcccctcccccgccttagagccatgaagatgcataagccaaaatatagcctcatttcctggatgaggggacaaatgctgtagcctgagagacaggaagaaggtactttctgagggcttggtagagaaagaaacttaggtagaagtttaaaaccttttcacttacatcaacgtaggagattttaacaaaaaatactacttcttcctgcccgccatggggcatcagttatagaactctccactttgtcagcatcccccatgaacccctcactactcgccctcttgttctgagaagcccgcattccagtgaggctcgatttctctccatgctggtgcccacaatgagctctgaactcctgtcttaacactctctatgtctccttaagccagagctgtccctgagggatttttgttttgcgaaataatttggcatttacagatgatttaccaaaccattcgtttccatacagaggaagtcatgcttgctgaagaaaataaaaactcgggaacatcagccttggaaggtaaggaagagctgcgagacgtgctttgttagtatttgccctctaaggcggtggcaatctctcttgatcaaagaggagaaagaaagaagaggggggccgcactgggatttgaaacatttggagtctctctgtaataaaatccctcatgctttaaaatgatgagaattgagtcacgaatttaaatgccttttaaagtgatggaaatgaaacccaagagctgcattgttccagggtgtgtgatggatagagctcaatgaaaagactgtcatacaactgatggtctatgaagggatctgctattaaaatctatggggatcatcttgggaccacttttgttaccgggaaatgccattgtttaggaagagccaggacaaatagatagggagggcctatttacctactgcggttagaggtagataaactccaactgggattcaaaacctatgagcatctgcaggtgccggcaagcacagcgctgcctgccattctgtaaactccagattcccatcacccgggctccagtattaaaggccaacaactgtgtcacagggcccttgcacaaggcctcttgcccaaagccctcaaagttttgtccaggatgatctgggtgtacttatggcctctcactggccttccccttccctggcgtagtgcttcgaagggcaaccatcaaaaggagccggacggaggccatgacccgagactccagcgatgagcactgcgttgatatctcttcagtgggtgagtgatccagttagatcttcttttcctactctggatctcccatgaaaatgaagatcctgtcttttgagaagaactacatggagaaagaacctaaaggatccagaatctagggacagaattaagggaaggcatgggaatctaacctagatgacaatgatttacagaacagatgaaaggaccaggggatgctgtgtacatgaaacttggggtatagggttcttcaagtgtgacagatggatcttatttgcagatatatcctctctctcctgggtgtgacagtgacccacgttgggatacaggttgagtatccctaatctaaaaatccaaaatctgaactgttccagaattagactttaaaacaaaaacaacaaacaataaacaaacaaacaaacaaacaagcaagcaaacaaaaacaacaactatgctgtggtaccgcaagtggaaaattccacaccatgaaactttggtttctcccacagttatttaaaatattatatgaggttaccttcagcctaggcatataagatgtatccgaaatatatgtgaattttatttgtagacatgggtcccacctccaagatactttatcatgtgtagctgctagtgcagtcgctaaactaatagtctgaaatctgaactgcttctggtccatatattttggataagggatactcaactcatatatttctaggatcctgaggacctatttcttctagtgacccacatgggaggagttgaagccatttgctttaccatagtagcaccaacctacttccatcctgtgaaatttaaactaattccttttgacaccccactgatatgactacagttcaatcctaggttctcttacagattctggccgatggcaggttttttcctccccagaaaaaaaaaagaggcaggatctcactccatcctaaaaagcagaagagacttacagagcccattgctgctttatgttgccagtggcagcaatatcacaagtgcagcagaaggattccggtgtctgaagcatatctgaagggaaagggcagagagaagcctgtctgttgcagatataaagacgatcctgttaggagtcaagatgctgggtgtctgcctggtgtcccgcttgggaatctttcagtttcctaggacttgagtgcctggagaggaaaatcagggtttcttcctgtggagattaattagcccataacatagggattgcccaggtctgcaatgtggcggtcaccttgccctggtactcaagcttgccctttggatgccacctgatcgtggagggtaagcctggcgtatttttgtcatctcattcctcctcatttcccttccttaggcacacctcttgccagagccagtatcaagagcacaaaagtagatggggcctcctatttccggcacaaggaacggcttctgcgcatctctatccgccacatggtcaagtcccaagtcttttactggatcgtcctgagtgttgtggctcttaatactgcctgtgtggccattgttcatcacaaccagccacagtggctcactcacctcctctgtaagtaaacaacaactgctatccccccaagtgggtggcttggtttttttttttgtaggggtgactataagggcctaaagcatgctaacagttcacactgaaggaagctaaagccgccacaagggaggataggttctcaaataactgcttagagccttcatgatcagtggggtgtaaataatcgctgctgacatttaacaacaccacaacaatggtaacaatgagttagagttgtaccttaggtcctagaaatttcttatgaggctttcttatggttgaatcactgagacctggggagatcatctggagaacaataaatacgtcaaatggactttaaaaaggaacatataagtctgctctgaatgtgacggcttctgggtatgagtgatggccagcagactgttacatacagttgtatagaggaggatgttcagcttcttcagctaatccacagtagagacctttcttctctaagggctgtcctctgcttgaaggccattgataaccctgctcctgtcactaaagggcaactgttggttgggctgtgggtgggtgggaggggtgtcatcccagcttgcagtgttcagaaattaggctttacccaatgctgccttcttacattctgaaatctggggctcctctataaggggtctgtgttagttggagagcagaggaactaataccacctgtggaacaaacgattctactttcgctactttcagactatgcagagtttttgtttctgggactcttcctgttggagatgtccctgaagatgtatggcatggggccacgcctctattttcactcatccttcaactgctttgattttggggtaagtcctcagaagcctgcctgtccttctgtttctcggtgataggccccgggtttagataagcagcttggtctgtcactcagcatgagccactgaagtcttaagttgtaaagggagcatggatatggtgaagaaaaggcagttcagaagccagcgaatccttgcctggcagggatttgttcatttttttaaaaacctctttgggttttagtgtttgtattgatgtataacacatacactaaagtgtgtacatttaactatatagcgcaatgagattttacaaagctactcatagccagaattttgaactacttattatcttgggtgaagtctgggagagaaggacaaaggacttaattccagaggtggctttagaagaaagaggttatacatttgtttattttctacttcagttgaaaatgagcataattgtctccatatgccctcatatgcactcacccgctcttgtattagcacaacgccatgcagaacatttccatctagctgtgtactttctatataatatttaggtatgtgtgtattgctagggatgttcagggtgctttcacacacattggcttcctgtgctgcttcccagggtcccgaacaagacatggggtgttaggagttagcctgccgtctactcataaagtgacagagacggtagtgctcagctaacatacctggttcacgtcagaacagagtagcaggaccagaggtttctgagccacttctctttctgccaaacccatttccttttctgccaaagctccagtcaggtgatgaagattctgagtacttgccaatctccattttcaccaagaacagacagttctgagcacaggcacttttcagacataatagctagtaagagaccattttaaccttgatttttctcacatacatattttttcagctttgttttgaggattcatcttcattatatctccccagtccaatgcctatgatatagtcaacattccataagtgtatgatcacagaataactcagagcctgccttagtggcatgctcctctaatcccaattctcaggatgctgaagccacaggaccacaagtttgaggctagcactggctgtgcagtaaattacaacctggtctaaacgatatagtgaacccctgtttcagaaaacaaaagttgagagggggctggagaggtgacttagtggttagggctacttgttatcctgtcaaagagctccagatgggcatctaacactcgtcaggaggcttccagccacctataactctagtttaaggggattctacagttcggtactctgggccactgcactcacatgtatacctacccataattaaagtaatcaaaataactccaaaactgctacattaaagatgtacagtgttaatagaccacttgcctaccatgtgcaaagaaggtcttggattctgttctaattcccatgaacaataataatcttgaaatgttaattgcaattatgatttcctatagcaatcagaccgtatgtcaacaaagacactataacatcaagaattacaaggcttcagttcctgaaagatacttaacacaacagcagctaaatgttctgagcagtgctgcagtctggaacaatgagagaatgtggactctttctgagttttccatattggaacacaacctagaataactcaaattggttcccatgaattgggtaccaaccactcctttgtgtatccaaggtgatatgatgcaagatgcattgctattaagtttgtgcaaaagcagtggctaggccttgtaatttcactaaggccaagtcagtaaatcaatgaccagtgagcagatttaaagttaggaaggacagggggaaaatagggaatgtgtagccatttttctttggcagcttctcatgtttatagctcaatcggagttagggctgcctggggacggagagtcttaaatttaccagcgcctaatgagagttgatgactatgtactaagtgccacaatgcttttctccctcttcttactgtggctgggtttgtctcttaggtcacagtgggcagcatctttgaggttgtctgggcaatcttcagacctggcacatcttttggaatcagtgtcttacgagctctccggctcctaaggatatttaaaataaccaagtaagtggtgccatctggcctcttcctgtcacctttgaggacagaactcttattgccttctccccttgctttcccactctctgttccatttcttacattctttacatctcccttccctaaagaccaagctagaaaactgtcaatgacaacacacagagtgccacatttcccaggggatgatcatgccacaagcaccttgctttcacagatataccaaggcagttgttctcagacttgtaggcagatggcaagctggtcttgggaaagacatggttctgtgccatacctgtgatcttgtctgggttcacaggtattgggcatccctccggaatctggttgtctccttgatgagctccatgaagtctatcatcagcttactcttccttctcttcctcttcatcgttgtctttgctctcctgggaatgcagctctttggaggcaggtaagggccaggggcttctccacctgaaagaagcactcattagtctcaggactggaagcaccaaggtgtttggtttggtgtactaccatcttgtttgctcttggtctgaagagtctgtagatatgcttgagaagcaaatgtctctgctgttaatacatatgctgaaagtggttcttgcaggagggcctatccccttgaagctctctgtgaaatgatcagtgtggaatttcataactgctgaccagtccaaactctgaattttcacttgtacctttcaaagctcatgattttttttccagacacaggggctaccctcttcatagaccatatttggaatggacagcagtagggggagtggcaatggggagaagagagaaatgatgaaaactgcaatcttgagtctggggaatttggaaagtgacatttgattctccctgaatttccttttcaggtttaactttaatgatgggactccttcagctaattttgacaccttccctgcagctatcatgacagtgttccaggtatgaggccaactgatagctcagaagcactatgtggggcccatagaccaagcagtgtaagaagacaatgtcttgagtgttagagctcccattgtattccctattagaccttggagtgttcctcttatttgaggaatcgttacaacaatctctcaaactcctgtgcctcagttatcatcagcaaatggctttatctcaatcacttagtcactcttctccccatacctgtgcgtttataagatatctggaacatgcagtcagaaatcacatttgtggtttgtccaaaatctgaaatctttacatttcccagcctatgttcaggttaatgaggtaatgggttatctttccactgccatctcaaaatagtaaaaacaatttttaaaaagtttttttttttaagtcagagagaaaactcaatctcaacagtattttagaatctttcagatgaaaaggagtatagcctagacagaatatgtggctgaattagaacccagttttcaacctagaaccactgaggctttccccaataacgctgttgccttgggaatgctgtcacccctgagaacaatcaggtggtggtcaaactctcatatcagtgtgagtcccacaagacatggccagcccagagggcagagggactcagaaatgtgaggacttggagtatctcttcttttcctcttttcatattgaatgactataattcttttccatataaaaacaggattgtttgcttatgggaatagctttctccttcaccttagcaggaaatcaaacaggaagatagatagataagatccagccctgatatttgcccttcacagtggacccatttttttctgacaactttgagtcttgacctgcctattgtttctccaatgtagatcctgacaggggaagactggaatgaggtgatgtacaatggcattcgctcccagggtggggtcagctcaggcatgtggtctgccatctacttcattgtgctcaccttgtttggaaactgtatccttctaagttgttcttctgaattctgaccacttccctgcaccagcctttgaggaggaggaggaggtgtttaatggtgggtggtgggtggtggatggtgggtggtggtggtggtagtggttatggtggtggcagtaatagggcttgtataagcaaggtgagaggccataggcaatactttagcagactaaagaagacaaaattttcatcttaaggaatttgtacagaatttgtaattctgtaaagaatgcaagcattaaaagatacaactgcataaatctacagaatatacaaataataagctttgttgagtggttggagatagtacaaggtctatacaatatgtgagacctgaaatctttgtttactgaaatagtgggaagattatcacactagttagttaactatgtatctatatacagcagagcctaccatgtcataaaacttcaaaataaatagtacaaaagtgctaataccattaagtatcagctattgtgttgattttatgtgtgaaatcatttttgctgtatagatactgctttgcctattccttaccttgtaagagaaaagaaaataccagatgacaccaagtcaatacaatggtagaggaagactagcagtgaaattctttaactccaaatcttaaccctaatgctctgggttctactttgttgctgaggagggaaaaataccctgagaaaagcaacatagaggaggaaagaggctgcttcagttcactgttccaagctatggtccatcagtttgagaaagccaagggaacagaaacttgaagcagcaaatcacagctcatagtcaggtgcagagaggagagagttaaagcttgttttgagctcctactgtattcacttctctgctgtggtggctggaacctggcattggaagctaaaataaaccccacttttgtcagggtatttgcttataggatcaggaacaagactaagacactagtcaaaaaaaaagtctggaccaagaagattgaggtttgagtccttgggatattcttcatcagctgtggtcttcaaaaacttccttgttccttctgagattttatttttcacatctcaaaagaagataatgatctcttttactaactaaaaacattgaatgaagtaattattaaatgcattttttggagacagggtctcattacatagctctgtctgttctgaaacccactatgtagaccagtctggtctccaaatcacagagatctacctgcctctgcctgggattaaaggtgggtaccactatgtctggcttaaatgcatcttgtaaactgtgaatatttgtgtaagcattaggtatccagaagagtgaaactcaccttgaattgggctgtgtaacacagaggcggcacgctggggtggctgcgtttttgcatctaacctcacaaaggaaggatgctcttttcagcttttcccatgagggcttctagtagtaggaacagattataaactagacatgaagaatgcattaaaagaagctatctgatacactgaagaaaaggaggaccagtttgccacagtggcagccccttgattttcctgctactctgtaagtcaccagaaccatccagaaccagtctttatgcaaggaccagtttcatgttccacaacataggaacctcgaacaaagaggatttagagttcagacgttagagcatataggaggagtagatttcagcatgaaacttgtccatactgtgacatttgccaaataaatcctggaagctctctgggaccctaaccagaagaacgagagacctaagtcagtaccccaatatagaaacaactggtcctgtttcctaccatttttggggaaagagtggcttggtgtccactgtgtccactggtctaagtagatttccagccttccaggagggaaagatgaacactgttactcagctccctgcacatttcactcaatgatcctcttggtgtttattgctagtcatcaaggccatggctgtctgggtgctccctcaccctacttcccctcataagttgtttgattcagggataatttttttttattctatgcaaagaggaaaaatgaggaaggagggtggacacatattactgcatttcctctcttatggccttagcaacgtcttccagtgtagagtcaggaaagctctggaggtaccctcccagacttgctgaagccttttacttttcttgcctgcccaatccttaacccatacccacagacacgctgctaaatgtattcttggccatcgctgtggacaatctggccaatgcccaggaactgaccaaggtaagcactattttccaagaaggtcatcttctggacgcttttaaatggctggacagccacgaacccatgcacaaggactagtttgcctttactgagttggttgagctttgattcagtaagggtccctcatgggatatagaaaatatcaacttctctccattcgtcctcagaaggttccttcctagaattatggaatgcagagccaagaaaactattagaattctaggttttaaactctgcctttgctcctgccactgtgataatattatggcctcagctttgtgaccaaatcctcaacaggttaggcgtgagagtggtcaggggaagtgggactcctacattattgctgctggggtaatccattggccatggtcattgtagaaaagtttttattaaatcagatactacctttctcaaaaagatattgctttcttttaagggattctccgttcccagggatgagaccatattgattgcagtagggtggtcgacaaaatgggtataataatcttgccacacaggtttgattttaggaaggcacagaacacctcgaggttttctgaatgttttccactggatcagtgatgtgttgcccgtccttccccagttctcttaaaatcctcatctctatgatatgagaaggcaaataccagctttagtatatgagaaactggccttgagtcctatatctgtcagtcactggctgtgttagctttggtgaaagtgctgatctccattaataccagttttctctggtgtacaaagggaaagacagatatgtgtccctatatgtctcatagtattgcagcaaaagtcaaatgaaatactgtgtgtggaaaccacagcctgctgggaagacctgcgtactataatacttctaatcaccacctggaaagttttccttgctgttttcacttcaaacaagaatatagctgaggtagggctggggaggtgcctcagaagttaagagtgtccagtgttcttccagagggcccaacattggttgtaaggaccatatggagtgtctcacaactgcttgtaactccagtttcagggaaatccaatgcccttttctggttcccatgggaacctatatacatctctgtctttctgtctctgtctctctctgtccttgtccctatccatgtctgtctgactctttgtctctgtctctcactctccctttgaacaactaaaaatgtggatgaagaaatgagacctctgcctaggaactcataaacaatgcagggaagactccgtgacagggttaaacattttcttctgcttacctcatcttgcttggtcttcagagctcctggcatggaatcaaaggaagctgctctctctatggcaattctaggtaaagctatctctgttttgtgtctaggatgagcaggaggaagaagaagccttcaaccagaaacatgcactgcagaaggccaaggaggtcagcccgatgtctgctcccaacatgccttccattgagtgagtaggctatagaaattgaccctgggcttctgggctaaatctagtttatcagtgtctatgatagtcagtcttaggaagggacctacctcttctgttctatgaactggtcacagtgcatagtgcagtcttacaggggaggtaacaagaatagtgggtgggggagggcactattcacaaaaatccaagagggactctatgcataatagaagcctaaacttgcaggagaaagttcaagttcatgttctgaaggaactgttcctcagcaaggtctactgtgtcttatagaacctgaggggaatagaagatagtaaggccattgagagtggcacagccagggcagccggtacggaagtcatggtaacacttaacatggaaggacatagctatatgttaatacggtttccactttaaaatatcactccactccacggaaaatgggttgtgaaggtccagtatggccacagtgagacacagctagctgttaaagtggtgtgggtgattatgagttagacacagaaggtagcaacagaggagaccataatattgctcactctgccttttgaaatgtgagtcaatgggatacatttaggtattgaatgtagtagggggcaataaaaatttctcaccggttttatagtttggggacttaaatggctgcatgaagggtgggaccatttattgatccttcagagactgtggaaattcagagtttgttttggtcacattgactgtgaaatgcttccaaggcatccaagtgtgtgaataggctattggctgcatgagtctggagcattgaggagaagttgggattaaaataaagatttgggggaagtcatttgcatttagatggtatttaagccagcagtgtgggtgagatgacccaggaagagtggggacagggaatgagtggagctgaggacagaggctgtgagcatgcgcttctctgccagaggagaagctggggaaagaggcaaggggatgtagccaggggacagagaagggaccactggatttaacaagacagagctgttttagtggccgtgctagtagcctgataggaacagtgtccaaatggaacagatttgagagtgagttggaggttgatatgaaggagacacaggatcactctgccagaatctgtcttgatcagtgctgcatgggagaacttggggagtcagtatgggcccagcacaggcctggcctctgcacaataagtgggggcagttggtggacaagaagcacagaatttcttcctgatgataaacaaggcatgcataaggctgtgtaaggaatccctgtgtgagagatcctgtcatgtgggtggggacagtggtaatccatggagagagagaaaaatacagtctgagctagtggcccctgtcaactgttacttaaagctagagagaaagaagtccctggtgcattggtctttggaagggaggaacttctgagtagtctctgccttacccactgggatgctccccatttttatgtggtgtctcccatatctattttactattgatttgagtttgctttccaaagctgtgaaggcttgcctgctaagccccttttctgtgagcctgagaaataaaaagaaatcattaaagattgattggagaataccaaacaactccttccttttcagactattctctggtctgagtaatttccaccctgctctcctgaactcaaatattttggttaaaatcacatacacacaggtatctaaaagtgcagatggatagaactggctgctccaggagtgggtggttctatttactgagatgaggaagcctgcgggagaagagggtttggagagatgtgattggagatgatgtttagcccagagtaggaactatttatggaatggaagaatgaatgaaatatgggtaggcacagggctgtgggaaccaagcagtgaacaccagtgcagagtgaaggtgacgcagatgctgcaagcatcctcaagaagatgacaccaagaacttgggttgctgtccacatggtaatgtggtgtttattgttgctatgggtaaccacaagggatgcatgccttgctcaggtgtgcagctcattcaactgatttctggtaagcacataaccttggaaagaacattatcacaaacccaagcattccactgttagccttaattctgtcaaaaagatgctccgtggcgttaaagaggacctcttagttccgcagagcctctgtttccccacgtttggaatgagaaggacaactgttctttctgcttcacaaggctattgtgggatatataccagatcacatgcatatgagttgaagttagtggctacttgtctgtgtggtttgagggtatgagcgcaaatttgggatgttacctacatgaatagagaggtaaaaatcaagtgttaagtatgtgtctggctgtatgaaaaagattagtttctcttttgcttgaaatgtgtgtgtgtgtgtgtgtgtgtgtctcagagagagagagagagagagagagagagagagagagagagagagagagagagagagagagagagaatccctctatatacttacacatgctcctcgagggctggtgttttgcatactcaagaatttgcaagtagatcatatgatgtgcctgtcccagtgggtatgcatgctgcctgtctagagtgtatgcttctatttctatatgttaccaatgtttctagccccccaccctgccccgtgcctgctatagtataggctgctgatgctgagagatatggattttgccaaggagctcacaacatctctataatggtgtctttatcaatgagtgcttgtgtgtacacatgtacatttgtacttcttccagatacccccaaagagaacatagactggctgcctctgcttcctcagactggccccttctataaggcttctttccaagtgcatgagttatagcagttgagcagagctcattagcctggcatgttctacactgatgggggtcttctcaaacaaagaacatcatttacctattttccacacccaacagggctcactgggctgaacccgggttctctatctcaaaggctagagcaagttctcagctagattgccctccaccctagctttgaccctgtgctgccacactcatttctactcttgcaacgctcatctatcctgctacttttaccttccctcgagagtgtatttgaatggatgcaatgcatatgtagaagtaatatttctttacaccagtcttagaaaatcaattctgtgttttcccccagaggaatagagcaaaccttaaaggcttcgcccttggggaatcattcacatcctctaaagtgtggctctgtggcctctgaagtgtgaccttgtccttagccttgggttgctctatagcctcactggtgtgcatgacagagcatttgtttcctccgtggtccataaaattgagccgggatctgccatacagtgatgaccttaggagtcaatcttgtgtggatatccttggtcacccttgacatggtggggaaggggtacttgtcaaagcaggactccagagggggcagtatgaactcactgcagcatgctgtgaagcattggaaggtctattttacacgaaatagtctatcctctgggactttgcatgtgtgcttcaagaatgagatctgggtatttgcatatagcaaggactcagaagccaccgtgggagcactcgaggtgggggtgtctacagggggcaaagaggtgcatggaagccccatggacatgcaaaaaagactctggcttccctctggacatctggtggctgtggggcttgtggttcctataggttggggtggactgaacctgttcgtttttcttccccagaagagacagaaggagaagacaccacatgtcgatgtgggagccacgcagcagccacctgtatgtgtgtaccggtctgcgtgtctgggagtggtcctgtgtgtgggcatggggatgatgtggttttgtccttaccatggacaaagtgataccaagtgtaaatgtcagtgtgtgccttggtgtgtgggtgtgtatgcgtgtttcctgcacatctgtgaacgtgccccactctgcacctttcagtgcgcttctatcagtgtctaaagtatgtgacaagtgtgttgtttgctctcgtgtcgggcctgcgagtgggcacgtgttcacattggcaattagtgttggtgggtgttctgttacatctctgtgtgggcctccatgaaggtgtgtgtgggcccatgtgcatatctctttaacagttggtgggtgtgtacccacgggcatgtgagggaaggagtgggtgtctgcccttccagctgaggagcccacgcctgcgttctgtgtgtcatgtttgtgtgttcctgctgccttgtgaatgctcattgggcctctgagctgaaatgctccacagttagttggggcgtcgactgctggtggtctctgaatatagtcttttgtgggtttcattagctgttgctttaggagcccacaatctccctacctttcctgggatgctgccattgttagaatatagtggctgcttgccatggtcagtatctttgttggtctctgaatatggtgcatctcagcccctgatattccaggctaaaatctggatggaaagaggaggagaatttctgaccttgaaggaagggtcatttgtgggtacataagagaccccagctgatacccttaatcaaaggagtactggggagggatggctggtgagtctttttactgctcgctggtcttggggacactaggctcagtcttgggctgacccatccttaccaaatggctattgcactgtagaggcagggactgaagtgaaagataccctatacaggacttggaggtactggtctgacaactttcttctgtgtagccactctgcccctggcatctctgtgcttcttgtctgagatcctcccattagctccttcatcatgacccctgctcaccatggcccctgtaaagctgccatctctgacttctacatgtgctaccaggttctaactgcagcccttgccctttcttctttgtcaggagggagcggaggcgccggcaccacatgtctgtgtgggaacaacgcaccagccagctgaggaggcacatgcaaatgtctagccaagaagccctcaacaaagaggaggccccgccaatgaaccccctcaatccactcaacccactgagtcctctcaaccccctcaatgctcaccccagcctttatcggaggcccaggcccattgagggcctagccctaggtctgggtcttgaaaagtgtgaagaagaacgcatcagtcgtgggggctccctcaagggggacatagggggcctgactagcgccctggacaaccagaggagccccttgtccttgggcaaacgggagccaccgtggctgcctagatcctgtcatggaaactgtgacccaatccagcaggaggctgggggaggagagactgtggtgacttttgaggaccgggccaggcacaggcagagtcagaggcgaagccggcatcgccgagtcaggactgagggcaaggactctgcctctgcatcccgaagcaggtctgccagccaggagcggagtctggatgaaggggtgtccgttgagggggagaaggaacatgagcctcacagcagccacaggagcaaagagccgaccatccacgaagaggagagaacccaggacttaaggaggtaaaggagtcccaggagggcactgaagagatgtagttcaggtttctgtgaggaattctgtgatggaaacctatatgggcctccgttttcccttttataagatagagatgatgcctaaacaccatctaaaagtcacggcttaatttaacaggcaacctaacccctgcggaaacaatgttctattccagagcagctcggctgagagtggagcctggatagatggatagatgggaatcagtcagtgagcatggcccatgagtgtttgcctcactgtgtctggatgcagatggaagatagaatatgctgtcaggcctgctcctgttccttctccctttccttttagccaggtgcatccgccactctagaacagcttctgaaacataaccatctcttggtctttattctcaggaccaacagtctgatggtccccaggggctctggactggtaggggctcttgatgaagcagaaacacctctagtccagccccaacctgagctggaagtggggaaggatgcagctctgacagagcaggaggctgaaggcagcagtgaacaagcccttcttggggacgtacagctggatgtgggccggggcattagccagagtgaaccggatctctcctgcatgacagccaacatggacaaggctaccacggagagcaccagtgtcacggtcgccatccctgatgtggaccccttggtggactcgacagtggtgaacagtgagcacagtccctgttctgtcaccccctcccacccaactggagctgaagacagctggctctggggcccctctactaaagctctaacaaataatagaaaggcactccaacaggactaaaacatttttcacagtcttgagacagtgttctcctacagagttagacttcccgcaactgtatttttttttttatcctgtagaacttggtcctatgagtcttcaaagtggttacatgtgagcttataggcagttgcgtcctggtgtaaccagatggcatccttgtgacctctgggagaactaggagatatcctggggtagactagcagataggtgttgctatggttactgttctgctctaaaggcctgcatctttggaggcctcggtgccacctataatagattcccctgagatcatccctgcgctaacatttcctgactctattattcctatcaattctctctctctcctaggagctctcagtcacactttcccatcaagactctttcatgcagaggttaatctcgaaacactgacagaaaactcaaggggaaagcatttaacctactaccttactgggccagtacccaccttttcctggaccacatttctctcttgcattcatgttatccctgtcctcaccctgaccacatattccatgatgacatcaatcctatgtccagttcctgtattgccttaccctaatcactgccttgtacctaatctctgccccagccctaaatcccttccctgctttaatcccattcctcattctgacttgaaccctgcacctcttccctttttactcattccctttattcttatccccacatgtcacccttgcattaatcccacaccctataatctgccccctaccctatccttgcattcatccacaggctatccctgcccctacacccatctctgcattaatctcgctgctgtcctgtgatcacaggttatggtcatggggttctatcagtgtgtgttttccttctctttccatcttctgtcctgtgacagtctcctcgtctccctttctgcctctctacctctgcttcccttccactcttgcttcaaatcatctgccctctgaaacaacagatcagctttaaaaaattgtaaatctcccatgccccgtgcttgctggggtggactggggcatgtttcaggattgcaggtccacagtcacttttaatgtctgtctgattttgtacttttataaaataagaagtgctttggagcctctttttataagaaacaacattagcttcaccatctctctgttttcacgctagggctggtgtggatcctgcatcacagtacagtatgcgataggaagattttaggtacttagctattagaaggtcccaacatgggccaggaccataaaggtaccatgagtctcagggtagtgccacttcttggccatagggacgtgggggtggggtggttccccaggctttctctccacactgacagctttcttcccccccacctcctacttgagcacagaaacagaaagtagccacctgacattgctacgtgacccctgtctgcttcttcccccccagcactggaacgcagtcacaggcatatattcacatgaatattacatttccatttctatattcatcgtgctggagaaggtacagccagagaagccgtatgccgagagtaatggtttcttgaaatcttccactgcagagatcttctgaaggtgtataggatttcagattagctgtatgaccttagggaaggcatgtagactctgaacttcaggtgttttgtgtttttttttaatctgtataataggaataatagtgtataccacttaggtgtggttaatatgaaaattaaagttcagtggatgagctgaaaaagaatgtggagtcgagacataatttctgaattgtgaaagcttggtagctgcagtggtgtgctgtttccgacactacaaaagtccagcaataaaagggaagctatggttcttacttctatgacacaaaaggctgtagtatgtaacgtgggtatgggtagggataagaagtggaagacttgaggtagtcctcctctggggaggagtcctcatttggaggactgatgctgtcagggtaccttcccagatcatctttggcatccccttcctatcctatccattctgttcccaactgaaatgaaaaagcacacctgtctgcgggtttctgaagattaaaacctttctgcttgcagttagcaacaagacggatggagaagccagtcccttgaaggaggcagagactaaagaggaagaagaagaggtagagaagaagaagaagcagaagaaggagaagcgagagactggaaaagccatggtgccccatagctctatgttcatcttcagcaccactaacccgtgagctatgctcctgttgcatcccactatggtactaggagagagagccagtatttgagccagactgggatgatggagaggaagtagggagccctgttatcttcctgagtcctcctggcagagagtagctagaaagggaaatatttggagcccaataagtaaggtagggcattaagttgaacagcctctcatctctgtgtccatagttcccacggtaactaaagacagaatacaggagaaatatcacaggaaaagacccttccttgctctttgatcagcagttagaataaggaaaatgaaggcagtctccttgaggatgtctacagatattctagaagaggaaacactatggaccctaagatggtcaaacatctactggagtttaaaggtttgatacctctgttctgcatatggagttttggaaagagtttcctctcccagggcagaggtagaggaatgaagaaggtgtgttagagaagaatctagaatgttaggttcaagaaatatggaactaagaaaagggtgtgagccttgtgccctataattggcatatagattggcttctgagacaggaaagcgaccttctgtggccatgtgggcagggttcaggcacatctgtgggatgggaggaagccgggttaagatgccagatcatcaaaagttgtagtatagaataaagatatttccatcagaataatcaggaagccatagaaacatcctcatcagggcatttgtttcttgtgtttcttggttctttatgatttcctaggcaggtcctggtttcattgcttaagggagaagacaccaagatgcatcagaggacatcacatgccgctggggattgcgtagtctcacgtggctgttcctcacggctcactcatgtgtgcagataatgaatcttggctttcgtgacatagcctctaaccaatctgattacctttctccaccagggcctggaatcaaggggtggtgcttgagaaattaaattgctctccctggtggcttcctttgtcaagggcctggctagctggaagaggccaatgtaggcttatgagaagtatgaggggcaggcatgggaacgatgtagggccagctcaacagggtgagctcaagaggcttttctcatccacaggatccgcagggcctgccactacattgtgaacctacgctactttgaaatgtgcattctcttggtgattgcggccagcagcattgccctggcagccgaggaccctgtactaactaactcggagcgtaacaaagtgggtacacggttggggggggggcgggatttgccaatattgttgatgccctgggatcttttctatccagagccgctccctccaacatcagaggagaatcaagataggctaacaggaaggtttctgggaatgaaaaaagatagagaagttgtgcttattcctcagagacaagtatgagccatttcccacacccacaaccacaccactatttttaagctgcagaagcaggcttgacacccagaactagctaggcttctgagagggttcggctgctattggaaggtctggatgtaggctataacatagaaccataagtgatgtgtgtggatgcagggggactgtgggtctaccacaagtcattgacttatctcctgggaaccccacaggtctggagagaaagttttatggggaacaattcagaccctagaagttaagttatggtcaaagggggggaatagcttctggcccacgtggctcaagcaggctctctggtcccttttttcttgttttccctttttagcctgctattgatagtatgaaaaaatccctctctgtgttctggtgtgggagtttttgggagacagggtcatgcaggatggaatgggtcagggggcaggtatgcatagagctcagtgaccttacacggtcttctttgtctcgttcatgtgtgtcttccaggtcctgagatatttcgactatgttttcacaggagtgtttacctttgagatggttataaaggtaaaagtttccagagaaaacatggactctgaatttcagttgtatcaatggtcagctcctttagtttagggtactttcccaataatgcaatctcctcgtctatgacaataccaagagagtttctccaagccctctctcacctcagtgttctcagtaggccatggctgtgtggatgtgattaaataatgtagctctcttgtcatggcctgaacaggaggcaggtagtaggtgagcatacagcttgagtgtggtgtagttctgcacaggcacttcccttcttattcagagaacgtgtctggcaatggtttagggagatgtctttccagactccatctaactccagactccatctaacatcctctcccctctagactctgagcatcccaacagaactttctcattccaagtttaacctgtctggggtttctacccatccatacaggtgtggcagtgtttggagctctggaacatagaggagcgggaggttaaatgggattctgtaatggcagagaaatctgcttaaaccctatatgactttgagaaggggtctgagtcctcactgttcactggagatattatgtgattatgagaagaggtttcagacctcatcattatccagagtttgctggatactctccttactcctcaggttctgagtttggctattgtcttacttagggtttctattgctatgaagacacacacacacagcaattcgtataaaggtaaacatttaattgggactagcttacagttaagaggctattccattgtcataatggcaggaagcacagtggcatgcaggcagacatggtgctgaagaagtagctgagagttctagatttgaatctacaggcagcaggaagagagagagactgagactggcttgagcatctgagacttcctccagcaatacccttcctccaacaagaccatgcctacttcaaaattgtcctaccttctaatagggctactccctatgagcctatgggggtcattttcattcaaaccatcatatctatggagacagtggcagtagagccctgggaagggaagctaggtgtaggtgttaattacaccaggagtctaatctatgacggttcaaacccttgtcctgcagatgatagaccaaggcttgatcctgcaggatggatcatacttccgagacctctggaacatcctggactttgtagtagtggttggtgcattggtagcatttgctctggcgtaagtagatgcttttctgttctagtcccttacctttcttcttctattatccctggttgatttgaccctgtctccaaagagcaacactctgagagtctgcttaccaatagttctttgcagaggccttaaggtcttacagttccagttcatgtgtcctaaacaaaaaaagcaagattgaagagcatcagtaggaagaagggaggagccagggcattatgaagaatgatgcagaggcagagcagaaatggggatcccagaatcctggtcatggggaagaatatcctggaacacatttgagaaagacagatgcttccaggaacattttaaaaacactacccaggcagggaaatgacccagcaagttggatatcaggcttctgtgctcaatctataccctcttctaccacaaacaggttcctttttgtctggttagcatgtaggcttcctcaaaaccatccttccagcctttttgaaccttgtcctctaggcaagactgaacacacttttcttctgattgggtagaggaagtatttggatgctgctttcattgatgctgcagcatcaatgatacaggaaaaggaaagatgtttccatagcgttgcccttcgcatctccaatgtgttagaaaacaattgttctctactcactttctccacttcgctggaagtgtctatcccatatccacactggcagttaaataggcagggtaagaactaaggggtcaggggcagcgatgccgtgtacagaggtgagagttcccagatgtgttaagtctaaaattttccagagcctggaagaacactgtgcccattgctgcaggagcggtgggtggccctccaacagagccagagtatgggtgtgcccctgagacgggatggtagcagagtattcattgtgtcttgtcccaaccatgtgcacaggcatcccaataccattagagcaatggagagtcatctttgccttcacataatcaaatcttctgtaatgtaaatgtagctgaactgttcccaaagagatttcacaaaagtgtggtatctccctacctatccagatcctgtgtgggttctcacagcaacatacaaaaaaaggcaaccccatctctaccaagggaactcccagcttctcttcctccttggcatgattcactaaggtctacttttgccttaagaatgccaaccttgttctctgttcattaaagacaaataaaatatgatcatcggattgttaaaaggtccagttctctttccatctcctcagctcacttgtatacatctttcattattgtttctcagtagcacactctgcctgtcttttggcagtggacagagagaaaagcatagtgggcagaactcaccagcacttttcagaagaacataattcacaggtgacagggcagaagtaggaaggggacatgtatggggtcaatctaagcctagcttgaatcccagcccttcttcttcttagcagcttatgtctttgacccattgtagcaaaatattaatattcctaacctccatttcttatctcttaaaatggagacaaaaataaggcatgcagagtacttaacaccagggctggctgttggtgtgaatgatcagtacatgttagtttgttgctttaaccttctaattcctcatgacatcaaacgtggcagcaggaataaattatgtgctgctgtggaatttacacatacagttcaagacagatgaaggctgggccaagactcaactgcttccatccagctacctcttccccacaacccttgagcctaagtccctagcaaccagctggtgtactggggttggaggataggaagtggccttgaggggaagcccatgaatcttgtcctatgccccagtgtccaaatgtttatctttgggctcttttgacaccagtgtgctctagggttgtcctcggcctcattttctcttgtgctccttgagaactggcagcaggtggcttcggtgctagaggcaaggagacccttattagcccaagttcagaagactctctgttgtcaggtgtactacaggggactccagaaagcctctggttccagggtccaagtttgtaggatagattatgagctatgatccattctttgcctttagtgaaatcttatcttggaccttatttctctctgaactgtgcatggtccttgctccttctccattgttctcttttgttgtcacccttcctagcttgccatgcctcttcccttccttgtttcttctcctttgaccctcatcacattggctaaggtcctggtaacacttcccgatgttcatatgcctataaatcttaactctgtgctttctctttccttcctgagggccccagagaattcagctcttctaccacatatgacaggatccccaagagttccacctgtcagcaaccagggtcagagaatggaatgaagtcaccaagcccatgatctacatggtcagatcaggccaacaggaaaccatatttggggttatctggagacctttcaagtctctatcttcttgttataactttcattctcgtgtcctgtgggtattccccagtgactgctcactgcccacatagccgttttcacaccccagtttctctccttcccccttgaaaattgaatgttcccctagtgaggcttccacaaaagtgattgctttgtcagtgtgagcaaccaatggaggttgccacattagcatcattatctggttccccagaaaccagaagtgccttattatctcttctaccactgccagtgaaagaagccagcccaattccccagagcagtgctactgaccaagggacagactcccactaaatactcagagaatgctgcaaagtccagagtctgtctgctgcagagatctgcagctcccaccatctttgctctctacaaacattcatgtgttgtatgtagtggctgaggaaatctctattcaatgtacatcaaatataatataaccctggcattctatctggaaacttagttgacttgttaaaagaaaggggcgggggtagggtgtttttagtgtgggaatatctgggtttaaaaatatcccattgcaacttttctcttcttgccagtccattcttacattataaggtgcttatgagaacatcgggtgctccttccaaggccaatatctcctagagaatgagggagcaggagactttagcagagattgataataactccccctgaaactctcatcacactatcctgttttttatttttatccacatagagacagatttgttttctgtcaatgtcccaatgtcttttcctctttgaggtttcaagaaaagtctgaggaatgactaaatccacgaaaccttttgccttgcttctctctagaaagggcacatttgtcttctctgcatggttgtcattttctcctgaaacactgaggcctgctgtcctctgtctctacagtctgttgctattctacctactctttggcctcaggtgtgagaaggcaaagatggctacagcttcatcatttctagatacctgaacatcaagcgcacactttagggctcccctgccctccagactcagggatatagtaagcaagtcagggaaccacaaagtaggttacatcttgagccttaaacctctactctgaaccatgaagcttaccctttttaatacccactatgtacaacagtttacttgattagcggaattatatgaacagatgagcttctgtgtgcattctcaataggaaatttgcagctatcactgcttgtagctctaaacatttaataataaaaaaaaatgtgtcaatagtttagcctccaccttccctacctcctatgtggcagagtcaggcaagctctctggtgactgatgccaggattttccataattgtttgctgttatagcaggccatgaggtgaggtcgggactccctggcacacaagggaatctggccacacttggcctgtcattatttagtccttggccagaagcaaaactatgagtcagctagcttgtggatgccagagggaaccagactgcccatattagctttcattgaagtgtgtcactttcctgatacttgacaccctgccctggtggctaagaggtatatatacagtctctcgaatgcactgagcacaagccaccgcggctgagctggttctgagttcattcagcgaaacccatagacacaggcaatctgagatttggaagtgccttctggggcccacagcgttcgtccctctgggatagttcatctgtggggggttgtgtttctgaagctgaggatacacgtgtcattggaaaggtgtgactatttggaactgaaatatgtgtgctcatttacccagaagggcttagaaataccgaacaaacctgtcatcagaacctagctatttacacacaccccccatttttttcagtgatgcctgggtctaaagtagttcctcacaatgaggcattttcttgactgctcttctagaactaaaaaggagagtttcccaaagaaatctattactatactttgtcttgaaggggcaaaaaatggacctatttactacagagccagatatcgcatccagttctctttctcttactcaggaagaaaatgaagcttgaaaattgcatttagccaccaggtagcccattaactgtgaatttagagcttctgttgcaaaggaattggaaatgtccagcagtgagcagttaggatgctgaccctaagaatctggtttctcgagctacttcatctaactttgtgtctgggtcaggaaactaaagttgatcagtgcttgtacctgcaatggggattccattgctgtattttatcctgctggcctaaagatagggagagagagagagagagaaagagagagagagagagagagagagagagagagagagagagagagagagagagagagagagagagagagagagagagaagaggacacatggaagagaatttccattctacttgctcttgtaattaaggtccagaatatagcaatgtagcacatctgaaattgacattgctaagaagcagtccatgggatgtttagttgtagacattctatgggtgtgaattctcaagtatttctgtttatacactgctcaaatttggggtatgttgcaagtgggacctcatccaatggacacagaaataggctaaatggaataaaccaatcaggggtcccagctctatccagttgttgaaccaaccagacccatatgcaaaaagcaccctctataggaagtgagacttcatggctacaggaaaagcctggttttctgagactggtgaaaagtcatcatagtagccttcatgcttaaaagtaggctgtagagctctcaggatagaaggttgtataacgggtcctaggaagtttctgccaagattgtgtgacctgctaagcatgtgttcagtcacaggacacaaccttaccgtataaattagtctgcagctgaggagcggcaccgactagacgtcagtgggcaaggcctccctacaaagacgaaggatcattggttatgtttggaacacagggactaaaaagaaatacaaatcaggtcactctcctgcagtttaaataacagaactgctagcagacagatgcgctgctgcctcctcctgctgcttggtgcttggacaaaaataccttccagttggagtagagtgatgtgtattcaatgcattagaagttcactgaggtcaatatgcaaggaagaaaggattatgcaccaaatactttgcacaggatgagttttgtggttacagaacaaagatgacaggtaaactacgggtttaaggtacataggtgaccaggagagatgctgggggcagaagagaaaaatcctcaaaaggcagcagctaagagtaaatggtcaaagtgctgaatttcctttctgcatgcaggcagctgaacttgatttcccccacaccttctagaaggacaagtactctttatttcgttgctaacattcggagagcctggtggttagagctctggctgatgtgactcatgcacataatgagtaaatagcagagccaggtcctgagcaaactcactgtgcagaattcaagtttactgccttttctagtatgttaagctctctcctgccatgctgccatggctagttacaacctattaatttcctctgcagatccttcagtcttcacctaggtcagggaaggcttgcagggcagatggacaaaagtatccataagtctatctatcttgatattgtacctgtaccttttccttcccatcaacagtctctacaccagtgagggggagtaaggcagacaggttaatggttgagctgagtaaatactaatctctgttgctgttctatagcaatcctcagtggttcccatttaaaagacattaaattctaatgtcctaggcagatttgggtctgaatcttctgtcttaactctctttaccccatnnnnnnnnnnnnnnnnnnnntttcgttgctaacattcggagagcctggtggttagagctctggctgatgtgactcatgcacataatgagtaaatagcagagccaggtcctgagcaaactcactgtgcagaattcaagtttactgccttttctagtatgttaagctctctcctgccatgctgccatggctagttacaacctattaatttcctctgcagatccttcagtcttcacctaggtcagggaaggcttgcagggcagatggacaaaagtatccataagtctatctatcttgatattgtacctgtaccttttccttcccatcaacagtctctacaccagtgagggggagtaaggcagacaggttaatggttgagctgagtaaatactaatctctgttgctgttctatagcaatcctcagtggttcccatttaaaagacattaaattctaatgtcctaggcagatttgggtctgaatcttctgtcttagctctctttaccccatgaacttctgcttccttacatgtgagtggagatgagaaacaactacatttggtcctgtgagaattaaatacagtaaaatatgtttcatgtccaatacagtaccaggcacttaagttgaataatgagtggtagttattgttgcctaccaactaatggtccaggcacatttgcagagtaactgaccttgttctaagcttgagactctgcctcctggtttgtaatctttcaagcctagctcttccctcctagaggaggatagaggccatgatacttaaaagaaggaggggctcttcagaacccagtgtccatgttctgcccatttttttagcagaaatctgctggagagtaacatccttggaggaatgagcgaacaggatgaaagtaaaggcctaatgattgctcatgacagagatggagggcaacttggcagctgaactgggaaattctcctcttacactgatggggcatggggaaactgggttttgttattctaaagagcaaataagtagaaaataaatggttaaaaaaaatgagtggccccactgagtcccaattaaagtgagaccagggcatcctagcatatgaaattatcttagagtccattttaaacccattaaagttcactaatgagttacacagtgtaaaaaaaaaaaaccctcattatacagttagcaacaaagattaacaccgttatcaagttatcaagtgagggttttgttttggttttttttttttgtttttggttttttttgttgttgttttggtttggtttttggttttggtgttttgttttgttttgttttgttttgttttgttttgttttggtggtgtagggggatgggttgtaaaaagtacatgaactgtttgcaaaacaatctgccttgaagtgccagcagagcatcgtgtcttagactggcaaagcatggtctctgcagctctggctttcacaggggatgtgagggaaaagtgctttggctttgtctgggtgtaaattatatattttagttagtgatggtgacgttgctgaagttttccttgactctgttattttattttatgtttaccttatttcatgttttaatgttgatttattgtggaatttttgttggttttgttttgttttgttttgtttgttctttgtttttttgtagcagggcatcctgtagcttgggctggacttgtggggtgatgctgccaaagatgaccttgagctcatggtttattctttttcaatcctcgcatttcaaattgccattttcaagtcagtattgaccctgtgctagtgaccgacaggtcggatgcaaggatgctctcctcaacaccaactcagaaccatggtttttgttttgttttgttttgctttgcttgtttgtttgttttctggtgccaggaattgaacttgggccctcacatatgctatgaaattatagtgttttagtggttcctctgcagtaagcacattagaatttccctttgttccataccgtattttctaatcactatatatataccctaacgtgtcaaaaagtatggaatgttggtacattctaatattaacagctaggtctgtcaaactattggggttacttggcccattctgactcccaagacctgagcaaagataacagttagacataggcttcaggtttgaaaattggctattaattattctgtactctttaaaacaggtcacagattttgtgagcttttctcttttttcattaattaattttacatcccagtcacatcccccgcccctgctctcctcccattcccatcttccaccccctctttctcatcctgggaaagatttgggggtgaccctagctgagactcctagcaggagatatggggcttgaagtggccatctcctgtaacaaggtaggacttacagtggagggaaaggaacaccaacacacccataaaaccttcaaactacaagatatgcagggataaagatggtgcagagattgagggaacgaccaactaatggctagctcaactttagacccatcacataggaaaagagccannnnnnnnnnnnnnnnnnnnnnnnnnnnnnnnnnnnnnnnnnnnnnnnnnnnnnnnnnnnnnnnnnnnnnnnnnnnnnnnnnnnnnnnnnnnnnnnnnnnnnnnnnnnnnnnnnnnnnnnnnnnnnnnnnnnnnnnnnnnnnnnnnnnnnnnnnnnnnnnnnnnnnnnnnnnnnnnnnnnnnnnnnnnnnnnnnnnnnnnnnnnnnnnnnnnnnnnnnnnnnnnnnnnnnnnnnnnnnnnnnnnnnnnnnnnnnnnnnnnnnnnnnnnnnnnnnnnnnnnnnnnnnnnnnnnnnnnnnnnnnnnnnnnnnnnnnnnnnnnnnnnnnnnnnnnnnnnnnnnnnnnnnnnnnnnnnnnnnnnnnnnnnnnnnnnnnnnnnnnnnnnnnnnnnnnnnnnnnnnnnnnnnnnnnnnnnnnnnnnnnnnnnnnnnnnnnnnnnnnnnnnnnnnnnnnnnnnnnnnnnnnnnnnnnnnnnnnnnnnnnnnnnnnnnnnnnnnnnnnnnnnnnnnnnnnnnnnnnnnnnnnnnnnnnnnnnnnnnnnnnnnnnnnnnnnnnnnnnnnnnnnnnnnnnnnnnnnnnnnnnnnnnnnnnnnnnnnnnnnnnnnnnnnnnnnnnnnnnnnnnnnnnnnnnnnnnnnnnnnnnnnnnnnnnnnnnnnnnnnnnnnnnnnnnnnnnnnnnnnnnnnnnnnnnnnnnnnnnnnnnnnnnnnnnnnnnnnnnnnnnnnnnnnnnnnnnnnnnnnnnnnnnnnnnnnnnnnnnnnnnnnnnnnnnnnnnnnnnnnnnnnnnnnnnnnnnnnnnnnnnnnnnnnnnnnnnnnnnnnnnnnnnnnnnnnnnnnnnnnnnnnnnnnnnnnnnnnnnnnnnnnnnnnnnnnnnnnnnnnnnnnnnnnnnnnnnnnnnnnnnnnnnnnnnnnnnnnnnnnnnnnnnnnnnnnnnnnnnnnnnnnnnnnnnnnnnnnnnnnnnnnnnnnnnnnnnnnnnnnnnnnnnnnnnnnnnnnnnnnnnnnnnnnnnnnnnnnnnnnnnnnnnnnnnnnnnnnnnnnnnnnnnnnnnnnnnnnnnnnnnnnnnnnnnnnnnnnnnnnnnnnnnnnnnnnnnnnnnnnnnnnnnnnnnnnnnnnnnnnnnnnnnnnnnnnnnnnnnnnnnnnnnnnnnnnnnnnnnnnnnnnnnnnnnnnnnnnnnnnnnnnnnnnnnnnnnnnnnnnnnnnnnnnnnnnnnnnnnnnnnnnnnnnnnnnnnnnnnnnnnnnnnnnnnnnnnnnnnnnnnnnnnnnnnnnnnnnnnnnnnnnnnnnnnnnnnnnnnnnnnnnnnnnnnnnnnnnnnnnnnnnnnnnnnnnnnnnnnnnnnnnnnnnnnnnnnnnnnnnnnnnnnnnnnnnnnnnnnnnnnnnnnnnnnnnnnnnnnnnnnnnnnnnnnnnnnnnnnnnnnnnnnnnnnnnnnnnnnnnnnnnnnnnnnnnnnnnnnnnnnnnnnnnnnnnnnnnnnnnnnnnnnnnnnnnnnnnnnnnnnnnnnnnnnnnnnnnnnnnnnnnnnnnnnnnnnnnnnnnnnnnnnnnnnnnnnnnnnnnnnnnnnnnnnnnnnnnnnnnnnnnnnnnnnnnnnnnnnnnnnnnnnnnnnnnnnnnnnnnnnnnnnnnnnnnnnnnnnnnnnnnnnnnnnnnnnnnnnnnnnnnnnnnnnnnnnnnnnnnnnnnnnnnnnnnnnnnnnnnnnnnnnnnnnnnnnnnnnnnnnnnnnnnnnnnnnnnnnnnnnnnnnnnnnnnnnnnnnnnnnnnnnnnnnnnnnnnnnnnnnnnnnnnnnnnnnnnnnnnnnnnnnnnnnnnnnnnnnnnnnnnnnnnnnnnnnnnnnnnnnnnnnnnnnnnnnnnnnnnnnnnnnnnnnnnnnnnnnnnnnnnnnnnnnnnnnnnnnnnnnnnnnnnnnnnnnnnnnnnnnnnnnnnnnnnnnnnnnnnnnnnnnnnnnnnnnnnnnnnnnnnnnnnnnnnnnnnnnnnnnnnnnnnnnnnnnnnnnnnnnnnnnnnnnnnnnnnnnnnnnnnnnnnnnnnnnnnnnnnnnnnnnnnnnnnnnnnnnnnnnnnnnnnnnnnnnnnnnnnnnnnnnnnnnnnnnnnnnnnnnnnnnnnnnnnnnnnnnnnnnnnnnnnnnnnnnnnnnnnnnnnnnnnnnnnnnnnnnnnnnnnnnnnnnnnnnnnnnnnnnnnnnnnnnnnnnnnnnnnnnnnnnnnnnnnnnnnnnnnnnnnnnnnnnnnnnnnnnnnnnnnnnnnnnnnnnnnnnnnnnnnnnnnnnnnnnnnnnnnnnnnnnnnnnnnnnnnnnnnnnnnnnnnnnnnnnnnnnnnnnnnnnnnnnnnnnnnnnnnnnnnnnnnnnnnnnnnnnnnnnnnnnnnnnnnnnnnnnnnnnnnnnnnnnnnnnnnnnnnnnnnnnnnnnnnnnnnnnnnnnnnnnnnnnnnnnnnnnnnnnnnnnnnnnnnnnnnnnnnnnnnnnnnnnnnnnnnnnnnnnnnnnnnnnnnnnnnnnnnnnnnnnnnnnnnnnnnnnnnnnnnnnnnnnnnnnnnnnnnnnnnnnnnnnnnnnnnnnnnnnnnnnnnnnnnnnnnnnnnnnnnnnnnnnnnnnnnnnnnnnnnnnnnnnnnnnnnnnnnnnnnnnnnnnnnnnnnnnnnnnnnnnnnnnnnnnnnnnnnnnnnnnnnnnnnnnnnnnnnnnnnnnnnnnnnnnnnnnnnnnnnnnnnnnnnnnnnnnnnnnnnnnnnnnnnnnnnnnnnnnnnnnnnnnnnnnnnnnnnnnnnnnnnnnnnnnnnnnnnnnnnnnnnnnnnnnnnnnnnnnnnnnnnnnnnnnnnnnnnnnnnnnnnnnnnnnnnnnnnnnnnnnnnnnnnnnnnnnnnnnnnnnnnnnnnnnnnnnnnnnnnnnnnnnnnnnnnnnnnnnnnnnnnnnnnnnnnnnnnnnnnnnnnnnnnnnnnnnnnnnnnnnnnnnnnnnnnnnnnnnnnnnnnnnnnnnnnnnnnnnnnnnnnnnnnnnnnnnnnnnnnnnnnnnnnnnnnnnnnnnnnnnnnnnnnnnnnnnnnnnnnnnnnnnnnnnnnnnnnnnnnnnnnnnnnnnnnnnnnnnnnnnnnnnnnnnnnnnnnnnnnnnnnnnnnnnnnnnnnnnnnnnnnnnnnnnnnnnnnnnnnnnnnnnnnnnnnnnnnnnnnnnnnnnnnnnnnnnnnnnnnnnnnnnnnnnnnnnnnnnnnnnnnnnnnnnnnnnnnnnnnnnnnnnnnnnnnnnnnnnnnnnnnnnnnnnnnnnnnnnnnnnnnnnnnnnnnnnnnnnnnnnnnnnnnnnnnnnnnnnnnnnnnnnnnnnnnnnnnnnnnnnnnnnnnnnnnnnnnnnnnnnnnnnnnnnnnnnnnnnnnnnnnnnnnnnnnnnnnnnnnnnnnnnnnnnnnnnnnnnnnnnnnnnnnnnnnnnnnnnnnnnnnnnnnnnnnnnnnnnnnnnnnnnnnnnnnnnnnnnnnnnnnnnnnnnnnnnnnnnnnnnnnnnnnnnnnnnnnnnnnnnnnnnnnnnnnnnnnnnnnnnnnnnnnnnnnnnnnnnnnnnnnnnnnnnnnnnnnnnnnnnnnnnnnnnnnnnnnnnnnnnnnnnnnnnnnnnnnnnnnnnnnnnnnnnnnnnnnnnnnnnnnnnnnnnnnnnnnnnnnnnnnnnnnnnnnnnnnnnnnnnnnnnnnnnnnnnnnnnnnnnnnnnnnnnnnnnnnnnnnnnnnnnnnnnnnnnnnnnnnnnnnnnnnnntgtctgcaagcataacagagtatcattaatagtgttaggagttggctcttctcctatgcgatggaagttgagctagccattagctggtcgttccctcaatctctgcaccatctttatccctgcatatgttatagtttgaaggttttgtgggtgtgttggtgttcctctccctccactgtaagtcctaccttgttacaggagatggccacttcaagccccatatcttctgctaggagtctcagctagggtcccctccaaatcttcccaagaacttctcccatcccagttctttggcttgttccagagatgtcccctctactgatttcccttctctctcccagatctctcatcccccaactccactccccctccacatctgatccttaccctagtgcctctccccatcacactccttccccacacccagttccctgttctttctctccatccacttctgatgtctattttatttccccttctgagttagagtcaagcattctcccttgagccctccttgttatttcactttttagggactgtggattgtagcatggttttcctgtaatttatgactaatatacacttataagtgagtacatatcttgtttgcctttctggatctgggttacctcactaaggatgatattttatagtttcatccatttgcctagaaatttcatgatgtttctgtttttactagctaagtagtattccattgtgtaagtaccacattatatttatccattcttcaggtgagggacatctaggttgtttctagtttctggctattatgaataaagctgttataagcatagctgagcatgtgtctttgtggggatgttggagcatcttttgggaatatgtccaggagttatatagctgaatccttaggtataactatttccaattttctgagaaacagctaaactgtttcccaaagtggttgcacaagtttgcactcctgctagcaatgaaggagtgttccccttgctccacaacctcatcagcatgtgctgtcacttgagtttttgatctttaagatcattctgacaggtgtaagatgattctgacaggtgtaggatggcatcttagagttgttttgattttcatctccctgatgactaaggatattaaacatttctttaagtgcttcttggacattagagattactctgttgaaaattctgtgtagctctgtaccattttttaattgggttatttggtttgttggtatctaatttcttgagttctttatatattttggatattagccttctgtcagatgtaacctttgtgaagatcttttcccactctgtaggctgctgttttgtcctattgatgttgtccttagctgtgaaaaagcttttcagtttcatgatgtcccatttattaattgttgatcttggtgcctgaattgttggtgttctgttcaggaagttttctcttgtaccaatgcaatcagggctgtttcccactttctcttcttttagatttaatgtgtctggtttttgttaaggtctttgatctacttgggcttgagttttgtaaagggtggtaaattttgtgttttatctatgtggaagaagaaagtaatgttggtcatgtttatatgaggtagcttctatgatctctcagaacctttcttgtgctattggatgtaaaggcttctgggttgggctggggttaaacagacggtaaaatcaagaggatcgtgctcctagactatatgtctgtatgtccatctgctactctgtcctcacatcttaggatatgctcaggaaaatgccacctgatggaaagagacctgtgttgctgtgttggtgaattaatagaccacacgattccatcattactttcatttgtgtgcttattggattgagatctgtcttctcacacttgatcttagccaatgaggcaatgaggtctgtcttctctaccagactagctaatcttccaaaatattagccagatcatttgttccagtaggaataagacctgtcaaggatggaggattccatagatgctcattacattgcatttctgtcctctgatcatttagagtttttcacattaaagatttcaggttataagtccccaatttcattcccagatcccttgacttttgaaggacggtaagaatattcatctcagtgttgaaacagagatagcttttcttctaagagtggtacagcaaacagtttacaatggaagcttctcatataattgcaggaaaagcagcttttctataccaccgtgataaagaaaagtccttttccttgtttgagtacaatttagtgatattggcttctgagttttggaaagacatcagcatgcacctgtttggttgtagttacatcatccctcgtcaggtaaagctattcaatgctactgtcacttgaaatgccttttctgagagtttctgacacagggcagataccattcctcctgcttggctcttataaagtaatcagaggcatattttgtcttaagattcttaaggaactgaaaatacaaaagcttacatttagaaaagtgtcattaatcctgacccctggaagacagtaccagccacggtacctttgaaggcaaggcctgctactgctttaaaaaaaaaatgtttgcaatgtgggtggaaaagggcttgtggagcatatggtgttctgtccttcctttcaaaagccctgtggatttgacaagactgtgggcgggatcccatggtcctctgcttcatagcctggcatggctgtaagggcttctctgcttccttaggttttctgactatcctttttctccatcttttcccttcctgcttcctggctggatccaccataggaacgctttggggtaactatgatttttttactttgctttattttttttcttttagtagaaggtttaggggactaggtgggaggagggggaaactgaaaagaaattggaaaagacagagctaactcaatgagaaaggaatgttgggtttatatgaatggcatgtttccattgagagccaaaagcttaaaagtgagcagtttccaagccttcttgggaagtgaccattcctgttggtttgggtaggaattgacctatatgtttctcttacatgttttaggtagatgtgcttaaaaggcaaaataatttattaaacatgccagagcttttagatgtgaaagtccatattaaaaaaaaatacagatatttgggttacctttcaaaatggcatgcacatcatctcatcacctttgacaaacaagggaacttagaattctattggtataaagtcaacatgaagggttaattcgttgatttcatgccttttgtcaaaaggaaactatgacttccctatctgagtctgggcatagcagagccagttgcatgctaaatcaggtgatctccatctgatgttcttgggtcccctctccagtgagtgttaacatcatagtctgggtcaccgtgaggaaagaagcaagcctggtctcactatttagagtcttatttcccagtatgtacgtggttttacaaattgtagctatttcagttgaatacaaagatctcaggggatacgcagggagggaagaaagagatcttcattaagagaaaacactttttgagatgctgcataacaagtatcattacccataagatcaggagaaaggtgagtgtggcctacaacttggggccgctccaactgagtagttctctgaagcccatggctaggtacagagtttctgagatggaaatgaatgcaggaaaggccagccacccgtaattggagtgtgggccacggttctggcaagacacctatgcacatgctttttctgaggtggcagcctagccagcgagagtggtgtgttccccaccagtctttactctgttctccccacaccggtgagctgggagaagtaacaaacctagacttctggatcaagttccccaataagacatgctctcaactgttccctttccagccaacaaatatcttaaaaacctgctatgggaaaggactgaactaggctcagtggagatccacagtgggcctctggtcatggaatctacttgatgttatttcttttttatttagcagtttggtattacagtgcattaaactgaccactagagacatgaagcaattattaatatatgtgcatggaagttggtgtgtccctgtgtgttcctctacgtgaacacacagacatccccttttttatatgctcatatccaagtaaatacaatagaaattgaaaatgctttaaatagaaaatgcacttattacagttatgggcatcttatcaacttaacagcatattattaatactgcaaagtattaatctttaccctcatgattttgtgggtgactagcaccactgactgcctggccttgcaagagagtttctctctgtatactattagtctgtggggggaatatcccaacttgacatcatttctattgaatataatttactgttgcacagtctgaagttgtgaaaccataagttgaacagttgtgagcacatggatgcgcatatatgggcatatgcatattgatgtgtgcacatgtacaactagagagtgatttaagactcctgaagcatctttggactgccccagaataagctctacactggcccggtttctggcctcttgtctactctcatctctgcatttattctgttgttattaatgcaatagtgtggcttccacttctgtttatcccctttccaaatgactccctggggtcctctctctgcagaaccaacaaggggagggatatcaagactatcaagtctctgagggtacttcgagttctgcggccactgaaaaccatcaagcgcttgcccaagctgaaggtaatgttttcagagttttttcccatccaatacccttctttcatcttctcccgttagctacagctggctagcctttgcataatctattcttagaatatcccctttttttctcttggggattgattttttttttcatctattggagccaaggtctttgtttcaaaggaaagtaactaacatcccaagtaactcacaggtgagattctccttcttcagtccagacccagttagttttatcctcccttgagtggcctgtcatccaggaagaagactatatggctttgtcatggattgtcctgtgtcattaaagaagaagtcacagaagccctctgtattaatggtctgtgtgctagggtaggccggataatctggagtatttttcttcagtcatagttttagaaaagtttacacaaatgtttcatattttttagatacaaacaggtaacctaaggacacatagtctatttatggcagaaacagaaaagaaatggagaagtgagttaccctggataaacttcttattgccatgtcctggacaaaaataggtatcttttccatagggcttgctctccattcaagcttggcatcctacctaactcagcctcctctcttttcctccccatgtatcatggttaataaaatctgaagctccatgggagaaaagatcctccccttcttgaattcttgagaactctcagcttccagtacagagccttacaatctgattcaagtagtccaggccacccagccagtagagcaagccccagccccagctcccagtccccagccccatcctcccggggtacacaagggtgcttcttaggaatcagatttcattatccatttgcagaatccatgaggctagcataggacttctcaaagagtggccatagaccacccttgtctgaacactgaaaatcttcctaaaattcacctatctgtccatatcagcaccactgagccagactgtgagaggggcctgaactctggctcttcaacctgatgagtatatactccatagtgtagggactggccatgaagaagaacctgcatgagtactaggtccagctcaaggattttggagtgactcagaggagaatacctattcttagaatttcttgcacccagaaaatggagatctgtatactctacatttatagtatagacaagagagctgccatgagccaaaaacccagcagttactctgggagatggactactctcctctgcgtgnnnnnnnnnnnnnnnnnnnnnnnnnnnnnnnnnnnnnnnnnnnnnnnnnnnnnnnnnnnnnnnnnnnnnnnnnnnnnnnnnnnnnnnnnnnnnnnnnnnnnnnnnnnnnnnnnnnnnnnnnnnnnnnnnnnnnnnnnnnnnnnnnnnnnnnnnnnnnnnnnnnnnnnnnnnnnnnnnnnnnnnnnnnnnnnnnnnnnnnnnnnnnnnnnnnnnnnnnnnnnnnnnnnnnnnnnnnnnnnnnnnnnnnnnnnnnnnnnnnnnnnnnnnnnnnnnnnnnnnnnnnnnnnnnnnnnnnnnnnnnnnnnnnnnnnnnnnnnnnnnnnnnnnnnnnnnnnnnnnnnnnnnnnnnnnnnnnnnnnnnnnnnnnnnnnnnnnnnnnnnnnnnnnnnnnnnnnnnnnnnnnnnnnnnnnnnnnnnnnnnnnnnnnnnnnnnnnnnnnnnnnnnnnnnnnnnnnnnnnnnnnnnnnnnnnnnnnnnnnnnnnnnnnnnnnnnnnnnnnnnnnnnnnnnnnnnnnnnnnnnnnnnnnnnnnnnnnnnnnnnnnnnnnnnnnnnnnnnnnnnnnnnnnnnnnnnnnnnnnnnnnnnnnnnnnnnnnnnnnnnnnnnnnnnnnnnnnnnnnnnnnnnnnnnnnnnnnnnnnnnnnnnnnnnnnnnnnnnnnnnnnnnnnnnnnnnnnnnnnnnnnnnnnnnnnnnnnnnnnnnnnnnnnnnnnnnnnnnnnnnnnnnnnggaagggaagggaagggaagggaagggagagggaagtggaaggagggaagggtaggaaaagggggaattgaagggaaagggatggtggaaaggagagaggagggaaggggaagggaggggagaagggaagaaggaaggaacaggtcacttctaaaggggtccagactagctgtgacatgggtttgttttatatcatgcatgtagattcccaggggtaacttggtctttaaaggtagtggctttttcccttgctttcctccatcccctcctggatcacgacattctatggtgtcatatctccctgaccaccctcccactagcaagccactggcttaggcttatcaatcaccactcccatgtgtcccatctggggctccaaatgtgaacttcagtgcaagttcccatgggaacagaggaatgtgcaacagcttgacaggagcagtccacccccgaagaatgtggccgtggccttcattatttcttttaaactggggatcactggctcctctctttgttaatgaacaaacaaagccagacatgaaatgacataaatggctctgatcattccacaagtctgttgtgttgctcaccttctctgcagtgttaaactaattgatccagacatactatacccagtgctgtgaagcagcaaccacacaattgcagtatcattgtaaggccagactctccggtgagctaaactcccaaagcccagaaaataagctaaaaatggccttaaatgtatcaaactctcatggaattcctcgtggcattggaaatagaagggaagtctctggagagtctctgtttttacatgcaaactgaaacccttgtttctatccacccagcctcatccacaacacagagagacctcagtctgttctagagtcaatgttgaccttccccctgaaggcaatgagtgtgcaactagagggcagcagcgtgaaatgatagagcctgatgtagtcagagctaatatatgaacttatgataaaatactgaggtgaccaaaggtagtagcatgcgatagccctttgattcatttagaaagggaaaagaggatggtacataatcagtatgtaaataaatctgtcaccaataggttcaaggtaaagaaaaagctgtataatgggtaaagtggtctaaatgatcttctaagtccccactagcatttcatttctgggtagtgcctccacaaagaaacccctccattactttatgccatcttgtttaagcttcgtgctttatatttactttaagatctagagaaggtgtcttcttccagggcaggtccttgccaccatgaccagcttgagagtgagctcttaaccctgtgagtatctctgctcagaggggagagagcccctgggacagcttctcaatctgcagggtggtggtatggccctacctcagctcacaggaatgacacgagagcctttgctgccgtccacaggctgtgtttgactgcgtggtgacctccttgaagaatgtcttcaacatactcattgtctacaagctcttcatgttcatctttgccgtcatcgctgttcagctattcaaaggaaagttcttttattgcactgacagttccaaggacacagagaaggagtgcatgtaagagctactaccatatacctctcactactaacaaacccctgggtttcctttctctcttaactcctttcccattgaattatgaaacaggaagaattataaaatgaatagatatttgttgaactcctttattgtatcagatttggtaagagacacgttgccttaacccttaagttttaagtctttctgatgatctactgaaaggagttttatttacattttataagtatagacgatgacactcaaaatttaggttgtccaatataacaaagggttagcctaagaaaaggttagcactctgtatcagaatccgtcctacatctgctgggccccaagggccaattttattccatgttagtatttaataagacatgcccttccttttctgtgatggtcattgttaccccgacattcttaaagtgtataagaatggttgactgttccacacacttgccttaaaagcactatttcatttctattttggtttcagaggcaactatgtagaccacgagaaaaacaagatggaggtgaagggccgggaatggaagcgtcatgaattccactatgacaacatcatctgggccctgcttaccctcttcacagtctctacaggggaaggatggcctcagtgagtgatggggtgggcttggtatgtgtcttgcaggctgagatgggactgtgtgggtgccttgaaaagctgattcaagatgaacacggctaaccctttgttcttctaccaggctaagtaagtggttatgagcgggggagaaaggcagaaaggaaaaataaaaacccttcaaacaaagatggagaggaggaagacaaagtcaggaaaacatctaaaactctaaaaacccttcagataaagatggagccaaagtcaggataatatctgaaactctttttttgttttttgttttttgtttttttggtttgtttgttaatctttgagttaggtggagccctctgacttacagaacaaatgagtttttacaactttctgtccctcaggagaatccatgagggctgttttaaatggatttattcttaaggttggccctatacttgagagttaaaaggtggaggggtctggcagaccacagggatgctgtctaacactagacccctttagaaagatgcaggtttttacgctgtccacagcaggatgatgatttctttaaaagacttaggaacaagtaagacattattagttagtgggagaaatccaagtggcactagaagtctgttggtattgaacttgacaacctaactaaaagaggatagcaatctgttgcttaggagctgaatgaagatggaatataggctcgaaatggcagtagtattttttctttatgaactttgttatggtaaccccagatcagtggaggattggaaaaagtcagagaagtcatattaagagctatgaaaggtgacccatctcctaacaaagccatggatgtcatgtatcatctgtaccctctcttttggtcctcacagggttctgcagcactctgtagatgtgacagaggaggacagaggcccaagtcgcagcaaccgcatggagatgtccatcttttatgtggtctactttgtggtcttccctttcttctttgtcaatatcttcgtggctctcattatcatcaccttccaggagcaaggggacaagatgatggaggagtgtagcctggagaagaatgaggtaacaatagatagactatagtaagggacagcaggggaagcatcagaaaagaataaggaccagcatgcttagagggagagactgcattttctaactttatgatagcattaaagctatgcagtcttggatgtgggactccgtgggtaggaacactttttctagtataaggacccaagtttgaatcctcagcatccacataaaaagctgggctggtgagatagctctgtggttaaaagtacctgttaccaagccttatgatatgagttctgtctccggggccctcttcataggagagcaccaactcccacaagttgtcctctaatctttgcatgtgaattttatatatcgggcacacacacaacttttattttgttcaaaagctgggcacagctgcatgtgcctatagtcccagcagggaaacacaaacaggtaaatcctgagaacttcctggccaatcagtgaacgatgagcttctggctcagtgaaagatcccagtccagggcaataatgcaacagaagaagatgccatgaccttctctgaccaacatgtgtgtgcacagacacgtacacctatacactcacatgcatatatatcacatacagacaaggcataaaaatatacacaaaaataaacttgaaatttctacccttatatgtgatggcctagaaggaaaaaaaaagtaggtgctacagttgcagcattaagacatttgcttatgtcccttgctctcatggcatctgtgtttctaataacagggaatatgttttattgtgtgctcctccagcacatgcataggtttggaacattattagtttcatggctaggtttgttttttaacaaaggagctgaattagaaatggtcatagattataagagaaatacactggcagatacaggttgaacacctctaatataaaaatccaaatgcttacaagtccaaaacatttttgaatgatacgatatggcaagtagaaaattccataccatgaaactttgtttcatgtacaagattaataaaatattatataaattacccttaggctatgtgggtgagacacatatgaaatattaatgaattttgttctaagctgagcatcctgccttcaaactatctcattacatttgtgtaaatattaacaactcgggaaacaagtctgatatcacaaatcactctggccccacatagttcagatatggaattcttatgcagtagattgatagctataactatgggcactagaggaaagtttccccataaaatctcagccttatatggtataagatgactttcaacccatgtgacaggatgccttccagatgcccccagatgtgtaaggtgacatcttgcctatggtttggttcagatggtccctattgctgctttatgattgtgtagcactttcttttatccttaaagggtctacttaatagcgcccatcttaatagcgcccatgcaaggtttaggggcagttgagctaattctaataaccttgactttctgcagcgggcatgcatcgacttcgccattagtgccaaacctctcacccgctacatgccacagaacaggcacaccttccagtaccgtgtgtggcactttgtagtctccccatcctttgagtataccatcatggccatgattgccttgaacactgtcgtgctgatgatgaaggtaagaagtaattctgtttgtgcagtgcctgggaaatcactccaccttactagcttaccacgtttacctgatcttgcatcctggagtctctttgatcttacctacttcaatagcctagcccctgaatttctgagtaggggtagggttatggaataaaatgcagagtaacagagtagcagtaggggctctcaggaacaaaagacgtcaataaggtccacctttgacattgtggagtctaaaggagtactgaagttaatgtgagcctgatcatatttaatgctaagtgcaaaacacctaattctggaaagcgcttctgttgtgctaccttcagtttgggtatgaaggttatttttgctattaaggtatcccaggtgggacatgggtatgtgttttactacataatatgcatgtattgaaatgttctaccaggtcaagatgagagctagacctggcatgtatattccaccacatacacatatgccttaaagatttgtctctattattcttttcttccccctcctggcagtactactctgctccttgcacctatgagctcgccttaaagtacctgaacatcgccttcactatggtgttttccctggagtgtgtcctaaaggtcattgctttcggcttcctggtatgtctgtcccagcatcagcttctcttcctttggggtacatgcaggttactgctgctcaagaatggttcaccctcttgcccatctaatagggagtttaaagaggctgccatgtgagtaaagtaggagaagaggcaaaggaagccacctgcttatcgccatactgatctaacagtctatgccagtcctactgaattctgtcagccatggggcagccatcaatggattttactagaactacaattgacacatgaagaaataagataaaaattagattagcaggctggaggcatggctcagcggttaagagaactggctgctttctctaccagaggtcctgagttcaaatcccagcaaccacatggtggctcacaaccatctgtaatgggatctgatgctctcttctggtgtgtctgaagacagctaaagtgtgctcatataaataaaataaatctttaaaaaattagctaaatcttgagttatttactggtaatgtatatacttattgtatgatttgaatggaaaaatatctttcatagtctcaagccagcaaataatagattttagttattagtcttctgaccataaagtatcacaaagggtaccttctgccaatgaaaataaatgtttattacttatgttcacaatgtccaagtacttttgagggtttgggggtaggtgggtgaagattctggaattgactttgagagagagattgtaatggaaattattctggcatgagctctttttttatttctcctcaactagtaattataattgtttgacaaactcttgcatctgttcccaagactgttaacaacaaaacctgccctttgcatcagtgcactataaacaaaatccgcccctccctctcctcctgcttacttcagggtgtgccttgtgtgttcaatggggtgcagataagcccacttgacaactgtttcacagttattcagggtgtgcattatccttcccagggtatacggtccaggtcgctttcctagcacacaggggaaagtctgctataaatcaaaatgagtgcttcaggtagcagctgtaacagagcctctgagctgggcttgataattgtcagtgttggttgtggaggctgtttccagtctcccagttctttatccaaccattaatttgattatttggggtggagagttgaaaggaacccattgcaggggctgcattgtggaattcctgactcccttttgagtgttttgagattcgaggaaataaaaaggtaaaaggaaactttatcaaacaaagatgcctttataaaatagtctagcccaaatagggtgaagtgaaaggaggagggggaaccagcaccaacatggggaaagcttctctatgagtcttggtgttgacatcgtctgtgacttaaaccccaattacgtgtaattatggtgaatgctgaatacatacttacaggcttaactagaggactcggccttgagccctgcctccttcccaccctcatccctgtgtttcattcaaggcctggagtcattcacaccagaataggcaccgttacattggtttgacatctgaagctttcagaatgccccaacatgtactgcttggtcagatcttctcattaactcagaaacaggcagagtagatattgttgccattgctacaattatccttcaaaaaaaaaacaaaatcaaaaacaaaaacaaaaagaggaaggtcataagatatgtaaaagttatataataaaatgtagaattagaaagtgggtgtaaataaaatggaacaaaaagaggaaattgggctaccatacagtgctttctacatcctttttttttccctctgtgtaacaagtgcataaaataggcttacttgtgttcttcttttataggtgaactatagctcagggaagattaagactttgttcagagttagtgaaagacaaaccaggagtttgatcttggtctatctgacctcagagttcacaataatctattagtttattaagcaactagggcatattccaaaatttccaatggatacctcaaactgaggataatctagtatctacatattctttcatatatggctaaatgttgcgatgggttctgagagtctcacttatcttcatttcttttcctgttgatgcgataaattatactctgacacatgcaacttaaatgataagtggtttattctgtttcaacagtatagtctagtgttcagaaagtccaagtgtcaggtgcttgaagccatgggtcgcatgacattcacaatcaggaaacagagaatgatgcatacatacgtctggtcaggttactttctttatatagtaacatgatcccagccagggtgggtcttcccactctataacacaaccaggataatccctcataagcatgctcagaagcccatctcccagatgattctagagtctatcaagttaacactaacattgttaatctgttaattatgtcaaattagcacgaatattgtttggtgatcttgtcgctttgtaaatatcatagtatgtatttacaaactgtaatagctctatcaccagacagcatattatgagacccactgcgtatatagtgtgtcattggcagcaacattattatgaggtctttgactgaaatgtgttttgtcctatcaagttgagagttttcacttaaagcacttcagatcttcactttggtgttctataatttttcacttaatattttggattgtaagtaactaagatcatagaaaatgaaactacagataaaatagaagattactgtagtgcacaatatgggatgtgctattgtaaggcatcctcaattggaattcaaggtttctaatcctctgaaatgaggaaattcatctctggatggagaataggagagccttagagtttggggaccttcagggccccacttggctcccttattagtgagttaagagctccactagaaggtgaacttgttcacaaagttgagtacatctgtacacacacacacacacacacacatacacacaaatatatgtggctctgaaatgagatctccctaaactttagttttcccacacagaaaacaaggataataatagctgtcttacagtcttcaatagatgatgctcattaaacaaagcctccctctgtaccagcctttctctgtagcatagcttcgctgttttagccaagccttctattcagtactctataaacttgggacatttggcattacctaaccttcagatccacaagaaggacaaatgagcaaaagaatatcaaggatctggaaaagaagataaagatcatatgatgataaatgtaagagtaggtcagaggacgctttggtgtcatccccaaaactgatggtacctggtaccaaggggaaagtcaagtggacattttggaggagtgggtttcctgtttaaagaatgtagtccaaggtatgtgctatctgagattggatggacacatcatacattctgaagcaagaggagttatctggttggtggactctctgggtcttttatatctctcctatatcctattcaatcaatctcctcatttatatataacacttaagtactcttatggtataacagagcagaaaaggggtcggggagttggagtctattcatcctactgtcaatcatctgttctgaaaagacagctttgctgctgtctgtaacctttagtcccattgaagccagtcctcttgaagcaataaaaataactaagaagttaaagctgtatgatgcttaatgtttaatggccatatacttatcccaattcctcaaagtatatacattacaaatgtaaagctttttctttgttgatcaaactcggtagcatgggtaaaaacaaatgtttcctaattaaaaaaaaaaaaaaagaaagaaaaaacctttcttatgggatttttagtgacagtttcaaaaacatggtctacaaatagttgtggaactgttttaaaaatgaggagttcccaaattagtaaaggagaaacagaatttcgggttagaaacaggaaactgagcccaaagttagaatgaacttatgcatgaattgacaagttttaattccaagtgacaaagttatgtaatgaaagatgtttttctttctttctttccttataatgttcatgttattgaatgcacatggcagaactatttccgagatacctggaacatctttgacttcatcacggtgatcggcagtatcacagaaattatcctgacagatagcaaggtgaatgattcacaagatcgccatagttaagctgtatcctgatgtagtatttaaaaaacaacttctccacatacatctaatcaaacaggtccccttcgtgttggaagtctacttcatccatcctgagcaataatcagagaaaataaacttggggatggtgatagtcctcatagaagcattaggtatatttgcatgactcaaatagaagatatctaatggcatagtgcaaaagaggtgttggaagaaagctaatattgggtgtttggctgaattctccaaagagaaacatagtctttaacctccaagttgttagtccgaaagtgtttccctaaactagttcatcctaaagatcacgtggagagctttattgtaattattgaataccagaacgccattgtgttgaggggcttaggagagtgctctttaggaatctaagtgcagaatttagagtatttggagaaactggggaagccagttttcctcccctgtgtgctggcgtactcctcaaacccatctatctacctaggactcaaggagctcagctgggaggcttagagggagactcactgggtgcccctcaacaggagttaggttaactgcaaaagacagagactgccatctattttgtgatctgaataaggaataaatgcgaaaataccagtgcttagatctttttaaatgagcatattgtcactaattacatgtttccttttggtccaccagctggtgaacaccagtggcttcaatatgagctttctgaagctcttccgagctgcacggctcataaagcttctgagacagggctacaccatccgcatcttactgtggaccttcgtgcagtcctttaaggtaagaggctccccgagggtggagcaccgcatgccagacaacactgcagcggcaccctcaccctggttccttcacttccaggaaggagtttgtaaacttgaagttcattagaagcataaatacaatagttcttgattatagcgcaggctggctggatagtgatcaattcatatctacattacagaatcttattctaaaaaaataatgtatcgctttcactttgtaatctttttttttctcagcactgagacagagatgtgctttatgaattatgtgctgtccttgagtattctaaatctccttgagcaatcctgcccatacatagagtcagcctcccgtcgtcagatgccttcagtgtgttcaggaacttgtcagtgacttaacctcatggaaaagtttttcagaggacttttcaactcatacgtcataaaaaagatgactcatgtacagttcaccatgtcttcagcctgggcatctcttgaactactgaatgaatagtatactaatggcacacacacacacacacacacacacacacacacacacacacaaagtcttataaaagctaggaatgtttgatcaagttattgcaagatagtttcttttaaacattcatatgggactgtgcctatgtccaggcatataaaggtttgttaaaacatagacgcctgaaacccacttcaatgacaatattagtaaagtttccaaacatactttctttgagctctaacaatagcataagttaaatgtctttttgacatttaacaaataacataattagatcactgaggcctgggtgcatttcttttcttgcagacaaagtttttcaattaatatattaaaaataaatttgataaaattgattcaaagatgacaaaccataagttcaacaaattgtcctcccccatttatttatacatttaattaaatttaagagaacaggacagtaaaatcatagcatgtaatcacctgaaaagggagattccttattatattattatatattccaacatatttcctattgatttgtttcagcatcagaatctttgcagtttgagatgaatccgtgactatcatgtccagattccaagatatggcctttgcttttccaccctacccctagcaagaaccaattttttggcagggttattcccacagaggccttaccccaatgaactccagtgttccagggttagaggacagaggaaaagtttaaaaccttacaagtttgccctctgattcttgggtgagttcagatttagaattagagagatggactgcttttaaagctgttttttttttaattttattttaaaagagctgcccatcaggcatcagttgttagtgagtctaagaaataagtgtcatactgtcatgttatcccatcagtgagactctgtgacactgtgtcctattgaagctaaagaaaatgatttcaaaaactgacaaccaaatgggtagcatatttagtggatgttacaagaacgtagtaggcaagtgcatctggatcccagtggggtggtagtctggatgggtgttttatcttcaggacagttctgtgatgctgtacagaagcagattgcctaacaacaaaaaatttaaaggtaaattcacttacgcaaatccaaagcagagagatgttcaatattaatactatatcattgcctttacctactctgacctaatcctaggattcatccagagctgtctcaaccccatgttcagaatgccaaaactcttttctattattttacattagaatgcattttgagaccagaaagaacaggagctaggagaacagatggaatctttggtgttctcccaaggtttggaataggaagatgatcttggactggagactttgggtggcaaagaaagaacaaggccaagccaaatgggtagactaggtcatagagcatcagttcaggcagcagggaacctgcctcctttgccaatccttgtggaaattcagcaaatcctttccttataccctgggactcagtgctttaaggaggaggaggaggagcctcctcattggttttcaggtgcattttaatttgtcctctattgaaatggaaacttaagggttctttggaaggtcagttgttttggagagtgttttgctgggggcaaacacgtgaagaagtgttttcctgaagtgacactggaaaaggatgttttgctaaaacaagcatgtgaaaggatgtgtgatgaaggatccttctattagtggtatgcatgtattggtctgtcttacactgcattgttcagctccatttgtcatgactccatagtaagaaatgcaccaaaaaaactttggtggtgtgctggtggcttcttgttgcttctacagacttagggcagttggcagagtaatgtcagctgatacagactgacacagagatttgctaagacagactcatatgctgagacaagacacgtggtgaggacctgtgaaggacacatgatatttggagggagtataaataggaaccaaaaaagaatgacaaagcatagctctgcaatgcttgttagtctcacatcttcactgatcttcacacacacacacacacacacacacacacacacacacagaggacaaaaaaactctcttggggtccctgttggtcctaattcttcctgctgactcatgcttatttggctgaggcctagctgtctctgctaggtcacagcaccactgctgactcatgtttactatcctggcaataccaaactagactgcggggatatttgtgaagtgtttgctagtggatggagctgccaactgctaaatcctggaaactaaactgctaatttcctggcaatgcaggtgggatttgctccaaaaaacaatttctaaacaggtccacttccccccatatcctaatatcctttctttcccactgcctctggtgagtggtaggctagaagggaggttaaaccatttaaaatccgtcattaaaagtaagttcagaaaaaatttaagcctatactctattcaagttataaatagtccctcttgaggctcttcattttcctaactttgttgataagctctgccctgctccagccatctgaaagcctttgactggtctcctgggactcatggtcatgagtcatgacaagattgagactcacaatggcactggctgcctgggagcttactgaatggtgaagaagagagaacttcatgtcagtacaaggatcactacacaaccatattggtccatcctgctccaaacctcaactgtcttgtatctacccctgccccagaatgtcaagagcaagtccttgccttctattttcataaataaaaatgttatcatcacaaagtggcagtaagcgtacaaaatatagatttttaaatttttgtctcatggattcattacagtttcataatggctgacacttagcaggcattgggggaatttatgtgaaatacaataaaatattgaaaggattaagcactggaaaatggtgtttcatcagaagataaaagatacttctaggaatggataacaaggagcctctagtcatttagctttgcctccagatcccccactatgagttatacattagatgtggggatgagagggagcaatgcagagaccttgaagccaaaacttattcttcttctttaatttgggtcacagttgctaagattattaatcttctacatgtcaagtgaaatgtctctcaaactcagaaagttttgctagccctctttggagataggggtcacatatccatcagaagacttgggagtattttaaaaaaggaaagactactccaaacagaacagctctaaggatcagtgtcagtcctgcttcaaatagcctcagggcaagagcttctatcttgtcaatgtctgcaggagcagtggtctccttgattaattattatctcttgcttcccttgcaggctcttccctacgtctgccttctcattgccatgcttttcttcatctacgccatcattgggatgcaggtgagtggtctgatggggcagcagctgcccacattgtctctggcagagttgaggatttatgtgtgtacagtgtcacttgactaagaaacttctccaccatcttgttgcattatgatcttgggactttcacatgggccaagtggctccctaggtattcagggtggtctgctctgggggattcatctgaggtcttccaattatgctgatgacttagaagtagctaggcttctatgatagaactaaagcaaaatgacatcactgttttcagagagagagggactcgcattgcaactaaagtaaggattgtttctgacgatctctgttatttggacttgaccaaaaagaaggttagatagctgttccccctataagcgatgataccaaatgcatctatattaagttttaactgtctaagttctctaagacttgttactgcccatcctagggagccccagagccatattccaaccaattcctattgtacagggtcgtggaacttgctggataattccctggcctactcatatcctcaaaatttttagaacttgatatcagatcaagttctgtcctagatatttgtgtggctagctagaggttcactgcacctcaagaagaaatgttctttgtaagaacaagaatcaccgggggtagatggcctgcttccataaacaatgagcatgcatcccctaatctatttgatggggtccacgggccttttgattgtctaaagaaggcatcctttctggcttaaggagctgcataactaaaccccctaagaactttatctaacagtccccctgagtcaggaagtctgggtgcctcctcaatggtattggccacctggccaccaggccacctggagccactgcctcagtttccaagccttctgatcaactgtcttgcctagattctttccaaaagacctcttattcaccgttttcctctaactctatggcctgaaggtattctccaaaaccacagctaaatgtccagcatcagaatacataaggcctatggaaaggctgtggttttccttctctgaagatcttacaatccatatgtaaaatggtgtcagtagcattagaaacaattgccacagaacttaacactctcttaataactttaagaacctattaactccctccaaactttaccttagaatttacatagtatcaaaccaaaaattgaaaactggttaaattaaatttagtatgtctaagtttctgtatgataaaatagcttaactctttcatctttaagcaaaataaggtggaatgagactatcttcaagcctactgataagactcatattgatgctaataatgctgtctactccagttacttggtatgccaggtatggtgcttattgtatgcctatatgcaaacatacacatacatacagacatacaaagagaagaggcaaggcatattagtataatcaggagtaattgagcttcattgtttccactgacatttaacatggttaagtagcctttaaccttattcatattctcacataacaagttaaaaagctgatattgaaacctagctgtgcctctttacagcccagttcttagcactgcaccttctttcatcccataagaggagcaaatgcaaggacgtttttgacttgtcagtaggagatggagactgcttttccacaaagacacaaatgctttggccactgtggctttcgctggctattcccagcctagtctgtcacagagagccagaaacatgtacaaattatgcacactccagagtgtgtcactaaaaacaccatatccaatgcagtcatcacaaaacagaaaacttatgatggtttgaatgaaaatgggcccataggtccatagagagtgatactattagaaggtgttgtcttgttggatgaagtgtgttactgtagagatggtctataggcattgaggtgtcaaaagttcaaggcagttcccttcctgctgactgcaatccagatgtagaactctcagctccttctctagtaccacatctgcctcgatatggagtccataatggactaaacctctgaactgtaagttagcccaagttaaatattttcctttataagagttgccaaagttgtgatgtctcctcacagcaacagaaacccaaattaggaaaaaaagttggaatggggtattgctgtgataggcctgaccatgcttttatttggagaaatgtggcctttgtatttgaaaagcatttgaatgctttaagtggggcttaaagggccatcctagtagaacgtggaagaccgtggtattgaggatgatttgaaccatgggaacctgagttaatgggtttcaaaagagaaaaatgttagtatctggccaagagactttttgtgtgtgtgtgatattttggcaaagaatgtgactgctttgtgctctagtccaaaaaagtttgcctggtactaaaatgaagagtttttggattaatttcattggcagaggaaatctcaaaacagcctactattgactctgtcctatggttcttagtattcactcttgtggagatccatagtgaaaagggggatgctgaacaaggaaaaatataaaatgtacaatttgaggagaaaaggggcaccaggaagtggaagggagctaagccctgtgttcaaggagataaagaaaaatagattattaaatagagtacagagagtggtgacctcagggcaatacccacctccaacccctgccagctaaacttcaaaattataagaaggaattaaagaaaagtgaaaaggaattaaagaacagcttaggtccaggtgtggtagcctaggcctttaatcccggcactctggagacagaggcaagtggatctctaagctcaagcccagcctggtctacagagtgagttccaggacagccaaggttaggctacaaaggcaatcatcagaaacagagggctgaagatgtaagagccccacacaaatagaaggtacaatggataggaggagtaagcttttatgtatataaaaggcagccagatggatctataagacaaactgttatactgcacctttaaagtcctttcagaagacaacatctttgcagaacaaataaacaacttgtcccttacaggaaggggtttatatgcactcattgttagaagagatgccattggccttagctcttgtagctctccagcctgtgaactaggttaagctactgagtttctctggccttaggtcctttactatagtagaggaatgggttaaacacaagcagagccctccagtcctgcatttaattccaagtgagagtaggtggaggcctgggctttcctgcaactttcagaagtgacccttcttcctttttcatagcctttggtatgtgggcggtcacaggctaagaggatgttataaacaaaaatgtaaagagattttaagtcctaccacttccatgataaatacccatttgagacttaaaaattatcttagaaaatattcaaagtaccaatgccttccttgacaattacactaacatcatgtgcacaaaattgcagtgcactctccaacaacttcacagagtattttataaaagtcatagccggggcaattaatgatgctaccatgagagtcccagggagaaaaggccctgtgaagtgtacagatgtaatagactgggtacaacttacagacctctagctaagggagtaagaagagagtgaaggaaatttaaagttgttatggatatacaacagtcacctcatgaagtatccaggataaaagaggtttggttgcttcggtggggttttaaaaagtcatgtgtctcttgaggagccatctctttcttatctgttccttctattcttccctctgctgcctgctttgccacctccgttctccccgaagacaagtagtatttgggttttgaaaaaaaaacagcactgagaacaaattcccaaagcaggtgtcagtgggagttacttgagcaaaatagctgggggcagagattgttcctcaattgcacactctcaaaaatgttaggggaaaacgtgctccatttagcacacatcgaataaactgaagcacgctaaatgtaggctgggaatcgtctcagatggatagaagggtggccctttaagttgtcagttgtaccaatgctgccttggaaggattggttctgacctctgaagcacaggtagaggaggagggcacaccattctcattggagcatcttggaattgttgtcagtgtttatctctgtgcgtgcatacatattgctgagtgctgcccctttcctaagaatatcagtgatcagagtccaggagtacattaacaaagcactctctgtctctctgtctgtctctgtttctctctatttttctctctatttctctctctatttccctccccccttctctctgtgtgtgtacattaacaatgcactctctgtctctccgtctgtatctgtttctctctatttctctatttccctcccccccctgtgtgtttgtgtgtatgtgcatgtgccccatcccccactgtagccaggactacctgttttcttttcctttctttctctctactccttcctctttttatgttcctctctggtacaatggattaaaactagaaccccatgtatataagttagggctttgtctccagctcttcttttcgtgtgcccaaatatccttcattcatcctactacccagactttgcttttagcttacacctaagtgacctatttcagtgagatttatgtctgtctggtgatgcatgtgtgtttatttccattggctatgcattcagataacagattctggagactgcaatctctaaatgaaaatatatctaaggaacatacagctgtgtctctcagatctgatcagcttgaatattgatagcttctaccaaaaccataaatgacatccttgtcaactacagatactcccttcataattattagatatgagaaaagaggggtgactgtgtgtcctcttgttaagcaatgcctttggtagattgcataggtaccatgggactaaaatgcatctccaatttaagtgtaggggaggctatgtatatgcagaatgatttaaaagatttacaatctatggactgcttgaacattgctagcattagtcccattgctgtacatagcagtgggggaggtaatgagtttccatatcaggcctagaacatggtgtaagtcagctctctcactccgggttatctgtttcagagaccagcatcaagaagtcagcttccaaactctgacaccattgcatacaccattgcatacactagcaagattttgctaaaaggacccagatatggctgtctcttgtgagactatgccggggcctggcaaacacagaagtggatgctcacagtcagctattggatggatcacagggcccccaatgggaaagctagggaaagtactcaaggagctgaagggatctgcaatcctataggtggaacaataatatgaactaaccagtaccccggagctcttgtctctagctgcatatgaatcagaagatggcctagtcggccatcagtggaaagagaggcccattggtcgtgcaaactttataagcctcagtacaggggaacgccagggccaagaagtgggagtgggtgggtagcagagtgggtgggggagcgtgtgggggacttttgggatagcattggaaatgtaattgaaataaatacctaatttaaaaaaagaagaagaagaagaagtcattacttgtactttatctaccctgcctgtgcgtctactgaccatgtgctggacatgtgatgcaactcaattctgctcattgatttctctcatctcccccaaggtgtttggaaacataaagttagatgaggagagtcacatcaaccggcacaacaacttccggagtttctttgggtccctcatgctgcttttcaggtacctggatgaacaaagactcaaactggagacctcgtggtcttcagctgccaaggtggggagaagcccctggatggagaatcctgactaggctcttgatctcttgattctgcactgctgttcttgttaggatatgcagtggaagtttgccttaatcaaactttcccgtgatttagaaagtttcaccactatctttgactcagtagttaatctgtgtatttcaacttgtcctctgggatggacacagcttcttatgggaacaatttaagacctgaaaccttgagtagctgtgtttaggtggagtcttggggttccaccactatcagattagacccttaacagatggagacatggtgggcgaggaggaagaacaaggaaagggtctcatgggcattcttctccatgtggaaggtattaaaagggcctcactgggttaagaaaaagtcctatgtgtgaataggatagcagcccaaggtaggatgggacataaagacttctaaccaagatggatttctgtgttcaggagtgccacgggggaggcttggcaggagattatgctgtcctgtctcggtgagaagggttgtgagcctgacaccactgcaccctcagggcagaatgagagtgagcgctgtggcactgacctggcctacgtttattttgtctccttcatcttcttctgctccttcctggtgagtaagaattttcctttctttgaggcatgcctggtaaagtgaaggctcctatagtgtgtgcacacattctcccctgcctcttagctcccttgttcctgatccctcacatacacactcacactccaagctatagaagaattagatcattgcctttggggaccaaagtgctccttggaatccttgcagggagggtgactcttattggttgagatctttgtgccttcaagaagagagtccttgtgagactggataaggatttgaacataggaagagagcaccaaacttcgtgttgtctctggagctactggagtaacccctgtcttctttgtgccccgtgtagtttatttaatagctaggacttgcatctgtttgggagattctgttttatttttaactgtttatgaaaaggtaccttgaaaatataagcttatagggttcatcagaggcaaataatgatcgcatgcagtgtaattggtgtgattctctcctgactatggtgcaacggaattggacggcagctggcaagcattctggtgtgaaaacgtgattactttgggtgttagtgaatattgaggagtatatgtagaacattcccacttagggaagtggtaagagatctgaaatgccctcttagttccttcttttggagagaacatctagaaatgtcttccccacacatcagattagcagtgatggatggaataaatacataaggtgtcaccagatcaatgaaaaggtcactgtagtccttctggctcccataatgtccctgagctcaacttcactgcaaatgccactggctgtacaaaactatataacactaaaatatcgctgctgctgctgctgctgctcaaaagtaggaccattcactgaaaagtaacttaactgtttcatggccaggccatttctctgaggggacagagacatgtgacaattcagctttctggtgatagcatgggccctgaagataggccattctgcctggtacataggttaatgtagggtgtaaagggactctgggagtcccctccccccttttggttttggctttgttgtcatttagtctaggctaaggcgcttgctcttatatagtgtcttttaaatggtatagacatgtcaggaaagagctgggaaggtagctcagtggaaaatggtatttgctgtgcaaaaaagaaagctgtgtgtagcttcccacttacctataactccactgctgtgggagggttggggaaattggtgggggcatggagacaggatttctggggcttgctcaccaccaattcagctccaagttcagtgagaaaacctgtctcaagggaataaagcaaaatgtgatagtgcaaggccctcagtatcctgacgtggtctctgtgtgtggatacataccattcaagcactcacacaaacacatgtgtacttatggcatactcatgtgcatgagtatctgcacacacatatacatggtataccttatgcttgacagcagtagtattaagcacagtgaaataatgcatacattttgatatatttcttttctatgggcgtgaaactttttttttcaatgaaaaagaacacaggactgtttataaatctgaaagcacaatgtataataaaaataactgaaaggaagttaatccattcacatcttcagcccatttttatcaagtggctactaatgactggcactaagctaggcaccagagtagaactgtcagcaagacatagtctctttgtgagctccagtaagaaaccaatatacagaagaattaacacttatcaataagaataaatcaaaacagaaagggacacatagacctctccattttaccttatatagtttaaatgtttgatgataaatatttaaaagaaaccagagacaaaagtgaaaaattaattagaggctgtacggtcacttttagaattgtgagacggagagtgctacataattcacattaatgttatttttaatgaggctatattcagtgtgagatgacttgccttcatgtctcagtcctacaataagactaactttgtgacctcgggccagtcacacactgcttatttcaaatcaaccatccaacagagatttctgaggcccttggatgtgccagaccatgtgctaaaagctaagaatgcagttgtaaatcagaagcatctattttctcaaagagctgatgggaattaaaacttcctcctgaagggctgaaaggagcatgaaaaccaatagtagatgttaatgtgtgcagcacactgctaaaggatgcaagaatatgaagcattagcaatgctaatagtttttattaacattagctattaacattaatgattagtgccccgaaaggagtatgcatataaacagacaacactcataatccaggcagtggctgaataaaatctcaatgacagagggctgtgttgggttcagctatatgaaacagcagttctcaaacagcacctgaaacaggagggaccaggttttctttgccatgttagtgaagtctgaaggaagccatcgtgcttgttatgatggcctgacactggatcatttctgtaccaactgatgaatgtccttcaccctaacgtgcagaaaagacaagtcaaccttcagtcatccatttgtaaaacaggcagtggtaaaaagggaccatggctgttaggatatatccaaccttctccatgttgcaaagactataggaattatgtagactttcttgtagactttctctgtagcctatattctctgcctgcatatttgacaagcccatgaacccaaccacttaaaacaaatttttctatcaggtgggaatcttgaattttaagtgtaagaaagcctagctagatatagcataaacaaaatgggattttataagcacctgtcattggggtatcctagggcaaggcaagcaccaagataaattttaattccccttttcatccttctctattcataaatctttccctttatgtgagctccttcttcaaatacccctatctgatgtcaggcagctggagtagcaactccagaccttacatcttctcatgtccaagagtaatagagatggccatgtcttttgcccaatgcctcttcattggcttttgttgaatccccactcatattgagctagagaaaaataggattcaatgactgggtaaagcttaggtcacagtatgatgccttattgaactatagtactaggccaggccagggcctgtactaggagtaatcagtggcatgccagaagcacaacagaactgtttactggtctattcttgtctttggtactgtcattgtgaatgagtaggcccaggagcacaccattctcaccctggttctatacctaccttctataccattaccaaggttatctccaaagacaaatagctcttggcttgcctacagagtagtatgtactacagatgagcagaccctctagcccatgggctaatctgatttgctacctggttttatatggtccatgaactatgaattttacagtcttaaaggagggagagacaaacaagagatgaataatattctcatggcatgtggaaattatatgaaattcaaattccagcatccataaacaaagcttccttggaactcagccatgctcattgatatttctaatgtgtgtggctgtttggggtggtggaataccagagctgaatagctcagacagacacagaacagcccatgaaacatacaagaatgtctggctagttggctggttttggttcagaccagagcatggtaacacgatgctttggtcatttggtacttggccctggatgttttactctacttaaggacccctagaatgtccctgttcctacatatctctgttaacattcatgctgcaccctctgcgtaaggcactgtcttctgcgcttatgtgatctggtaagtatgacctgccccatcgtgcttcagttcaaaaacctagtgacttctacaaagtttttttagctactagaaattccctttatagaattttctgtctctattgtcacttgtatatgatgctctcatggctgctgtgatttgcaacctttttctgtttccaatatatcactgtcttttctaaatactagataagttttcaagagtagtcatacagcaagatctagtgaaggcctgctttgcactgtgctaggcgtgagggtctagctctagactagcactttctgacctcatatcctagcacctccagaaacagagtcgctgagtttgacacatactgggtacgtagtggagaacagacccatggacagcttcgcacagggagcatgctctttagctctgtggcactcattgtgctctctggggactctattttcataaagcaggatgaggatggaagctggcgagacaatgttgttatctggccttgactttctctagcctttaagaatgtggaaagcactgttccctctgctacaagaacaattaagtaagtcaaacaggtaatgacagcagataacgtattgtgcgaatgaaaagcagcataaaaaaaaagaataaactcatagtgcccacacaatgagatgcacggtctgagtaacaaaagtgagttgcatttagcaagctttgcctaggaactttgccttggagcctgtccatctgtttcctgagctctgccttaatttcctcctaactcttctctttctttgccctccagatgctcaacctgttcgtggctgtcatcatggacaactttgagtacctgactcgagattcctccatcctggggcctcaccacttagatgagtttgtccgtgtctgggcagaatatgacagagcagcatggtgcgtaggccttttggccactcagaaattaggggcttctagattgctcaaatacttgcctgttataaaagggaaggaaacacctcttggttatagctcacggaagaggcactggtctcaggccattcacccaaatcttctctccctgggccttctgcacccctctttctttttgtggcagactgtgcccttgtttgccaatttcattatactctagattgactacacaaccaggggagcttccaacctgctcccttttttgctatgagtcaccggggactcagataggaggtttcgggccaatgggacatatctggccaccatggttagtggcattagtgcttttcttcctcattcttttcagcatatatagttaaataaaacactggtataatatttcaaataatcaagtaggtggtcctgccaatagatgccctctagacttgtgggcttttatcacatgaaactgagttaaatggcaggagctggcagggctgacctctttgctgtctttcactgtccaatagttccgatgtgatgtgacatctagactttagagcggggatcagcaaattaccacctgtcagttaagtttggctcactgcttttacaaatgagtttttatagaggtacagttacagccatttgtcttctctattgtctatggctgtgcttgcactagagtgaaaaactgaataactgggacaaaggtggtctgaccttccagttcaaaatatttactattaaactattgccaaaaccttcactctttaaaaaaaaagtcttttgacccctgtttcaggaacaatgacagtgtttttagcccttgctgatgaggacagtatgacattctatgaatgaaaagctttgctggcccaggcaaacttagcttctgggtcttcactccccactctccccattctggtccctctctgaaaatacttgaggaaatgctcttcttcacaggagtggaccaccgttgcttccacctgatactcccttcatgatgtgtgattcttccccatatctaccatctgtgaagctgctaaacctgggttaactgttgacagggtggatgggtgaattagaattcctttctcttctgtaataatgatctaggccatggggagatgtagatcccttcctgatatagcagctaagcaacagatttttcttgctgtactcagtttccaacaaaaagttttagtatgcaaccggcgatggcttggaggacaatgatgctcagcctaaatcttagccattttctcactttggacaagtgatgtaaccatctatcaagtggtggtaatgatacctacctagcctggtgtgtgtttgtgagcatgtaactatatcatgcatactactgttaggtacttgacaacatggtatgtgaatgcaactcagaaatgaggagaattgccatctgtaaagcatttatggccttgattttggatgcctattcactcacgtaactgaagagacactatctgctaccaaaggatggcatcacacatctagcctcactcggacatccttggctcttggaaccagcacttcctttggttttatttcctctgtggctctaagtgccaaatgccttaaagatgcccccacttcattgcagttgctgggaagaggctgcaacaggactaatcatgaaacttggtcacatgaactgagaaggaaaaacagagaggaactccttctgtcatttcgaatgtctagagaattaccaattattctggttacatcttaattggttttctcaatggaataaggttgttgagaagaaaccagcaaacgtgcaatgagtcagggtcttcatataaagaagcaatgagttgaaagccactacttactactcttaagtaaaaataaactgacacatgactactttccatcattccaaggggcaagagactgggcatgccggtgagctactgtctggaaagaaacaagacaaatcagcaccgagtcaggaaaaggctagaaagagtgaagctgaagaaaacatttgctttgataacgcttcctaaaaggatgcttagatggagatagtgtgctcatcgtttctatggcaacccccggcctggtccagggtgcatactgactttcagatcccaccatggcttccttgttctggtccctgacagggaagatgttttaaccactgagaattaatcctatgccagttattccatttccacaagaagccagaagtctcttgaaggttcctggaagaaaaggttatcaaaaaagggtcacagtgttcctggaattctgcaggatcaatctagaccctgagtggctggaatggagctgcagggaaatatttctagggcatctttccagattgtttttggacacgaatcccagtaggctcctgtggaatagagcagcgtttacccaagctgaactcagtatatgtcacagagagatccaaagccctttcaaattctctcacgcaaactctgtttcttgctaattagcctagtgggaaatttgtctctcacagtctacagaaacatgctgactccccactgcccctgacaggtggcccgtagtaactgcctgtaatcagtatgggtgtgaaagcaaagagttctgtagtccacacgttggcaacctgacatctgctctggacagtggccagagacacactggctgtctttttgctcttagaagcctagctggagcttgggctcctcaggccaggagtgagccacacaggtatttctgggtaccttaggcattaggttcctttggatattagatggactcggatttcctgagaaaattgggagaatagtttggcaaggtggtaggtagttctctggttctcatcactctggtctgattatgtcaggcaccaataaactggccttacctctttgggacagtccctgtagggagaagccatcgtttcttccccattcttttctgagtatcttattaacccacctgtgctttctttccagcggcaggatcccgtataaggatatgtacaaattagtgcgggtgatctcgcctcctctgggcctgggagagaactgcccctacagggtggcttgcaaggtttgcccccccagtccccagccatgacctgcagtgggatgcagcatctaaccctctccgccctctgctccaccaccactgcgccacatgagagaaccttcatgttgcttacctttgagtttaaagaggcccaacccctcccagaaccagcagctgccgtataggaagaagggccattttatggtgaaggcaaaagagagttaaagacttaatacaaaggccactagagtcactccttttggcttttcccacaaatatactgttgtgcacctacacatacatcccccagtttaccctagcttgtacattctaccaaaggacttcccccttctctgggatgcagaaatcctctaatcaagcaaaagggttctgatttcccttcacgagaccttcattttcattgaaccacatgatttcagtgaacctagtcatccctacccctgctatccctcacagatcctgggtgctttttccaagatcagcaatagaagctgtaggacagaggggaagagggcaacaggtaaacatggtttaaaaagcatagaactattagagaatttcatagcacagagactaaaataacctcaacagacacagaaggaccttgaactgattatttaatgcctttggtgcctgccagtcacacttgtaagaggtctgccgtaattgccaagtcactacttcttggttagaccaacaggttccgagatataagttcaaactctgcattacccaggatatacagtatcctagtcgctttcccaagcccaggaccgctaaatatgaaccctgcttcaggtgctatgggaggaaagcaaagcaaagagctgctcaggcagcagaagatacaggctcaggaaggatgtctgcctaggtgatggatggagctgacttgggatggtgaccctgattctgaactcaggaggctgaacagctgcctctgctgagactctttaaactccaccccagtgaaacctgcagccgcatgtgggagagctggggagggtagcatggcatgcaagatgctcttcttcctcctggttttgtttcttctgtccccagcatgccatcaacctggtgcatgctggggaataaagagcactcttgttcacggagccaggtggaagcaacggggcgactttctgaccagcaatctcagcccatcactttcaacgcaaacggccgccgcctcctgctgcacacataccacagaggggggatacacgacgttctgcctgtgggttcagggcaggggacaggcctgacttctaggccagcatcccagccccagtaggggccagaaactcctacccacggctggagcaccgtctatccggtttataccgctcacgcacagccctgggaattgaagacatgcttgtgttactttggggttagatgcagtgaaccacaaagccagcccagcactaactgaggaggagaaagtgagccccgccctcgacccctgtcagcaccttctgactgtgtcagagggaccagaggttgtaactagtgttcccgggtctgtgtggggcgtgatataaatctgcaccaggacggagtcacttgtatgatttgccttgattaacaggtctcctgttcttttcctgtttgtccattttgtttgtttttcttctgtttcttgtattactttgttttggctctctgggaatgctgttcctctctcctacttgtctgcatcctttcccccacccccacccccttttcctgtccctgccaccccctcctgccccgcccatgtcctgcccctactcaccacccccatgagcagtggccgcatccattacactgagatgtatgaaatgctgactctcatgtcaccaccgctaggcctcggcaagagatgtccctccaaagtggcctataaggtagacaaccccttcctttgttctgggctagagaccaacaggaaatgggatccagttgtggggaggacatactctgggaggaagctgggttgggggggcgcggagatgggaagtgaggattcaggagtcaggaaggttcatgagatggagtcataaaggatacaggagtggttctcgtgctgttcaccgtggaccttttatcatgttactgtgttcctactcgtgtgtggcttcttgtgagtgggctactagaaaggtgctgctaagtggcgtgtatcctttgaaaggaggcagagtggtggccggggaatagttggattggcaagaaggaaacctatcaccaaaaaggctgagagaaaaaaaaaaatatggcttcactcataaattaggaaaataatggagcaatcgttaaggattgttctagaagaaatttttagaagggaaacttgtaataaatttcttcccctgtgacgtaggaaggagcaacagcatagcttcctgacacaaacacaaaagaagaacatgtcttcaagcattttacaactgacaggaacgtagctttccttccccagtggccttaaagagggcaacaacaggcagatttgttcagttagctttgccttcttagcatgaccaagtggtgggtagatttcttgaggtcatacaccagcattgtccactgggcgtcgtcatttggatgctcccagcttcggggccgggcattttcttcacctatcagtactagttactgttaactcccttgtgtatagactggcccagaactactcaggggctttctcattcgcctaagcacacatcatagcaaggttgccactaccacagaagtaagaatgatgggactcagatacaaacaaagaaacaacctttacactctagcacatctgtctgtagagttgctgttggcaagatgatctatttgagtaatagaggtgtggcttgtgaacaacaggttccaatcactaccaaccacaaccaccaggataaaggttctgccagaggcccttctgctgccacctccaaatagtcttgctccagagagtatcttactggaatgtagtccgtaggaaccctcatccccaagtgcatggctccttatacacagcagatgcgataatatctttctctgatagccacaagtatcacacagtggggaaagaattcctgggatgaggccctgatagaatgaactgggagaggaatgggaggagagtctcacggattcctaaagcaagatactctctgaaagtggatttggccatttcagttggatcccttcctctgggtgaggggaacagggcctgcccactctgctcctgcctgcacctccttctctgactgtcttccctgcgctcctcctcctcgtcctcctcgagcctgtttgcactctcccctgcccattctgctcctcctcaccccttcgataagttggactctctgcatgttcaatcgtgtgctggcaaattccatctttgaaagacttaaaaagggggcaccaggatacatctttcaagtgagatgaacagagccaagtctcttccccatctttccattgaccttgggggtgtttgtgggaacaagtagaaaacagagagcacctctgtagcagggagtggagccacctctcagagctgactctgttccctaagggacttcttgaactcccttcccatctctctgggagatattcctagtactccccatgggaaggggttgtaaagaatgattagctaacctcctttccttggcatttggcatcagtccctagataaaataaccacaaatgagctttagtgagaagctgggagagccggactggcatggggatggggaatccttgcccttcttttctgtctctgcatttaacctctgcactttccttccccttttatttttaaaccaaggtgtctttcaatatatttggtttttgcctgctctttctcttttctctttcacacagaggctggtcctgatgaacatgccagtggctgaggacatgacagtccacttcacctccacacttatggctctgatccggacagctctggacattaaaatcgccaaaggtcagattagtaggggaagggaagagggttgcaccctatgttatatcctgtgcagcctgctataggatggagtcatctgaactacttcccagccagccatgctcctgataaggccgtgacctggttttacctctgacttagtaatttgaagacttgtccttactttggtaaaaataaatgacttgctattccatgcctgacatgtcttagcattctagaaatatttgttgagcatagaaattttaattctgtaattttttccataaagcatcgtttctccaaagtcttgggacttaggaagcatctgtagcaggtgccaacagagtggacacccatcatgattgctattcagaggtctgggggagaaacggtctgtggcatctgtacagacctttagcctgccttctcctgcctttttaaagaatcaggtcccttaggctgtatggtcagggtcagtggaaggaatgatgtgtattgatgaagcatgagttttccttatggatgtcttcatttccctctctgatgtactgagcacccaggaggctgttagaatcagtgaggaagttgatcttggtctcagcctcagatttctggggaagaatatgcctgagtcactgaaaataggagccaaagcgtcttctgcttcctcagcaaaaatgctggtgttgccagatcctctgtcacttggtgcgagatttcctctcattatgtgaggtgccatgctgattcagctcctgcccccacccactcctcagtcttggtcgtcattattctgtgcctgttctgattgggttattaataatttatcttattctaggtggtgcagacagacagcagctagactcggagctgcaaaaagagaccctggccatttggcctcacctgtcccaaaagatgttggatctgcttgtgcccatgcccaaaggtgtggtggctcctccttccaagtgtgcttgtcaccgtggcccagcatgccaaggccacatcttttagggaaaccagcgtgatcaaggcgataagggagggttgctcctttaccattagaaacctaagtccccacttctacagtacttttattcataattaattaaaactaactttttaagacaggtcattacttttgtgaatgaaatttctctgggaacatagctctcttcctccgcagaagactgttcagtaaccccttgtgcatttgtgttgctacttagacacgagtatctgggatgacaggaggccgtgctcactgatgtctttcttactatctggtcctgtgagcactgccttttttgcatggatccattcgctttgtgtccttggagctttaataaatagatgtgtgagtgacttagagcacgaagctgctttggagagtggacacatatggccatctgtatcctccctgtttattcccatgctccacttgtgcttctagcctctgacctgactgtgggcaagatctatgcagcaatgatgatcatggactactataaacagagtaaggtaaagaaacagagacagcagctggaagaacaggtaagcaccattgaaagcacattggatgggtcatgagtagacatggatttccagagggcaggttgcatgtatccctacaatgtaccctaaaaaggtggaaggggttttggagttcaagaactttcaaatgaggtgggattagaaacctggggaactgaaaggttaaaatagtcgagcaaagaatcagtcatctttctttgtctctcatgtaagttgtggtgtttttcatagtagtcctcacaaagtcacaggaattctttgtctccactcagaaaaatgcacccatgttccagcgcatggagccctcatcactgcctcaggagatcattgctaatgccaaagccctgccttatctccagcaggaccctgtttctggcctgtgagtaaaaaccacatgaagggtctgtgggacgcctgtttgcattctgccaccatggttcaggcccgggaatcatactctgagccagttccttcctgaggctgactgtctcaaaatggcttgtcagcaggagtaagagaagaaatgagccaggcatgtgtgatgccgcaactggtatcagaggcagtagatgcagcagaaggttggtagcaaaaggtgctgactcacgttataatgcactaacaccttagctatagttctgttggggagaattagcataatctcaagggtttagttgtcttctcacaatggatctggcagcatggatgtagagattgctgagcagaagggggaaagagaagcaaccgtcactggattctttgctcctggggatgacagttgtagcaatacagtttgcttagctctcttgattctgccataccctggagatgtatatattgctatcactacttttcaaatgaacagacagggactatgactgagaggaggcagcacctaggttttcaaatcagtcatttctgattctagaggctttctactatatcttagactctggaatgaccaaaaagaccttataaatggaaagaaaaaaaaatcagaccctgaatggaagaatggtctagtgtttctaaggcttacctactggttgactgttagtcagagatggtctctcatagcatacatatcccagtatgtcattgttttccagttgtcaccgagcggggagtggaagccaagggacacatgctcctcttctcattggaaatgaagttatgtggttgggtttaagcaggtcttgcttggagaagtgggaatcactaagaaggacaattccactaatgatcagaaaagggagacccagagtttgggaatgaggcctccattggagcactactgggaggagtccataccattcatttctttcacactgtggtatgaaactttgttcttgcaaatctttttctgacttcataatctaagaaatttcaaagagaagaacatgcccagagctttctttacaaacaattttgtatgatcagagaacagtctttggctactctgggccccagaaaacaagtagaaatacattttattgctctgtggagtagagagagagaaggtatgactagagaaatggggtctcctccctgcaaggcttcacactattttttcatgagtccttgatctattagtggaagatactcctttgcccttgcatctatatctctgttttgtctagaacgtctacataagccaagccacaccatgggatcatcactctgaattttcttccatatgttaatagattcaagctgctcactgatttttaccaatatttgttgagaacaaattttgcctaagcattggctctggcactagagatactgatgatcaggtcatagtccccagggatacaaatctggagaggggaaactataagaatgatagattaaatgtgggaaggcaggacattgtgatatcatggaaaggaagctacttttctcatttgagatcttggtgttgggtgggaagggtgtatcctcaagtaagaaacatagagacccaagggcaagttcttcaggaggtaaactgaggtaaactaaggtacctatggactacaattggagtagaacatctaggaaaggtggctgctgccatgtttggagagctgcacagtgacaatcttagagggcattctaagccacgatcaagaagttaaatttattttgtcttaaaataatggggctttatgtttcagagtgacattattagatttgtgccttgtaaaattcatttatgaattcaatgtagatttactggatcagaagagaacattctagggaaaatttctagagatgatatcatgtagtagcttgctgaggttatataaattttcggtggcagtggtttgaacaagcaggctagaaatggcgagaagtcagtaagcaggatatttaatagggagaatggataggatttagaaataggtttgctatgaggagtaaggaagggaaaggaatcaagaagagccttgtgcttcaagtgagagcctttgggtggacagtgctacaggcttgagagccaggccctaatttagagagtgctttagggttacagtggtgaccacaggaggcagagctcactcaccacacatacaccaagtgaccttacaaccagagattcaggcctcaaatgggaaaactggcagagaaaggagtcatggtttccaagtacgattgtgataaattccagcaagaaaaacagtggcacgagaggggggcatgcaagagttctcacagagatcaagactattttctgaaggaaataacttttggtacaatgcctccaaagtatatggaaagagtttggtggaaagcagatgtagcctggctgttactacattcagcacacttaaaacagcatatatgtggaattctgggagcaaaggacaggaatgccaaaggaggttggtgaggtaggaacaagagcataggagaggccattttttaaagaaggttatcactctgagttgaaattatttatccttggagttgtttagcgattctcagggtcctgtcaatatataaagaatagaatttatatttataaataataaataatgctggatcttgggaagccccaaagtgtggtgccttgtgtgatgagggccttttagttttatcaaattgttgagaagaaatggaatagccttgttaacagggacctttgtctttttgtgatggagacagtgagagtaatgtaccatgagagccccacctccacagcctcctcagtcctaattatcttctgaatggcctactttcatataactttagtaatgggatttcctgcacatgaactctgaggacaccataggaggtcttcaccaccgaataaagagttaactgttctctctagaactcatggggccatgtgctgtacttgcaatgtacctcctgttccctcgattttcaggagaaggcacatatatgaatgaatgaataaaatgaatgaatgaatgaatgaatgaatgaactttagacaggtaatgtcaatatgaatgactctgtgggagttgtaaaactcttacactctcacagtcatggtgaccctccaacccccagttgattctcttctatccaaaccttctctttcaaggctaaatctagtatgattctacagacagattattttaaaataagtagcaattcttgttcactcctctaatttcctatggggtgcagacttcagcagtagactgttatgagaaaggcctccctagagagaaggctgacatttggagagatggtgtgtcatcttgtaggactatgacttttcagagagtagagcttcatagccctggcctcttccccctttccccagagtcagggagggcttgcttatattcttgcttaggccaaagaaaactgctaccatattggtagcagtgagtggcaacagaagccaatgtttcaggaagggtcatctggccttttcttctaaccaacaccatggatatgattgtataggaattgctgaaccaaactgacttggtggtgatctaccaggccaacccccatatatttcactcggcagtgtttttccctacctcatcattttctcacacatcgcaagcaatacagcaatacaggggctttgcttccctctaaagtcatctttcagttcatgaaccaacaatgacagtgaacagcacagagaaaccctttaggaaatgttcatggagctgaattggatagagttgagcttagccatggatgctggcacagtcaaaccattttaaagactatgactgcttaatatttaaacaagctgttcactgtttaaactctggcatttttctgcccaatgagggaaactcaacagaaacaggtttacaatctagcactggtcttccatatggctgagtgtgacaaatgatgtcatttgtcacagatatgctggtcgccagcagaatgatgaatgattccaaatgcaggttgaaaacaccagtttctatgttttcttacgctttcttaaacatcttctgttctaagaccagccacctgcaaatcaacagatttatagaccagccaagagtgcagggtgcgactctcgtatggaggaagtcttctatgggatgggacttgctagtggaagttgtggcatgactttttctctgtccctcattacctctgaatttgacattgcttttcaggagtggtcggagtggatacccttcaatgagtccactctcccctcaagaaatattccagttggcttgtatggacccagcggatgatggacaattccaggaacaacaatctctggtgaatgcacaagtacatgacctcagaagcatttccttggtctcctgatccctttcagcctatcttcagccccttcttacctagtttctcatgtttactgagaatgtttcctcttaaggttttaaaagtaccagagggctcttctctcctgtggggacttacatttcttcaggtcaaacccttttcatttaccaaattttgaagcaaatataaaaaaatcttgcctgtgatagtaagctttaagacagtctgatataatgagtggtatctatgcatattgtatgctgtactactgagtgttgcttatgggaatatgagaatgtccctagtatccttgagtgaagcccacctcctctaatacatagtgtttgcatctgcaacaatgactagctgcctgacagaatatatggaagacttcaccacttttgttatatgtgggctcaggcaaatttcttcccttcagttataattttacaatgtcacatacattccaaaaagcccctaacatcattttcctgaccccaagataagtttttcattagtctggatggtaaaatttctgagaaccctaaagtcaagttcagccttggagaagagagcaccagttaaaaattttggctttactagtgcaaaagcaaaaactgattgccaaactaatcaattttgcaattattcctagcttgggagttgtgagttccaagtttcctcccaggcctaattggattggatagaacaagacaaaacctagtttttgcaattgtctatacagtcagccggcattaagtgagctgagcctcattcctttaacatttattggtgacctttttcctctcagttgtctcatgaccttatatatatcccagaaccatgccaaatggatgatgatgatgatgatttgatgatgatgatgatggggtgtgtgtgtgtgtgtgtgtgtgtgtgcgcgcacgcacatttgtgtgataaagtagcttctctacagagaggagtaactcagctgggtaattctgtcttctgtgcttgctgagacagaggatcatgcatagttgtaatggaaagatggcaaggtcagatatccctggaatactgaacaacctacccaaggatgttcttggtagagtgggtagggcttctgacaataattgccctcttcccctaactgatttagcactaaaatctaggaacttggttgatatggatagcttgattctgaaaattcttctcagttctttatgccttgccaaccgagttggtaggtgtggtagagaaaaatctcaataatgtgtcttttccccactcccagggatgcttggctaccgcatcacttctgtgggtttccccaggctgagacgtagcaccagaacttttcggatatgtgttcatcttgtcagtgccggtgtctgtaatttaattcaggtgtcagccatgaaacaccctcaccactgtctactgcccatccctctgggtccctgctccatgtcctgaggcgtggccatgatttgtgtatgtgcatatggagtgtgtctcacaccgcctctgacacctgtagacttcaatgtcattgctgcatctgtttgaagttggaattgtgtgccacattatcgcacgcactacaaatgctgtggcctcctcaagtgcacatatcacagggcccgggaaggtcctcttcccagccacaccagtagccataaagttgaccagccatcccaggttcccctttctttgaacactgacctactcatgcacccatattttagggtataaatagctaagtataaaatgacatttttttttcttagaataatctccagatgtcaaagatatttctttgatctctgtgtggcttatgtaagtagctccaagatttatacaattatacaagttgtcttcatggtaactcacattcttgaactaggaaaataacacaggagtttcagaagtaacattttccttactaacctcataacactttgtgggggcacagttaatacagtaacatcagtaacacatataagactggtgaacaattggaatgttatgagtccaaatgacatgtaatcattattcttaaaatggggtaatctacatgttgacatgataatacttgggtatattaagttaaataaaaatgtgtaatagaatttttttaatgatcacatatttaatcataaaagcagtttgcattatatttatggttagtacatttctgacagatggttacccactacatttttggatggctttaattataaaactcttacctaataaactcataacatattttctcttagataattagcaactttctttcaaatcctggtttctatgaaactgataaaaaacgattcttcaaagaataaacacagtaataacacccatcagaagatatatttcacacatgtaaagtatccaatgagcataaatgtttgcttgataaggctataaaaccctgaggagttcttccaaagacagtctttacctcttcatcccattgagaggcttctgtgtgcgatttctagcatcacacatataaaattatgcatgtgtgctcatataacacacctacaactagggcctcataaatatcaggctcccttctaaaagccatttctacaatgggggctgaaccatcccctggaattgagaggcaaccagatggaaccaagtcccacaagcgtggctgtgtgtttatttccaggagccagaggttagtgaattaaaaagtgtgcagtcctctaaccatggcatctaccttcctccggacacccaggagcatgcgggatctgggagggcatcctctatgccacgtctgactatggatccccaggtaaaactcagacaccacacaccttatgcagtgacatcccaggctttattaggtgggttatgaaatacctgatattttcaggtaagccctgagctttcctctaccccttaactacacacaagacctagctcatggaccatctctgaaaaagttttctctatattgtgtttttaattaatcttgccttcaagtgtctactcaacaacatagcatctcttttcctgccctgggataagcattctcaggacccaatcaaccaagcagcaggcatttttctctctgtattttcccatccttttctcttttcccagccaccttggtacatgagttatctgtacacaccgctctatgtcaggactgtcgtatccagtgcaggccacgcctcatctctttgtctgttttcttagcttctttgtctgtcttacatcaagttttgacagagacaagaagtttttgtggatctgttctaatacctgtgacaatccaaagcaccagagtttgtggggctaggatggtgggggcatagtgatggcaggaaggtagtacttccttagtggttgggttgcaagcttgcctagggtaggaagctctaagtaagagccttatctgctaagtaagaaatgtttccctcaaaatatagccttttagataattgctgtcacctatttcaaagtgaccccccccccatttacagcaggtcctgactgagcacctgtggtagatagttctatgaggcatttacacagtgcctgcccacactgcacagtaagtagaatcatctggttttattcataaaaacaaggagacaatccaagccactctcagtgatggttagcttacataggacaccttttcctgattagcctctgcagccaaggtttctgcaagggggattcaagggaggtgacaatttccagggattatagctcaccattcccaagagtttcagtaccgcatctggatcttcagactctttcagtgattaatccagactttgtattcctctggggggggtttcctttctaggtggtaacagaccctagctctatgcgacgttcattttctacaattcgggataagcgttcaaattcctcctggttggaggagttctccatggaacgcagcagtgaaaacacttacaagtcgcggcgcagaagttaccattcctccctgaggctgtcagcacaccgcctgaattctgactctggtgagagagtcatttttagcatgtgtctgttttcctggcaactgatggacctagtctttataaggatcagtagtgactagaacatgatttagataaagtggagcatgatttagataaagaccagggtttaagaaagcgaagaaaggcctgggtagatggttcatgtgtaaagagcttgctgtgcaagtgtgaagacatgggttcaaatccctagaacttacgtaaaactggagcacaacagtacatatctgtaatctcagtgttcctctgacaagatggatcctgctattctggtttatgcagccgttgtcactaaagtggtacggtctcaaacatggcagcacaaaactaacaccaagtcctctgacctccacatacacactctggctcacctatgctaacccacctatatgcaaactgaaagacaaatgctccagccaaaatgctgctctctctgaggtatcattcggaaactgacccatgccctgtgtggtcatcacaagtgccaatgctattcaccaaggttttcagttagccttttacaaaacaacagagattccataggaatgtcatggaagccactgcatccccaaaaggcactgagctctgccagcagctcgttttacccactgtgttacctggaattgtcccatgcactgaggttcatttaaagccttcctgttttactggttttgaaaactttaaaaatcactcatctcattccgcttacttcactagaggcagaaatcaaacttgaaaaccagtgatcttccccaaattgagagccaggatgtggcgtcataaagactagaatggagatccttcaagttagatccataggttctcaccctaacattacattagatgtgctagcatttcgttcattgaaccctccaaatccccttccttgtgccatcttcttaagtcaagtgctggacacagacaatccctgagccatctggcagagatactgtttactgtatctggcataaaggaagcagagaaaacagttgccactcgttgatacctgtcttttcagtggtacctggcagactcacttgctcactaaaagtggaattttctacctttttctgtcccatttcccttttatgtcacctgttgatctgcctggagaagccagggcacttcagtcagttcaggaggccatgaaatatgagctcaatgggacaacagtgtctggtggggacttcctcttctcatcatgtcctcacaggagagataacagggacaggaagcaaactatctctgggatacttattctaatagtaagagcttcaccgtcctaagatagtcacttaccaaaggctgtacatcctctctccattccactggaggttagaattcaacactgaattctgaacaaacacaatcagttcacaatggctcaaatccctggttagggtagaatctgtggcttggagttcagggtcatcaagccagaatgggctgattaacaataaccaattgttatcacctttcacaggtcacaagtctgacactcaccgatcaggaggcagggagagaggccgatccaaagaacgaaagcacctcctctctccagatgtctcccgctgcaattctgaagagcgagggacccaggccgactgggagtccccagaacgtcgccagtccaggtcacccagtgaaggaaggtcacagacccccaatagacaggtgaatatagagaagttgagcctctagcaggtcagggaagggtggaatgctgtactagaaggggcttccattgcctcatgtcagcctctgggacctcagctcctgatgttcacaagagataaccactgaacacagagactggctgttctgtgcttgcagattcagaagtggcaggaattcacaagaaatgagatcctcccagtccccaagaaagacaatatctggaagtcagtccatgcctgtcctcagtatcctgatatacaaattcagctagacttaagaaataaagatggcctttcagcccataaggtgtgattctcagtaccaactgcaatgataattcatctctaaagccagaatttgcaagttggacaactccactttgcttacggattgtgtagccctctcaggagaaggagcacatctcacctctccatcttttcctaattcccagtctatgcctaagaaatagctgtgtagcagtgttctttgtgttgcccctcttttccagccctaacccttctcaaagttcctggagtccagatggaagacacatttggttagaaatggtgagccaagaacaagagactgttaaagcaattctgagacatagcagtagagaaatttacccaagacatagtggtttccaaattgtattgtagaacagagccagccctggagtttgctagcacagcaaatccctgaaactttgaagaatccaatgagacttgcttaaaagtcaaacccagaatttcatatcttaaaggaccccaccccagaaaattcttacaggtggctcacagatttaacacaccttgagagaccagtgctggaagccatttgccaacacctgggctcaagtatttcatggactaggcaaggaagacagataagggcagagacaatagataagggcgtgttggccatagaagccaagggcagcaaaccatcactaatagaggggcaagaaaacaggctttaggtcacctcagatacttacagtgtactctagttgggcgaccaggtgttagggattagttctagtgcttgtctaagggtccctgcccccagctggctgattggtaataagaattgctgtacagccaatggctgggcagagagatggagcaggacttttagattgtgcaggtaagggacaaaaaaaaaaaaggaggaggaggaggaggagacttgaaaaagacagaatcaccatggcagggaagcagaaagatgaaactcaaaggctcaccggcatgtaagaatctgggaacataacttgtaataaggacacatgctccactatattcatagcagccttatttataatagccagaagctggaaagaacccagatgtccctcaacagaaaatgtggtacatttacccaacggggtactactcagctattaaaaacaatgaatttatgaaattcttgggcaaatggatggatctggagtatatcatcctgagtgaggtaatccaatcataaaagaacacacatgatatgcactcactgataagtggatattagcccagaaacttagaataccagagatacaatttgcaaaacacatgaaactcaagaaggaagacgaaagtgtgggtacttcattccttcttagaatggggaacaaaatacctatggaaggagttacagaaacaaagtttggagctgagactgaaggaaggaccatccagagactgccccacctggggatccatcccataaacaactaccaaacccagacactattgcatatgccagaaagattttgctgacaggaccctcatacagctctctcttgtgagtcagtgcctggcaaacagagaagtagatgctcacagtcatctattggatggaacacagggtccccaataaagtagctagaggaagtacccaaggagctgaaggggtctgcagccctataggagaaacaacaatatgaactaaccagtaaccccagagctcgtgtctctatctgcatatgtagcagaagatagcctagttggccatcagtgagaggagaggcccttggtcttgagtagattctaggccctagtatcggggaatgctagggccaggaagtgggagtgagtgggttggggagcagggagaggaggagggtataggggattttcagagaagaaactaggaaaggggctagcatttgaaaagtaaatgaagaaaacatctaataaaaaaatcttagccgggtgtggtgttgcttgcctttaatcccagcacttgggaggcagaggcaggcagatttctgagttggaggccagcctagtctacagagtgagttccaaaacagccagagctatacagagaaaccctgtctcaaaaaaaaaaaaaaaaaaagaatctgggaaaatggccctaggggctacttcccctttgggtctgagatagcagagatgtaataatagattttaactcaggtatactggaggagagtgtttgctagtggtggagaggtttagaagtgcccaaccattgatctagtcaagacatatcaaaattaatgtctgtgtgccttacattcttgaatccaaagctcttgggcaggtgccatgtgtactcaacctgctgtaagccaaagcagtttaacaaattcaccactacaaaagggaaggaagagaaatttgctcttgcttagaactcgtttcctgaacagactgggattctaagcatcctttcagagagctgtttggcctagaaccttctgatattcctgtatgcagtttccaggtcctggctagccatctgggggttttattgtcacagtggtcaggtctaccccaaacccatagtggctaaacctgcatcattagttgaacttgatttccagagatttgttctgatctagacggcatctacttctctactcatttgatcgctgagtccctgcagggtatgagtagcagaggggactaactctcaggctactccagatctctagactcacagagctttctacagaaggggttggcaatctcaggagggcccaccatgcctaatctaatctgtcatctcccatattgcagggtaccggttccctaagtgagagctccatcccctctatttccgacaccagcaccccaagacgaagccgtcgccagctcccacctgtgccaccaaagcctcgtcccctcctctcctacagctccctgatgagacacactggcggcatctctccacctcctgatggaagtgagggtggatccccactggcctctcaagctctggagagcaacagcgcttgcctgaccgagtcttccaactccttgcacccccagcagggccagcatccttccccacagcactacatctccgagccctatctggccctccatgaagactcccacgcctcagactgtggcgaggaggagacactcacctttgaggcagccgtagccactagcttgggccggtccaataccattggctctgcgccacccctacggcacagctggcagatgcctaatgggcactatcggcggcggaggcgtggggggcctgggcctggcatgatgtgtggagctgtcagtgacctcctgagtgacacggaagaagacgataagtgctagaggctgccatcccctccgatgcatgctcttctctcacaaggagaaaaccaagaccaaattgggaagccagtgcggcccgggggggaggaagagggagaagaaagatggagaaaggacgccaatgcatcctcagcgaagaggaaggaaaagacagatggaaaaacagtcgaacccaccaatttggattatttccctttgcaacatgggcactgccatagtcctgcctctttgctggggaaaaaaaatacaagaatgtggggggtttattcccatgggagaagggacatgaaggtggcttggcttccgttgccccttcccacttttctataagctgcggcaggatctggctgacctgtgtctaagctcattgccctgggcagctgggaagactttccagcatcttaatgagggaagagttgaaatagcaggagaagaatctcctcaccagctcttgcactttggctgcccccaggggcaaccgcagcagcatctcatgcattatcttggggcttgctttcccccaaagagacacatgctaaatcaggagcactggatgctagtgggagatgggagggagggagagaagggccggagtagaagggcccaaggtgctgtggcaacagcagcaagggctggtctgggtgagaaaagccatagcccagcagcctgtaccatgaaggtgagggtcaaagaaacagaactggaggtgctggtgggtacagtcctagactctaacatttgtaactcacacagtaggtgctgtggtaggtaggctagaaaaggaggttctccagggcccacaaaggtgcctgtagctcttgtaagggtaatattaactccaatagcaagggccccaaccccagaagggttcagccacagtataggaactccatgcagttctccaccttggccctttagatactcgtcagagggaacccccaacagtaggggcgaggtagatggggagacttaaggcactctgggcagactcagttttccaacaaacataaaaggaactcagtgttggtggcagggctgtgaccacagtgggctggaggcaggcagcaggcctctgtcagacagcaagactaatgctaagccaagcccagaaaagccaggtattagcaactacatgttctctgccacttctccaaatggacagggaacacacatccaagggggtcactgcgtaatgacttctctacagatgagaaagcctggtagactgaaatgggaatgttcccaaggggcctggggatcccctgtgaggagaagtccttgagcctgaagctcatgcagcttggtttggggtttggggagtcagttgaggtacttaagataattaagtaactatacctcagttttgacctgagctgcggattttagtaaaataggctctgatgtggctcccactatctctgaatattccctgggccaggcctgggttccatccctccccagagtaaaggatgggtagaagacaaccttgggccactgagtcattcctaatcccccaaaccagaaacaccaagggaacttaggacccttcctcaagcacttccatcaataacacagttaaaagttccattctgtggaatgcatcccccctcccttaagcttctctctagtatcatcagagtgggtgaacagatacttgggagcagggtgttgggcaggactgccctctctggcctctgcacaggacgctctccatgagactggagaccaacacactgaaagttcagtggatcgagtctttatcctcttccagactaggcagagtcttttgggactcttgtgtaggagcagaatttcttagaagaaaattctcttttcatatgacatttcctttctattcttctgtcccattctttctaaccctgggctgacaccgcagcagcagcagcagttctgaaaagccaagttcatccatgtggccacattcatctgccacactctgccttctcttttgagtattgatggagctttcatgaaccatggtcagccccaaaccaaagtcatcccataacaggtgaccaacgaggccaacctaaggcctgccaaccctcagatcctccccttccacctccattgtcctctccctgtgtgctcaggggcagctaagaatacaagcatgatcctaagggacgtatgtgattgtttcataagacggatgctaggacttgtgttgtttttaaggttttctctgctcagcctcattccatgccaaagtgctgctgctataggcctctttgtgtgcacaaaattgctttccactatattggacatgcagctttccttaggggaagcctgcaacaggatggccattctgagccagcaaacctgttggatggtggtttgtgaaagtcaattgcagagatatagcactaccatccctataattggagaaatgtgggctggcagcacaatgaccagatatggaattcacctgcaaaggatagtatcagtaaatgcacactcacacacacgcacatgcacacgcgcacacacagccttgtaaagatatcaagtattatagctgtggtcaattaactgatcacatagtttattttttagcactggtgaccttataaacatttctttgttcaacttaccctgggtttcttttatcttggacaacacttacccttcattaagaccagaacatagaagaatttctattaagccacaaacacattattataataatctccagtttcctactgcctcctaataaacttgaatgccaacctccttccttgtagctgaccagagctttccctcctagctatcagagcctgtatctttctctttaaagggaagttgctttctcaaagcccatgtttctctttgcatcttccagtacatagcatgactctttgtggaaagtcttcttgcagaattctttagtcatatatctcattaccctgcaaaaatatttggtcctcatcacctcaaaacaagagagaggagaagagggggcatgacaagcagaagccaggcagggaggtggtatgactgcgcttgtgtttgggcatgccttttctcttaaggttccagacagcttttcatgtccctaccttcatatctgtaggagggtacagcagccttcaaagggataggaggttcaagccaatgtgccctgtgtgtcaggaaaaacacatgcccatgaaggaatggtaccctctagtaccaccaagctccacatgagccataatgatagggtccaaggggagggagttataccacacttctacctgaggattctaatttaactgaagttttcacttctggttccagctgttccagatgttctgaacatttctcttccttcactctgaggccacacgaagagtaccccatatcccagcctttagtcagcatctccctttcctacctacgtccatcccccaccaccacaggttctttgtgtgaactgtagtgctccttggtcttccagtcgagtctttgttttgctgcatgttagcacaccctgagatggttaaatccaagtgtatgagatgcagtaactgctcctgccatgctgttaggaaatggttccttctcatgaagccttgtctgaagcttcctgggtgagcttcacaagaccatttcaagggaactgtaaaagagtgcacacaggtctatgttcccaatagaggctcactacagagagattaggtctctttggtatagtggaacaaattttttaagtaatttcgatttatttttaaacatgaatatttttgttacatttctttctgaagcctgtaatgtctgtttttttgttttttttttttttttggatagaatttctaggtaggtagagcagggagttgggaactttgtttctcagcttggttataacaatgacaaagttgaagttctatgtaaaggaaaggtggacagtgggagggaatcagattgtctcctgatacgcagagatttttctgagatttgaaagaactttcactgcagttatccctataacagggtcatgtctgtcatgttttgaaacaatttccccaaggcttgaggctactgaggcaaagcagccattccttgggaaggattccctgtcccacccagcctggatgtgtccttccctcctggaccccagagcatcacatactccaagagaaacgggaatactttatgaagcaggtagaagaggatcagctgaccccatgtaggtgaccagtcacagcgtgatgattaacaccagacaagaacccctgaggaatctgatgcagttcagatgagttgtctttaaatatctccacatggagaatcttctcttaacaaaagctaaacaaaattaacttaggggttatgacccaactctcccatgaatgtgatcagaggcagccccatgttaagtgctgtctgtaccagtaagtagccttttgcagtgtttcctctctgaaccacccagaacaccctaggcaggtctgtcccaaacagcagcagctgataccttctccattggccaaagactgctagggtgttttgtcagctgtcacaggctacacccatagtacacagatgtactacatgaggggaaaggtatggaaaaaaataatcctatttgctttctggcagacatctatgcctttccgtgaatctttttggtgttttgggttttttccccttaattaatttcgtctgtgtcgtgtgtatcccagagaagtcacatgacaccaaaacaacaaattcacaaattggtccaacctaccccaagggtctagaaagcatctctgaatagagttcaagttagctcatttaatgggggctcccagcaaaatctaatatgattcctggtaaggtctgggcccttgcttctatttttaataggtttcttactgcccacacatttctatcatgctatgtactggaaggttagtgtcctaaccttctagatgcaaaaagagactttataataagccatgctactactatgtaaatacattcttgggtttcaagttcttgtttatctagttttggaagagctggagagacaatatagaagtattgagattaatgtttatttatatcagtttggtagtttttgtttgattgattatccaagtattttggaacaggcccaatctaggacagccaagaaggataaatctgtgttctacagtattctgaatttgcttcttttctaagactaatttctgtcaaattagtgctatgataattgagtcaaaaacctgaagttattgtctcctcccatctctgtatccaccccacccttctgtcttgttaagtggccttggacccttgtctccccatattctgcctctcctctttcaaaggtctgaaaatataacttagacttatgaaaaaaaactgctttgcccagcaaatcagtcaaagtcaaggaaattataagatacagaattatttcagaacaaaccttaaccaatacataatacagaatgtattctgcagtaagaagccaagtttaaacaatatagcaatgtgacaaatgaacatcataggaagctatagtgagtactatccaggcttcacaactcatctgtgccttcagtatggatattgcatgtatttcctttccctagttagggaaattgaaattctgatgcttgactagtacatgtgtgtgccgagggctctgagttaataattataaagcacgtgcctccacaagtcaagttggaaaaaccttcactcactatatcaaggacttgggaacttcttagcatttcttctaagcattgaatttttttaaggaaacctccatcttaatgggactgaggctaagtttgctttactcctgctttctacatcttatattttcttctcacattagcactctttttcttttcttaatccacgctgttttcattaatcagaaaagatgaattcctccaacaaacttcctactaccatcttctctttgtggacacttaagtcagagagtgagtaaccagaaactaacacagaagacaattacctagcctgggttagaaatgtgagtaaattttattttaattttttttcctacaagttttctcgagataaaaataggttggtctctatattctgaaaggacatgtttgaactcgaattgcatggttgcaccacttcctctttggttctcagagatgatgtcccctaaactaaataggaagccatcatcctcatctgccgtatctggcttggacctgatttgacgactcagctgttttctttgcgtcattcttatttcttataggtgatagtctatattgcccaagagctgatgctttaaagcaagtctatcaaggatatttatgagatgaacaaggaaaacatttaaatgtgtcaagtgccattaatcaatttttaaaataacggtaatatgaaatgagggctaaatagtgtaatctaactgccaattaaagtacacagtagttctggtcttagttacctttgatatgaagttataggccattaagcagatccccgtgggtttagtaaaaacataggcgtagcgttttaatggctacaataggggcgtacatttagaccgcaggttgaactttaatcagtgtttttctatcctggtgttttgtgaacaatccaaaatttctacaaagctaccctaagtgctgcaattgcagaggaacttccctcttggtggcattagaatgctcaggctgagtccaagatttagaattcacccagaaaaccaccaatggagaaacacttaatgcactaagtatgtttgacattctgtactggggacaagtgagtatagagaaagagagagacactattgaacaaagacaaagttgacatggaagatataaaaagtccccgaagagaacaagcttaaagatgtttgactttggattctacttcttgcttagatttggggtaaatgctttaatatgatattggattcagaggggttgctttggtaaactgacttgaatcccccccaaaattagtggattaatgaacatccttttcagacctgacagatggaggaggcaaaaagcagcccaaagaatctatgacttcagaaactcatatagtaagccaatactgcagagggcacagtacccttcttagcagcctttgtgccataggagggggaaagagcccatgtaggggacaggaggtgttttgtcaggaataaatttcaaatggtaaggtgcactggtactaacctcaaaggccaacattgtgggaaagtgatgacaggtatctaggtcatcccttccatcctttgggacccaaggagaggccttgatttgatcttagaaaatgaacatgggatgggatcaagagggaaattgagtgctctgcctaaggttgtcaaaaatgctgccacccacattatcaaacatgtgagtcaagcccatgagacgcccccttaagggcagcatccactggggtgtatcagcctgacactcctgcagtagtcataggtgattgaatggcagccaatgctggcccacccagagtattggtgcatctcgcctaacactggagttcaacagtgcatgttggtcaggtggatatcctgtaacataaatgctcgtttggatccaaaaggaaaaccattaaaaataaaaggaagatgaacaactttattgctgggggggtgggtcaaggaaaagtaaaataaaaccttgttgtaaagaatcaattggcctggttccccttgcttctcttgtctttgtctctgctgatgaagtagttacgggctttggtaggtggatcagcagcaggttcagtaatcaagacaagtcagggtcagtttagcccagttgtgaatacttctagatattctcaaagttcccaggacatgatggtctttaaaggttttcttcctattaaaaatgacccttttcatggaagaaaagaaatgaattgccctaaaactgatttctcaaaaaaattaaaaattaaaaaacaaaacaaaaacgagtttctagccaagggaatcagtctatcaggaaaagagattagcagcagacagtcactatacggagccatagaccttgtaattaaaaaactctaaggagcctccattctgaaggagggagatgactaaagaactcctcctgccgtgctgccagccttgggaggaagctgactcctcctcaaggctctgaggagatgctctctctcatctctcagcctacctggctttttactcaggtgtagtagttttctgactgaatggaggaaaagccatgccttgtatccatgggcccttttgactctccattctaggcaaagccatctgtgtcatcccctggggtaccaactttttctccaattctaaatatattatttaagttgcaatacttctaaattttggttagatagaaatcagcatttcaggatatatttctgtatcttggttaaagatcttcttttaagaattaagatactagatttcattaggtaagacttttttttgcttagggttgaacctttcaaaaatgtggtatgcagccatccatctcaagttctgaaggctgggtggaaagtttatacatccataaacaacttcttaggtttttttctaaatcatattgttctagtgattcaatcatggtttgaattggaaacaaatttgtcaactgctacatcaaagtggtatggcatggcacaatattttcttcaacaaaagtagatttatgaagttacctggattggttttttttttattttttcaggattattctaatctaaaactccagtccatatcctttcacaggctaataatactatgaaatacatacaaagaaaaaaacagatgctattctaaatttgtctctagcttctacaccataatctgagtttctaaggggttacatttacatgctatgccctaactccatacactgcttctggaatatcatatcctgacttgactcacataccatgttcttttgctatagacctagggtaattcccaaaccaaagtcccttaagtatttaagcatctaaatgtagtgtggcacacctctggtcccaatacttaggaggttgaagcaggaagacacagaatttttggccagtctgggctactctgtgagatcctaactttaaaaacaaagcaactcaagcaaaacacaatcgcaaaatattgagacaagttacagatgaatatggctttagaacacctaaaacaaaaaggccaccaacagattgggaaaggatctttaccaatcctaaatcagatacgggactaatatctaatatgtataaagcactcaagaggatggactccagaaaagcaaataaccctatttaaaatggggtacagagctaaacaaagaattcttaactgaggaataccaaatggctgaggagcacttggaaaaatgtccaacatccttaatcatcagggaaatgcaaatcagaacaaccctgagattccacctcacaccagtcagaatggctaagatcaaaaattcaggtgacagcagatgctggtgaggatgtggagaaagaggaacattcctccattgttggtgggattgcaagctggtacaaccactctggaagtcagtctggtggttcctcacaaaattggacatagtactacctgaagatccagcaattcctctcctgggcatatacccagaagatgtttcaactggtaataaggacacatgttccactatgttcatagcagccttatttataatagccagaagctggaaagaacccagatgtctctcagcagaggaatggatacagaaaatgtggtacatttacacaatggagtactactcagctattaaaatcaatgaatttatgaaattcttaggcaaatggatggatctggagtatatcatcctgagtgaggtaacacattcacaaaagaacacacatgatatgcactcactgataagtggatattacccagaaacttagaatatccaagatacattttgcagaacacatgaagttcaaaaagaaggaagaccaaagtgtggatagtttgctccttcttagaatggggaacaaaatgcccatggaaggagttacagagacaaagttaggagctgagacgggaggaccatctagagactgcctggggatccatcccatatacaaccaccaaactcagacactattgcatatgccagaaagattttgctgacaagactctgacatagctctctcttgtgaggctatgccagtgcctggcaaatacagaagtagatgctcacagtcatctattggatagaacacagggtccccaatgaaggagccagagaaagtacccaaagagctaaaggggtctacaaccccataggaacaacgatatgaactaaccagtacccccccccagagctgtgtctctagttgcatatgtagcagaggatggcctagtcagccatcaatgggaggagaggctgtttgtcttgcgaaaatcatattgcccagtacaggggaatgccagggtcaggaagcgggagtgggtgggttggggagcagggcaggggggagggtatatgggactttggggatagcatttgaaatgtaactaaagaaaatacctaatttttaaaaagaaaaaataataaaagaaaatggtaaaataaaaaaaaatagaacaccttaaacataagaagcaacaacggaagaggaagaggaaagaatacagaagaaatgaagagtgatgtgtacaggtacctagagagtccacagagggtaaactgttcatttactctgtgtccttgattaggtctgcatgcttaaaggaaaatgataactaattacctcaaagatctgctgttcagagaaagttattacatatcaagagatcggccagatacttccattgtactgataacccttcccttcctcatcaccacacagaggtgtattcctcaaacccaccacccctctgagctgaacctctcaggacctcattctagtcagtagagggtgttgggtgggtgggtatttcctgtcagttaataaaacaaatgcaaaggacaatttgaacttctatggaaaagtgaataaaagagctttaaaaaaagcaagcaaatcataattatataactgtttttaaatactccctccatttttgtcttagaaagaggccctcatttgcttattctccacttctaatttccatattcatttaataacaaaatgggagaaacattagtgggagatagtaattgtaaaagtagcaataaagttaatggcaacattaaaaacactgtacatataaacagcaatattcaaggcaatttaaaatgtcaagcaatacacaacttaacagcatgtgagaataaactatcaattcagggtcaatagactgacttttctttttttattgcataaaaaaaaacaagaaagaaaaagagaggagtacacagttatatacctacagtcctagcaccagggatgctggggcaggaatatcacaagtttgaagctagcctgggctatggaatttgaggccaatataggatacatagcaagcaagatcccatcttagtcttccattccccctacatgttatctgtactcctggccccccaaaaagaatatgaagtaaatgaatcctttaaaacaatcatccttaggtgggccattaaaaaattactaaaagccagcaatttaggaaataaattgatactcaatctttataggtgattgccaaaaagtcaggataccacaagtaaaacaatgtaagcccatctagaggaggagtccaatgcctccggacattggttcttgccctctgaatattcgacatttaaaaccatctctgtggataaaattaacatagctatagtacattatagcacataggaaccataaaccccagaatacttaagcaagaaagaggctagatatcaactatggcctggactatttccccttgcctaaaagaaattagattagaacaactgttaatttttctagcaaacaatgacatcacttcttgaggtggtcttagagaccccaatacaaccattcaaaagagaaatgcctgagaagggccttttgctcatgtgtccaggtgatccctttttgtagttttatcaaagttgtgcatcactgcccttgaagaagggaactcaaagtctcagctcattcatatctttcagcctcacacaccgatgcccgctcacaagccctgcatcagacccaggaaaaaaaaaataaatgaaagccagccattcaatagacccattcacatcagaagaactcagtacatgagttgtggtctaatagaaagaaagaaaaaaaaaacagcttgatttcttgacatagtggaaacacaggtttgcttgttctgcccgaaagcagatgccttgatgctaatgagaaaccagtgtagatagctggaatggggtggggaagtgaaaagggcatcatatcaatttggctagcaaggatgctgatgtatggttgtaggtaaacctctgctacacg

SEQ ID NO: 80 - DNA, 9704 bp, Mus musculus
tccttcttcctctctacccctcaccccgaccaataaatcagcaaactgttacctagcggaccagtgcctgcctttctctcagccaggtgtgccagaagaggagctatgtttgaggaccgaccttctccacccctctccggtccctgaacaccaccccacgctggcattttgggggaaaatattccctctagaagccctacccccttcttcttcttcttcttctttttttttcttgaggaatggagcttcgcagaggttgcctttagattcaacagttcagagcagggctgaagagcctgcaggggtccccagaggcggtggtccctgcgcctgtgtggataaggctctgagcctgcctgtgtcttttctgcctcttgttgtgtgcgggtgttcggcgatcacctttgtgtgtcttctgtctgtttaaacttcaggatggctcgcttcggggaggcggtggtcgttggcaggccaggctcaggcgatggagactcggaccagagcaggaaccgacaaggaacccccgtcccggcctcggggccggcggccgcctacaagcagtcaaaagcgcagagggcgcggactatggctttgtacaaccccataccagtccggcagaactgtttcacggtcaacagatccctgttcatcttcggagaagataacattgtcaggaaatacgccaagaagctcatcgattggccgccatttgagtacatgatcctggccaccatcattgccaactgcatcgtcttggccctggagcagcatcttcctgaggatgacaagaccccaatgtctcgaagactggagaagacagaaccatatttcattgggatcttctgctttgaagctgggatcaaaattgtggctctagggttcatcttccataagggttcatacctccgtaatggctggaatgtcatggacttcatcgtggtccttagtggcatcctggccactgcgggaacccacttcaacacccacgtggacctgcggaccctccgggctgtgcgtgtcctgaggcctttaaagctggtatcaggaatacctagcctgcagatcgtgctgaagtctatcatgaaggccatggtgcctcttctgcagattggccttctgctcttctttgccatcctcatgtttgctatcattggcttggagttctacagtggcaagttgcatcgagcatgcttcatgaacaattcaggtattctagaggggtttgatcctcctcacccgtgtggtgtgcaaggctgcccggctggttatgaatgtaaggactggatcggccccaatgacgggatcacccagtttgacaacatcctttttgccgtgctgactgtcttccaatgcatcactatggaagggtggaccactgtgctgtacaataccaatgatgccttaggagccacctggaactggctgtacttcatccctctcatcatcatcggatccttctttgttctcaacctcgtcctgggagtgctttccggggaatttgccaaagaaagagagagagtggagaaccgaagagcgttcatgaagctccggcgccagcaacagattgagcgagaattgaacggctaccgtgcctggatagacaaagcagaggaagtcatgcttgctgaagaaaataaaaactcgggaacatcagccttggaagtgcttcgaagggcaaccatcaaaaggagccggacggaggccatgacccgagactccagcgatgagcactgcgttgatatctcttcagtgggcacacctcttgccagagccagtatcaagagcacaaaagtagatggggcctcctatttccggcacaaggaacggcttctgcgcatctctatccgccacatggtcaagtcccaagtcttttactggatcgtcctgagtgttgtggctcttaatactgcctgtgtggccattgttcatcacaaccagccacagtggctcactcacctcctctactatgcagagtttttgtttctgggactcttcctgttggagatgtccctgaagatgtatggcatggggccacgcctctattttcactcatccttcaactgctttgattttggggtcacagtgggcagcatctttgaggttgtctgggcaatcttcagacctggcacatcttttggaatcagtgtcttacgagctctccggctcctaaggatatttaaaataaccaagtattgggcatccctccggaatctggttgtctccttgatgagctccatgaagtctatcatcagcttactcttccttctcttcctcttcatcgttgtctttgctctcctgggaatgcagctctttggaggcaggtttaactttaatgatgggactccttcagctaattttgacaccttccctgcagctatcatgacagtgttccagatcctgacaggggaagactggaatgaggtgatgtacaatggcattcgctcccagggtggggtcagctcaggcatgtggtctgccatctacttcattgtgctcaccttgtttggaaactacacgctgctaaatgtattcttggccatcgctgtggacaatctggccaatgcccaggaactgaccaaggatgagcaggaggaagaagaagccttcaaccagaaacatgcactgcagaaggccaaggaggtcagcccgatgtctgctcccaacatgccttccattgaaagagacagaaggagaagacaccacatgtcgatgtgggagccacgcagcagccacctgagggagcggaggcgccggcaccacatgtctgtgtgggaacaacgcaccagccagctgaggaggcacatgcaaatgtctagccaagaagccctcaacaaagaggaggccccgccaatgaaccccctcaatccactcaacccactgagtcctctcaaccccctcaatgctcaccccagcctttatcggaggcccaggcccattgagggcctagccctaggtctgggtcttgaaaagtgtgaagaagaacgcatcagtcgtgggggctccctcaagggggacatagggggcctgactagcgccctggacaaccagaggagccccttgtccttgggcaaacgggagccaccgtggctgcctagatcctgtcatggaaactgtgacccaatccagcaggaggctgggggaggagagactgtggtgacttttgaggaccgggccaggcacaggcagagtcagaggcgaagccggcatcgccgagtcaggactgagggcaaggactctgcctctgcatcccgaagcaggtctgccagccaggagcggagtctggatgaaggggtgtccgttgagggggagaaggaacatgagcctcacagcagccacaggagcaaagagccgaccatccacgaagaggagagaacccaggacttaaggaggaccaacagtctgatggtccccaggggctctggactggtaggggctcttgatgaagcagaaacacctctagtccagccccaacctgagctggaagtggggaaggatgcagctctgacagagcaggaggctgaaggcagcagtgaacaagcccttcttggggacgtacagctggatgtgggccggggcattagccagagtgaaccggatctctcctgcatgacagccaacatggacaaggctaccacggagagcaccagtgtcacggtcgccatccctgatgtggaccccttggtggactcgacagtggtgaacattagcaacaagacggatggagaagccagtcccttgaaggaggcagagactaaagaggaagaagaagaggtagagaagaagaagaagcagaagaaggagaagcgagagactggaaaagccatggtgccccatagctctatgttcatcttcagcaccactaacccgatccgcagggcctgccactacattgtgaacctacgctactttgaaatgtgcattctcttggtgattgcggccagcagcattgccctggcagccgaggaccctgtactaactaactcggagcgtaacaaagtcctgagatatttcgactatgttttcacaggagtgtttacctttgagatggttataaagatgatagaccaaggcttgatcctgcaggatggatcatacttccgagacctctggaacatcctggactttgtagtagtggttggtgcattggtagcatttgctctggcgtaatcctctctctgcagaaccaacaaggggagggatatcaagactatcaagtctctgagggtacttcgagttctgcggccactgaaaaccatcaagcgcttgcccaagctgaaggctgtgtttgactgcgtggtgacctccttgaagaatgtcttcaacatactcattgtctacaagctcttcatgttcatctttgccgtcatcgctgttcagctattcaaaggaaagttcttttattgcactgacagttccaaggacacagagaaggagtgcataggcaactatgtagaccacgagaaaaacaagatggaggtgaagggccgggaatggaagcgtcatgaattccactatgacaacatcatctgggccctgcttaccctcttcacagtctctacaggggaaggatggcctcaggttctgcagcactctgtagatgtgacagaggaggacagaggcccaagtcgcagcaaccgcatggagatgtccatcttttatgtggtctactttgtggtcttccctttcttctttgtcaatatcttcgtggctctcattatcatcaccttccaggagcaaggggacaagatgatggaggagtgtagcctggagaagaatgagcgggcatgcatcgacttcgccattagtgccaaacctctcacccgctacatgccacagaacaggcacaccttccagtaccgtgtgtggcactttgtagtctccccatcctttgagtataccatcatggccatgattgccttgaacactgtcgtgctgatgatgaagtactactctgctccttgcacctatgagctcgccttaaagtacctgaacatcgccttcactatggtgttttccctggagtgtgtcctaaaggtcattgctttcggcttcctgaactatttccgagatacctggaacatctttgacttcatcacggtgatcggcagtatcacagaaattatcctgacagatagcaagctggtgaacaccagtggcttcaatatgagctttctgaagctcttccgagctgcacggctcataaagcttctgagacagggctacaccatccgcatcttactgtggaccttcgtgcagtcctttaaggctcttccctacgtctgccttctcattgccatgcttttcttcatctacgccatcattgggatgcaggtgtttggaaacataaagttagatgaggagagtcacatcaaccggcacaacaacttccggagtttctttgggtccctcatgctgcttttcaggagtgccacgggggaggcttggcaggagattatgctgtcctgtctcggtgagaagggttgtgagcctgacaccactgcaccctcagggcagaatgagagtgagcgctgtggcactgacctggcctacgtttattttgtctccttcatcttcttctgctccttcctgatgctcaacctgttcgtggctgtcatcatggacaactttgagtacctgactcgagattcctccatcctggggcctcaccacttagatgagtttgtccgtgtctgggcagaatatgacagagcagcatgtggccgcatccattacactgagatgtatgaaatgctgactctcatgtcaccaccgctaggcctcggcaagagatgtccctccaaagtggcctataagaggctggtcctgatgaacatgccagtggctgaggacatgacagtccacttcacctccacacttatggctctgatccggacagctctggacattaaaatcgccaaaggtggtgcagacagacagcagctagactcggagctgcaaaaagagaccctggccatttggcctcacctgtcccaaaagatgttggatctgcttgtgcccatgcccaaagcctctgacctgactgtgggcaagatctatgcagcaatgatgatcatggactactataaacagagtaaggtaaagaaacagagacagcagctggaagaacagaaaaatgcacccatgttccagcgcatggagccctcatcactgcctcaggagatcattgctaatgccaaagccctgccttatctccagcaggaccctgtttctggcctgagtggtcggagtggatacccttcaatgagtccactctcccctcaagaaatattccagttggcttgtatggacccagcggatgatggacaattccaggaacaacaatctctggtggtaacagaccctagctctatgcgacgttcattttctacaattcgggataagcgttcaaattcctcctggttggaggagttctccatggaacgcagcagtgaaaacacttacaagtcgcggcgcagaagttaccattcctccctgaggctgtcagcacaccgcctgaattctgactctggtcacaagtctgacactcaccgatcaggaggcagggagagaggccgatccaaagaacgaaagcacctcctctctccagatgtctcccgctgcaattctgaagagcgagggacccaggccgactgggagtccccagaacgtcgccagtccaggtcacccagtgaaggaaggtcacagacccccaatagacagggtaccggttccctaagtgagagctccatcccctctatttccgacaccagcaccccaagacgaagccgtcgccagctcccacctgtgccaccaaagcctcgtcccctcctctcctacagctccctgatgagacacactggcggcatctctccacctcctgatggaagtgagggtggatccccactggcctctcaagctctggagagcaacagcgcttgcctgaccgagtcttccaactccttgcacccccagcagggccagcatccttccccacagcactacatctccgagccctatctggccctccatgaagactcccacgcctcagactgtggcgaggaggagacactcacctttgaggcagccgtagccactagcttgggccggtccaataccattggctctgcgccacccctacggcacagctggcagatgcctaatgggcactatcggcggcggaggcgtggggggcctgggcctggcatgatgtgtggagctgtcagtgacctcctgagtgacacggaagaagacgataagtgctagaggctgccatcccctccgatgcatgctcttctctcacaaggagaaaaccaagaccaaattgggaagccagtgcggcccgggggggaggaagagggagaagaaagatggagaaaggacgccaatgcatcctcagcgaagaggaaggaaaagacagatggaaaaacagtcgaacccaccaatttggattatttccctttgcaacatgggcactgccatagtcctgcctctttgctggggaaaaaaaatacaagaatgtggggggtttattcccatgggagaagggacatgaaggtggcttggcttccgttgccccttcccacttttctataagctgcggcaggatctggctgacctgtgtctaagctcattgccctgggcagctgggaagactttccagcatcttaatgagggaagagttgaaatagcaggagaagaatctcctcaccagctcttgcactttggctgcccccaggggcaaccgcagcagcatctcatgcattatcttggggcttgctttcccccaaagagacacatgctaaatcaggagcactggatgctagtgggagatgggagggagggagagaagggccggagtagaagggcccaaggtgctgtggcaacagcagcaagggctggtctgggtgagaaaagccatagcccagcagcctgtaccatgaaggtgagggtcaaagaaacagaactggaggtgctggtgggtacagtcctagactctaacatttgtaactcacacagtaggtgctgtggtaggtaggctagaaaaggaggttctccagggcccacaaaggtgcctgtagctcttgtaagggtaatattaactccaatagcaagggccccaaccccagaagggttcagccacagtataggaactccatgcagttctccaccttggccctttagatactcgtcagagggaacccccaacagtaggggcgaggtagatggggagacttaaggcactctgggcagactcagttttccaacaaacataaaaggaactcagtgttggtggcagggctgtgaccacagtgggctggaggcaggcagcaggcctctgtcagacagcaagactaatgctaagccaagcccagaaaagccaggtattagcaactacatgttctctgccacttctccaaatggacagggaacacacatccaagggggtcactgcgtaatgacttctctacagatgagaaagcctggtagactgaaatgggaatgttcccaaggggcctggggatcccctgtgaggagaagtccttgagcctgaagctcatgcagcttggtttggggtttggggagtcagttgaggtacttaagataattaagtaactatacctcagttttgacctgagctgcggattttagtaaaataggctctgatgtggctcccactatctctgaatattccctgggccaggcctgggttccatccctccccagagtaaaggatgggtagaagacaaccttgggccactgagtcattcctaatcccccaaaccagaaacaccaagggaacttaggacccttcctcaagcacttccatcaataacacagttaaaagttccattctgtggaatgcatcccccctcccttaagcttctctctagtatcatcagagtgggtgaacagatacttgggagcagggtgttgggcaggactgccctctctggcctctgcacaggacgctctccatgagactggagaccaacacactgaaagttcagtggatcgagtctttatcctcttccagactaggcagagtcttttgggactcttgtgtaggagcagaatttcttagaagaaaattctcttttcatatgacatttcctttctattcttctgtcccattctttctaaccctgggctgacaccgcagcagcagcagcagttctgaaaagccaagttcatccatgtggccacattcatctgccacactctgccttctcttttgagtattgatggagctttcatgaaccatggtcagccccaaaccaaagtcatcccataacaggtgaccaacgaggccaacctaaggcctgccaaccctcagatcctccccttccacctccattgtcctctccctgtgtgctcaggggcagctaagaatacaagcatgatcctaagggacgtatgtgattgtttcataagacggatgctaggacttgtgttgtttttaaggttttctctgctcagcctcattccatgccaaagtgctgctgctataggcctctttgtgtgcacaaaattgctttccactatattggacatgcagctttccttaggggaagcctgcaacaggatggccattctgagccagcaaacctgttggatggtggtttgtgaaagtcaattgcagagatatagcactaccatccctataattggagaaatgtgggctggcagcacaatgaccagatatg

SEQ ID NO: 81 - protein, 1274 aa, Mus musculus
GSEPACVFSASCCVRVFGDHLCVSSVCLNFRMARFGEAVVVGRPGSGDGDSDQSRNRQGTPVPASGPAAAYKQSKAQRARTMALYNPIPVRQNCFTVNRSLFIFGEDNIVRKYAKKLIDWPPFEYMILATIIANCIVLALEQHLPEDDKTPMSRRLEKTEPYFIGIFCFEAGIKIVALGFIFHKGSYLRNGWNVMDFIVVLSGILATAGTHFNTHVDLRTLRAVRVLRPLKLVSGIPSLQIVLKSIMKAMVPLLQIGLLLFFAILMFAIIGLEFYSGKLHRACFMNNSGILEGFDPPHPCGVQGCPAGYECKDWIGPNDGITQFDNILFAVLTVFQCITMEGWTTVLYNTNDALGATWNWLYFIPLIIIGSFFVLNLVLGVLSGEFAKERERVENRRAFMKLRRQQQIERELNGYRAWIDKAEEVMLAEENKNSGTSALEVLRRATIKRSRTEAMTRDSSDEHCVDISSVGTPLARASIKSTKVDGASYFRHKERLLRISIRHMVKSQVFYWIVLSVVALNTACVAIVHHNQPQWLTHLLYYAEFLFLGLFLLEMSLKMYGMGPRLYFHSSFNCFDFGVTVGSIFEVVWAIFRPGTSFGISVLRALRLLRIFKITKYWASLRNLVVSLMSSMKSIISLLFLLFLFIVVFALLGMQLFGGRFNFNDGTPSANFDTFPAAIMTVFQILTGEDWNEVMYNGIRSQGGVSSGMWSAIYFIVLTLFGNYTLLNVFLAIAVDNLANAQELTKDEQEEEEAFNQKHALQKAKEVSPMSAPNMPSIERDRRRRHHMSMWEPRSSHLRERRRRHHMSVWEQRTSQLRRHMQMSSQEALNKEEAPPMNPLNPLNPLSPLNPLNAHPSLYRRPRPIEGLALGLGLEKCEEERISRGGSLKGDIGGLTSALDNQRSPLSLGKREPPWLPRSCHGNCDPIQQEAGGGETVVTFEDRARHRQSQRRSRHRRVRTEGKDSASASRSRSASQERSLDEGVSVEGEKEHEPHSSHRSKEPTIHEEERTQDLRRTNSLMVPRGSGLVGALDEAETPLVQPQPELEVGKDAALTEQEAEGSSEQALLGDVQLDVGRGISQSEPDLSCMTANMDKATTESTSVTVAIPDVDPLVDSTVVNISNKTDGEASPLKEAETKEEEEEVEKKKKQKKEKRETGKAMVPHSSMFIFSTTNPIRRACHYIVNLRYFEMCILLVIAASSIALAAEDPVLTNSERNKVLRYFDYVFTGVFTFEMVIKMIDQGLILQDGSYFRDLWNILDFVVVVGALVAFALA

SEQ ID NO: 82 - DNA, 405660 bp, Homo sapiens
  misc_feature (1)...(405660): n = A,T,C or G
tttaagtctcagtttcctcatttgtaaaattgagttcacagtaatagttatttcataagatttttttcgagaattaagtaaaaatttaaaggatttgttgcataaaagccccttatagtatctagtataaaattaagaacccaataaatattaaccattatttttattgatgatggtggtggaggtggtgtctagtatgacccctcatcctcattctaccctactgaattgcagaaaggccttttacatataacccaattgcactgttcacttccccacctcaaacttactgcttgcccaattgaacttaactttattcagtttagattgggtcatttttccattattctgaggattgttagaatactgaccaagaattttatgcaaaagtgaagtctcagtgtccatttatagaggatgaactacaaccaaaaaacatagagagggataagaagactccctcctgctgtgatcagaacaattaaatggctttgtagaatgtggagtatttaaaatcttataattttgcaggtgaatatgggaactccctcaactaatgtgctttggggtgtaagtaacagaaaacctgactcaaatgggctttggccagtaggagctgtattggctcatattgctggtggtctaaggtggggtggcttccgggttgattgaatctggggctccctctccatttcctgtgattttcttggccctgctctcctccatgtggcaggcttatcctcagctggcagtgatgtggtggcagcggtttcacagtttgcatctgtgcagcacactgtccagaggcagagaggggccacttctttttctagccttcccttaaaagctgggagattttccctccaaaaccctagtaaatgttaccttatacttcattggctttaaatgagtcacatgccttttccttaactaatcactggcaaagggatgtggttaccttgactggattagtctaattagaacctgctatggagctggagcccatcccccaaactgtacggacggtgcacaaggttgggggatggaacgatcttgaggaggtaaacataatgcctactacagttttcctttttagatcattggagagatgtgggcactttcaattggattgtaattgttggtctaatcttacaagtgccttgtgtcttattgcagaacgtcagggaacacctgtctgagttgtgcacctggaattgccaacatcgtgctcagtatgcatttattgagctaaaaatccttcaggccacattatctctagaaatgtgaattttgttctcaatgaattctttggcttaaaaagcaggttaattataacataattgttggtaatcatgtcgtaaaatatgtagtaaatgaccagaaagaaaaagcataaaacagaagtcagagggcacagagaagagagtggaatgaagaaaagatcctaaaagctttcagagatcagacacgctttggaggcacaggtatgcccttcttccatttccatcagctcctgagtatccagatcctaacccaagatcttcccactcattgtcaagcttctttgaacttcccacgtgtttgatcacagctgaggtgtgcaaaaaggctgggttctgagataggtcagatggaatctgaccagaaggggccaggcctggcagccagatggggaagagctcaggccaccagcacagaggttcacaactggccaacatgtgaggcactcgagggctgtgaggtgtcctccatgaagaccacattgtaggccccatatgtccagctttgggctttgttcttgtttccctaggtggcaactcagactggctctcccagtccaaaccgtgttccctacttagagctgcagcatgaggggttgcccctgggctagtacctttgaaagcctgtgctgctgttatgaccctactcagagaggagatttaatctgccagcacaaacagtgctgtccataactttactgcagtaccaacgtactccctttaaaagacaatcacctccaagaaaatcacttcaggtaatcttggtctgagtgggtgggagggatattacgaggctctaattggagatccccagtgctactgggattgatacttgagaaatgttttgatagaaaagaggctattggagaagattttgcagcattgcagatgccattgtctgagcctgatgctgcagtggtttggacaaacacccttcagggactatatagaggcttctggaagttagcccctagcccttctctatcccagtctagataactggcatttcaatttgtttctccaagtccaaggggttgtagcattttgttttctttccagttaactattactgactcctagtgacttttccttccagagactgtccaaggagtagttttctgtccttagttttctacctcccttaagttccttagaaaagtatgggaaactgcaaaatatcttctttcctccgtacctgtttacctttctccctctctcctcccctcactccttccttttataagcacttactgaatgcttacaattactacatttctgctctccagtggttaagcagggccaggtgactgaattctggctaatggaatgtggagagttgatatacaccacttctaggccttgcctgtaagcctcatgcaaaatctttcaagtgcttagtctttttctttgtctcccagctggagagaaaaagagtttaggaagactctgaggcccagggcttgggtgttagcaggaccaggtgcctgtttttgtaaataaaaaattttattgaaatacagccgtatccatttgtttatatattgtctatgctgctttcacactgaaaaggcagagttgtgtagttgcaactaagatcttatggcctgcaatggctaaaatatttactatctaaccctttaagaaaaaaatttgcttaacccttccccaggggatggcagagccactgaatgaaaggaacctggttccctgaatgactatgtagagcagagtctctctttcccatcttccaggccaacttgcatcattagacagtgatattggagagaaataagtttttattttattaagctatagatattttgaggttgtttaatacaaacataagttattttacataataaaaatggtagctaatatttattgggcattttttatggccaggtgctgttctatgagcttctgtatttaattctcacaactttatgatgtatctacctttcttttttttctttttttgagatggagtctcgttctgtctcccaggctggagtgaagtggcgcgatctcggcttgctataacttctacctcctgggttcaagaaattctctgcctcagcctcctgagtagccgggattacaggcacctgccagcatgcccggttaatttttttgtctttttagtagagacagagtttcaccatcttggccaggctggtctcaaactcctgactttttgatccacccgcctcagcctcccaaagtggatgtatctactttacatgtatctacttaatctgtaaaatgatgtatgatcattttacagattaagatatgcaaggctatgtaatttgccgagggattcagttggtgagcgtggagttgggattcatacccagcttcagagcgtaggctcctaacttctatttttttgccccatatttacctaacttacagttccaagttcctccccagatactatgttgattcttatcacaggcttctgtagggcaggttatattattatcctcattgtttatgtgagaaaactgacctagagaagtcaagctaaaggttgcttgactagcaagtggcagaaatgtagcctgaacccagagcttctgataccagaatacggactctttcaactcctccgcagagactcagactgacttagtgcacactccatatttgaagctgtgttttccttgagtcttggtttacattcagaatgcaccagcctgttaaattgctgttggacattagcccatccttgaacagtcaccataacaacataggcacatggagaggaatgtggggtaggcaaaaactgatgccagtccaggggagaatagagctttgcagggagtgggggtgggtcagggaacacttcctgggtgtgttttgctatgttcttttcatgatatagactggaaatgattgagaaggacactgttctagtggcttttagcaacctgactcatccaggacaatacctcttaccaacttagcacaacctctcaggctgacacactgcttttaggacagtgtttgaagacatggttcctagggggaaagggtgtctattaacaatgtaggttcctgaacccacccaagatctactgcatgagaatctctgaagagacatccaggaatctgcatttttaaccagcaatgtagatggttctgatgtacattagagattgagaagtgcggtcttaggaagtcatggtaaatgaaaatcatgcccagcttttactcctccttttgcagtcaggtagcaggctggctcagctaagaaaaatccctagatgaatatttatttctgcacagggaatgtttcctctcagagtaggcgggtgagtatgctgagtaggtcattccctgccattcctattgctgggcaggaaacccattttactgtatcagttctctctcaagagaatcatttttagaattaactcaacacgatatataagttgtagagtatcatatctcaaaatttgtttccatcttataacttttaatttctaacaggtgggaattaggacatctttaccctcatccagcctatggcagacagagggtacagagccaagatagctcagggccagcttggggacacttgtatgcctaccactcacctcgtagtgttcatcagttccatttctgtccactatctcttagccaatgtgcttggtggtctatgcagtggagatttctttgctgaactcagaactttcagggaataaagatagtagacttagaaaagcatgagtttcattgacttgctggtgtatccacttctcacaaggtaagttggaggatgcacatgttctggaggaatcagaaagagagtggtggaggggtgggaataggatgggcatgcacccaaggaaaggaagatgaatgtcctcaatgtgacagactcatctttaagggtctgagaggcacagataagccaaaggggtgcatggaccattatttctaaagcagtaaaaaatagatgaattaagaagtaaaactcttgatagggtataaagggaaagatggtgcaaaggacataatatttcttcatggacaaagatcttgactttgactctggaagggtgacagggaagacaatttcagaagtaggctatgagctcgagtgtttttggcagtgcagggtgcttgtgtgggggtggaggaagagagcccttattctgccattccactgtgccctgacagggaagggaagggtttttctggggctgctggattacactaaacgctcttccaccccaggatccccataatttaaaatcacaccctctgctcattaaccaaacttagcaatgaagaataagaagagaagtaggtaggaagcaagggttagagtcagactggtgctctcaaagctttcattagctcgttcttgggcaagttttgcagagctcatcttataacttttaatttcgaagcaggccctcttctccctctcttcaggagtgttgagtgtgagctataggacagcaactttgctctcaggaagctgctcacctgggtccacccctcattctcttttgtagatctccatttcctatttttgccaggttctctgtagaacctgcttccatgggcgtaggctgaatgacaataatggagtccaagagacgcagatgaaagaccaaagtttacaggactttataaataaagttttatcagaacacagtcattcccattcatttacatattctctggctgctttcatgctacaacagcagcgtttaaatagttgcaacagagattgtgtggcacgcaaagctcaaaatatttattttctggtcctttgcaacagagattatatggcatgcaaagcttgaaatatttattttctggccctttgcagtgtttgccaatccttgctctagagagttttgtatgggcatttaaatgctacccttaagtaacatatatcacttccactcacaactcactggccaaaatggtcacatggccccactcaaccatagagggccaggaagtacatcctactgtgtgcccaagaaggggataatcagaatatttggcaaacagcactaatggtcaccataagcacctaatatgaattgaactcagtactaggtgctgggtatagaaagaagaacaagacaaaattgttgatctcaaggaatttaaggaatgccagaatttggggattggagggggaaggctaagtatagattcgagtgtcctttcctagaagatatagactggcttgtctgaattgcttgagatctcggcttggtgctagccagaactggggactgatcggcttggcaagcagtgggggcaacagaccctcctggtgaacatttgtatcaataatagaagggttgtttaacagaaattcttaaaggaaagatgagataatttcatattttgatattcataacataaagctggagctccgcagtgcatattattgctgttgtaattttggcaaagatgtgattcaaattggcaaagtgtctgggaagaggaaatcatgtaaggagagagggtgggatgggtcaggaaacagaggtggggagccaggtactggtggcctggtgagagctgggagggtggcccaggagcctttgtcacagacagacacgagggaaaggaggctgcagccagcagggcctgagaattcttggagttgctggagatgctaaggcctggggagggagtgggagcagcaggggaggggtgtgcgcgtgcatgtggtgagggagagacatttaaacatcgtaggaatgaaggataaatttaaaatccctcaaggggagttgagacagaatgacaacgtgaggaacgtgaatcactctttctagggacccacccagctgttggcatgatttggaatacattttcttctccttaccaagctcattctggactccttatcttccttctccctgatcccttgacctggccttggtggccaagtaccgagtgttggctaccatgtcctgggagcttcaagctcaaaagcattgaggccttagggtgtggtgctggtagggcaaggaagaccagtccagatgctggagatggagaaggggacgaatagagaaggtatcttagggctccaggggcgtccgagtctactgaatgctcccatcaggctttatcatgtatgcgctaagatcatcctctcatccagactttttgtttctatttattatcttagcataacgaggaggggggctgggagaggcatttatggattctgcttcatgtggtagagacactgtgatcaatatagtggagaaaaccataagctaggacttgaaatctgagttctctcccagctctgctttttattggcagtgtgatcctgggtggggctctctacctttgtggacctcagcatccataaaatgatatggttagatcattataattcctaaccattgaaatagtctttgtttttgtgacttgcaatttgacttgccgtccaacccagggaaggcggggtgggagatggtgtctggagggcaactttctgggaggatgccaccctgggggcccagtacagctcccaacacatagtgggtgctcaaccatccaacactggttgaatgatctggaggccagagttcctctgagcatgtagagcacgggacacttcttagatgccacctgtggtcactgagacgtgtggttgggaggaattctggttttgggctcctggctaggagggaggcaataagcaggtatcttgaaaaggtggtaagttcaggccctctcaagccacaaggactccccccagtacttagacctgctgtggggactagcaatgtgtgagtaacttttacgtctctcattaagttaaacctttgctaattggagcatgtcaagatctagtaccagccacccacctggagtgctgctttcacttgggcaggtccatgaggcgtaaaacagggaaaacacctcaatggctttggactcaacctttaggggtgtagtagtggaggaacagtgcacaaaggaggagagaggagtgaccagggaggcaggaagaatcctttggtttccctaaatcctctctcatgcacatgctcttccttttgcctgttttcctctcctgttcttcaactggcaaactctgtttaacccggctccagggtcctttccttcacaaagccctcctgaccaaccccagctgggctaggtgcccctcttttttttctttttttgggatggagtcttgttctgtcacccaggctggagtgcaatggtgcggtttcagctcactgcaacctctgcccaccgggttcaagcgattctcctgtctcagcctcccaagtagctgggattacaggcacacgccaccacacctggctaatttttgtatttttagtagagactaggtttcaccatgtcggccaggctggtctcaaactcctgacctcaagtgatctgctcgccttggtctcccaaagtgctgggattataggcgtgagccactgcgcccagccaggtgtgcctctcatgtgctcctctagcaatcaggcctacgccaatcatagcacattctgtgatgtggtcacaatcgatgttcttcctgcctcttccatgaggatgatgtggactaagtccagctcatgttgttgtgcctagtgcctggcacagtgccttgcacatggtaagttctcagtcaacgctgattgaatacgtacgtctttcagaggccaatctggttatgtcctccttggcatggaaaaggagaatgatgccaaggggagcagcaggggcatctgagtcacacgtggccccaggtcctgaggcaggcacaggcattaaaaaaggaggaaggaacctgcatacaggacccagttctcaagaagagttctccttaggctgggctcagaggctcatgcctgtaatcctagcactttgggaggctgagtgaggaggatcgcttgtgcccaggagttgagactagtctaggcaacacggggaaacgtcatctctacaaaaaataaaaaaattgctggatgtggtggtgtgtgcctgtggttccagttactcaggaggctgagacgggaggatcaccggaccctgggaggttgatgctgcagtgagccgtgattgcaccattgcactccagcctgggtgacagatcctatctcaaaaaaaaaaaaggagagaccaccttgtggcttggtgcccccaggcacgcacttgggaggcagggcagcaggtggtggtggcaatccccccagagtgggccctggggaaggggttagagggattcttctaccaaaaatgggagggaacagccagctagctgtccgaggtggggctgagatgtgcggccctcggagttctctccttattgcagcacctctaaaccttaccaacgcggcatatcattatttctttaatctgtgtcttctgcagtagactgtaagtttatgagggcaagaatccagtccactttgttaaattctggacacctgggggcccagcctggtccgccgcggatgctcctaatttcaacatcatttatcgagctccactgtgtgccagtttgtgggtcaggcccgggatgtagcactgagcaagccagaagccttggcctggaaggcaatgccattaacctctttctttctcttctctatttccctgtgaccttggccccattcttcctccctccctcccttccccactccttgtctctgccctctccctcccacagagcaatgttctgtgatggtgcccgagatgcgtggactgagcccagaccgcaggctgcccgagcccgccccctgcccggctgcggggagccctgagcccaggtccgcgggccgccgccaacgccacgtcctggccctgccggaagaagaggcatggcggccccagcagtgcgctctgctcgaggccgacgcctcggacgaggtgggcatgctgccggcttccccgcgcgccgcctctggcttcgacaacttcttccaggtgcaggagggcgagggccagggctgggagggcgccatggcactggaggcgggctccagccctttcctgccggtgagccccgaggtcatgaagcggcggcgcgggggcctcatcgagcagcgcgacatcatcaaggcccacgaggcgcacaagatgcagagcaccccgcaggcccggcgcaaggaatgggagtgagtatggcggggacgcgggggcgggcatggctggctgggcctgaggtcggggtgggttcctggagcggatgggccccgtgaggccgccctggagggtcgggagatgctttcgctgtgctgcgactaacgagaggctggaccctctggatgaggtcctcgtggtcagtccctgatctcaccacccggctgtaggcctcgtccagcctcactgaggcgttcagctgtcagatgtgggtgaatcagccttgcccccaaggctcacttgttttactaagagcctgtggagaaagaactggggtctgtttcattctctgagctttcctgaaagccagggagaatccttcacaacgtggatcatctatttcatctttacttcaggaactgcagctaaccctgcctttttaatatcctccttggatgaatgattacattttgggcacatctccagtggatggaggaaaatgtccaagatctgtgtggccactcctggctttatttctgctctgtttgtgtagggcaaaaggccaactttaattcacacctgttgagaattttggctttttcttcttaggagtcctaaattaaaggaagatgggatttcacttaattctctcggttgccccaggtttttgctccatagaaggactttgctttgtcctgtggatgccggagtttactcggcatgctggcatgccctgtggtctgtatgtcttcatctcttcttgctttagattgttgacttgctagatgtcatcaagtacaaagagattagtcacagatgtattttgatggtggtggtcgtggtgggatttacctacttggtttcagtgaatgttctggatgatacaagtaggggtaaatgagctgatctctgtttcataaggatgttaatgtttgttagttcgctcattcattcattcagtgagtccgaatgtatgccgggctcctgggattcagagaggagttgggcacagccagcattcaacaaatctcttggttgttcatctctcagcactattagtatttagagccttgcatacctgtctttaagtgccaggcaacattccaagcaccttacatatatccactcatgttaatcttcaccataactatgaggtaggtacagttattagccacatgtaaccaatgaggcacagagaagttaagtgactttctcaaggtcacgtggataacaaccgcattgttactgtgatttgatattaattagtaatttgaaccctggcagtctggttgtggaatccatgcctttaaccatgatggcacagtgcctttcattctaactctcaaagtacttctctcaacaacctattgagatgccatggtaagagcactggtgttggggtttggagacttgggtctaattcccagggtgacctaattagtggtgtgaccttgagtaagtcacctcatcatgacttcgaaagacaagtaggagggagtagacttcctttaaatacaatgcagctctgatagctggcctttcttcatatttagaagtactattttttaatgcacctccatcttatctttctaagaggaccctgaacaacttgagggctgagactgtcatgcacattgttcatgtcactcaatgcctatcatctggcctaacccaaaaaatcccacaatactcaatgaaaaactagctttaccatgactagcaatgtggaaataacttttatgtctctaagttaaactttactgattggaggatgtcaagatctagtaccagccacctacctggggtgctggcggggatgattgggagactgttttcacttgggcaggtccatgaagaggtaaaccagggtacacacatcaatggccttggggaatgtcagcctttaggggtgtggcagtggaggaagagcacatgaaggaggtgagaaggagtagaaggaggtgggagggtaaccagagggtatagggacaaagaagtaaggaaaatggtgtgttcagaaggaaggtcatcatctccatagaatgttgctgagaggtcaaataaaatgaagatagagaaggaaacactggctttggcaacacagagatgacctgaatgggagtagtttccacagggcgatggggtcagtagcccagttggagtgggttgaaaagaaaatgggaagtgatagagacagtgatgttgccccatccttctctgctccccaacactcacggcctcatcatggcttttcccctcaccacccaaattccttagcctcatggctctgtacatgccttaatttgatcttctccacacccctccccagttctacgaaccctaatgttactgagcaaagagggcttgctgctcggggcactagaagccaatactacagcactgggtttttgagaagagaagctttttattgcatgtcaattcacaaagagacgggatgtcaagcccaaatctgtctctctgtcctcgcttcaaggcagtattttcattagaaaaggttcaagggattagtaagtgattggtggagggaaaggggaggtctggaaagtccttggacatgctcagttatctcttcatgctacctcacaggtcgcatgtgaaaattcttgaggacttagtatgaaacatgtcatggaagttcaggctgtggtgtcagcaggcttgttctgcagacgccagtaggccaggccatcttggttccaaccgatgtcagccagttttttcttgatctcacgttgtggggaatttcagcatttctgcaagttgtttcttttcttatctgccattctgcaagctcaagaatatctgttagtcattggtttcttactctttggggcacagtttcagcttcagcttttcagcaggttgtttcttttcttatctgctatcctgtaagccaaagaatgtagtcattggcctctttaactctttggggcacggtttcactaatacactgtctggcactcatgtttcatcatcagcaaagtcctgttcatcctcctcatcttctctggaagtccccttcactctcttatttctgctggagcctccccccaggaatgcggcttgctctgcagctgcctcatgtgacagctgctttcccttccacgctgccttggaccctggagtctagagaagcaatttgctcctcactattgcttccagaccattactcccctctcctgtcctaaaaatgccagctgtggcgtgcatgtcatcagataataccacctactacccctcgttgccaccatctacaaactcccaagtcacttgcttcattccaggaagaatgggttagccctgggtttactgcctctcttccccacgtcttcagctgctggcagttcttagtgatttcagtatccatgtagatgacccttcctgcaccctgacctcttggttccttagccccttctgtttggtgactttgccttcttgcttcctgctgacagctcacctccatggtctgcctggacattgtcgtaactgcattactccataatctcggtttcaagcatcccactgtgtgatcaccccctcttttctctccactccctctagtgctcagttcccaagattctttaatcttactgcatccacaagacactgatcctattaccttttcactatccccttccccagtcatgtcaccatttcccatcttatcaaactgaactccatcataagcaccaaacatattttccagataaaatagtgacctttcacttgaagtctcctcctaccctctcaagctctttcttctaccaacttctaagatagaatgaatcatccacaaagggcaagaatgctggagctcaagttggtttctagtgtacttcatgcttcaccatcattataatctccttattttcaccctcaactttgttgtccctctgctgctttgttataccttgtctggcaagacttcagccctgctaaatcccactttcccctattcttcatgtacatatgggcaggtgaccatagctatagaaaaagtcacaaccacgccgattgacctcactgtgaattgatgactgccacctccagttggcccttagtcctgcccagaaatcttactacttttcccttttctattcactctcacactcctctagagattatttcacatgcttttcccttaactctcaaatcccatcatttcctgccagctcgctcctagctcatgactacaattgccttcctacttcactgggaaaatagcagcaatcaggagaggcatgtacaggctccatccactgcactgaccgcctgctgcatctggtccctggtaccaggcctttaccttctgttactgtggactgaccacccctcaagttccatgtggagtctgttgcccatgtagagaaaaatgagcccctttgtttattctgtctccatttttttttcttacaattttctctggaacccattccaatcaggtctttgtcccaggcaaacaaacagctgttgacatggtgacattggccttcccaaggcagaatccaatgggtgttccttcgtgtccatcttccttgacctagcagcaacatttgatcacttcctctttcttgaaactcttttgtccttattttttatattttatgtttttttagagacaggattttgccgtgttgcccagactgatctcaaactcttggcctcaagtaatcctcctgcctcagcctcctgagctaggagtacaggtgaaagtgttttgtcacatggcttttacgatacccactcttggttctcctcctatgttgtgggttgcttctcaatctcttgctagtttccacttccttttcccaatccttactaaacactggatgtcccagggcttggtcctcagcctgttctcttctcaccagtgcttacttcctagtgctcttgcccagtcccagacctttggttagcatcgtatactgctgacctctaaattggtgtctgtactcaggacctcttccctgaatttaagataccacccacttattcaccatctttacttgtacatccatcgacatctcaagctgaacatgtctaacatcaaaatattgatttctctccaaacctgcttctcttgtagttttctctttcattaaacctacattttttctgttgctggggccagaaatgttgaagtcattttgattctcacattgacactcaattcttgccaatccccagtgtctcccccctcaaaatgtatcagatcaccattcaccacctctgctgctgtctccctggtccaagcaccttttattatttttattccacacacgtatatgatactagatgcccagcactattctaggtactttataaatattaattaatttatccatgtaataattgattgaagctggtaccattattaccattattgtccccatttttgcacttgggggatagagagtttaagtcacttgcccaagatcataatgtcaaccacctcttaatgagcctccctgcctctgcccctccctgctagactctgtttccccaactgcagctaaagatccttactttttcttttttgattcacaaaggatttagaaaggtagaacaagtagtttctgtccaagagtcttaagaaatatttcatatcagtccttagctcagtgcatgatttccatcttctccctcttccccctgcccagccagcctcctaaagatgcatgaatgtctttggtttgatttcttcatctttccccttaactcattctgcactggctacactggtcccttgttatgccttgaatgtactcagacctcccacatcaggcctctgccttttgctggtccctttgcctagaatgcttttcccatttatcaggatggctcctctctcatttcatttaggtttctgctcagagagaacttcctgatcaccctatttaaatagcattcccccattgtcactctctttccctctttattttgctttatttttcatcatagcccttattgtttccccaacggacacacaaacacacacacatacatacaagcacagatattttgcactggagtgcaagcttcttgaaagcagggcctttgtcttaccttcagggtccaaaacagtgcctagtgtgcagttgactcacaataagtgtttgctgaaagaatgatgaagtaaacatattgaggggaattgatatccattctaatcagctaagttccagggaaggaggcagctgagttccctgtgtccactgtgtggttgtacaggttgctgactgcagagtcctccagttgaatagtcagcagtggaagtggggagtctgttctctgccccacttcagggctgcccaggatctgcatgcactttgtagagatggaaatttttcctcccttctgtctcctgcctttcagcttctcctgacttatgttctttagacaggatccctttggctctaggacaggggcagcctggtcctttcccagggcttggatttactgtagtgggaaatcaggcagggttctctgtgggcagccctgacagcatcttgctcctcccaaggccctgtccactgcttatacaggtgaaagcctgggacacataccaccagctttacaaatcctgtctcctagacactgagtcaggaccctggtgatagtgaaacagactagaaaccaacctgggaggtctcctgcattttttttttgtctttggctgggtaagccaaatgctgatgggagaaggagtactttaggtgatttcagatgaagcagattttcttgtacagaatgttgttttcctaagaacctatttaaaggtttcctcaggcccacttttcaggtgatgaggacctcttggttagcaccaagtgtttattgtgtactaagttttataactttagcaagtgggcatgtcacaatgttttactaatactttaatatagttctctccagcttaaaacatttttcatacatatgatctcatctgagcctcacaatgacctcatgaattagctgttattatttataatttacaggagagaaaaatgagctccgaagttagaggtggtactaggtcaaaaacctatgtcttgataatgactgccaccatttattgagcactggctatatggtaggtgatttgcatgtattatttattctaatggaaataataggtaccatgatgaagaacagaaacattttgtatggcactattattgcatatgggtctggaagaaaggaaattatgtgtaactttaaagtctgcgtaggttggtatgacttactctataaagagggagggggtatttccataatcatagtacttagcacactacattgtaattgcctgtttacatgtctgtgtcccccactagattgtaagcagagaagtctgtctgctccccattgtgtctcctttacttagtactgtgttgggcacataataggcactcagtagacatttgcagatgaaaaacaacaacaacaacagcaacaacatgatttttcatattgggaaactgaggcttgataaggttaagttacctgcccagtatcacagagccagtgaggattcactccaggtcctctaattccgaagcccatgtttgttctactgagccatcctactcactggtgtccctacagtaactggcacagcactgggtaaatgacgggaactcagttcatgcttgaattcttgcaatgctacttgtaaattgtgggcttgggcactttgtaacctccgcattttttgagtagaggagagaaataatacctaccttgcaagcctgttgcaaagtttgaccacatttattagatcatatagtctggtggggggtcctcaaaatgttgatgagcaccagggttattctgggcctcttctctgcctacagcctccctgggtgacctcaccaggtccacatatctgcagatgactctcaaatgtaaatttccaaagaacccttgactcttgaagccaaatgcttgtctggcatctctgcactgttgtctatctaatcagcttctaaaacataatgtggctagaacaaaactcctgatcctcttctgatcctgtctggcccctcatttttccttatctcagtaaatggcaccactatttctccagttgtccgagccaaatattctcattatcttttatttctctccatttttcctcacttctgatcagtggtaagccctgtcaataacatctcccaaacatatcccaagtccaaacacttctccatccccactgctaccaatctcttccaagccactatcctttggaccattgcaatggcctgctaacgtgtctttgcatctttgtttccctagaataagagaatgtgatctattgacacaacaggcagggacaatatgaactctttttgctggctcataaagccctatccgacctgagctttgcttaactcctggcctcatctactctctcccttgttccctgtgctcctgcccactcgccttttatttaggctatgcctgtttatgtctctaccctggctcctgccgttgcctggaatatttctccagatctcaacagggttggttcattcttgccatttggaccttagctcaaatgatacttcctcagagaggctgtccttcatcacacagtctaaaatagacacctggtcactgtgccatatcacctatgcagttgaccaccaacccccacaagaatgttggtgccgtgagatcagtgatttgactgcctcgttcactccatatccccagtgctgagggcaatgctgacatatgggccctcagtaattatttgtgaatgaatatttatgaatgttccgtaacagtggctatggttatagttacgatctatgtgttcacctggcctctgatagccctagccataccaaacggtctagtccaggaagctcaggacaccactggctctaggtctagaccagggtcagcccctggggtgtggagattcatgagctgtaaaacacaggttggttaacttacaggttgtatgagaactgtcctccttcaagctattgtttgatcaccacagagccatgtcttatttgactttgggtaagatatccaacctttgtgggcctcattttgctcttttgctagattgtggatgagtacagcaacctttttgaattgttatgaaggaaaaacagcatgtaaagtacttagtccgatgcttggttgtttttctccttgatgtctggttcctcaccttcaggagcctgtcacttgctatcacttatagtttaaccaaaacattagattgtgaatctaacaatagaagcctgcaacttcttgtctaccgagaaagtgtacaagaactgctaactcatgcccccatgcctagcaacatggctttctcaactttgaaaggattagagtcatccgttggtcttaggaaccaaaaacattgatgcaactccaaataaaagtagcaaacatgtatttttccactaccataataaccctaatccccttaatcttacccatcattactaccttagccaacccctataaaaaaggttcatatccaaattacgtaaaaacatctatcgcatgtgccttcatcatcagcctcatccctacaacaatgtttatatgtacagatcaagaagtcattatctcaaactgacaggcatcagaggtttgccgaagcccaaggtgcagaggttgtagttaggcttgggatcagctgtatacatcaacggaccacagcagcatgtgggagactacaggagggaatgcacagtgcctggcacaaggtcaacagtcagtgcatatgagccattattatgatcattattattattcatctggtctagctgcttcatttacaggtgaggaagctggggtcctgagagcctgggtgactgctggtgctttatgtgaaggtcagtggactgtggtgagtgacaaggtaggaggaaccagtcctgcaagtcccacccacttctgtctcatgtgccctgcagctatgctgacttagtaggggtgatcacattcaaacaacagtctcactggcattcacaccgcattcagcatcagcaacatattctgtaaggcaacacctgtctcaaccttgaagctttatgggtgaatttaagggccattgggccaattttttttttttttttgctggccttttgaaaggcggccagcctcctgcagatctagtgagactaagtggagacctcagtccacatgctgccacctgctgccagcatcagacatcactcgggttgttagaatacaggaatctgtggaaccactattgccaaaagggtgcatggcagaatttgttcttatatatgagtgctttgttgaattatcggatattttaattttatttaaatgtgtatgtttttagagggggcaggaagtctccaggtcactgtattccccaccattccctactgccttagggctattagaggactgacttggtcctgaaggcacctgagtttgcaggtctgcaaaatccaaccttctcactcagagacgaggcatttcaggatcctagggctgtagtataacagggttgcagaaaccaaaacatatgccagtggaacacagaaatcatgagccttcaacacactgggttatcactaaccaacagcaagtttgaaaaccaccagccaagaagagaccggagcacatgccctgctttcttggaattctgagcagagcaggaaggtgcagagaatccagagaattgggcttcccttaggaactgacacaatttgggtgatttctagagatttgctttaagatgatcctttggggaacttcagcacacacccttgaattttccttacctgtcctcccgggattagaaaaaagaggctgtttctagatctggtctctggtgactcgcctttcccttcaaccttccgcagttctagaaatgcttccctagagaactgggtttgagaataaacaaggtggtgcgcgagcagcgcggttttctgtgcttgcagtggagaccgcctgtgacaaggagggtcctgtactgggaaggagggggactggccccctgctaagtgcctggcgactctcatctcttgcagagaacgaatgcataacctctctgccactccctttctctttctgaagccattggatgccctgagagaaagcagagggtttccatcttttccagagcacagtgctgggagcaagggctgggggagatctgttgtcccagttcttcccttctaaggcaggccttgggggaggactctcccccaagactctgcagcctggtgctcaagccggatcggcccgttctgtgcttccttttgtggcaccatcagagtctcctccctgtttggaggctcaggtgaatcagtcccctctctcccaccctgcccttgcgctgggctgcctccactctgctcccatggccatatctgtagaaggaggctcttcagtcttctgaacatgtcaagattcggaaattctgcccccagccacctttttgaagaaaatgggaaaagcggcgccctctagcgccagctgctcaatttgttttccctctttttcagaagagatattttttcttcttttatggtgcccccaagtggttgtttctgtgtattgcagccgcagtctcactgggatgctttccgctgtgtagctggaggggctggggcagcctggtggtcagcactcacatcacaagaaaggaaagcgaagccaggaggagaagggccttggcagggcacgatgagcgccccgagactcccaccgcagtccagggccttccccctccctgaccactggcaaccccttgccatctttaagggcttgcctggacccatggctgcaaatgagccaaaggcgttttcctcttggatgtgaggggatgggtgaagacacgtgcagaaaaggaagtgctcattgtggaggaggtgaacataattggaggaattcgctttggcctttttggctgaaaaaaatatttatgaaattgctgtacacccccgctcccccccccgaccccaagcagagttagacacctatagaattccaggcaccgatgaaaagacctttaaaattaatcgcacataacttctcattgaaggtgcaggtgagaaggctgaggcgcagagaaggaggtgggcgtggggcacccttctgaggaccccacctcagccgctcataccccagccacactgtcctccttctcttctcttctgcttttagctcctttaaccatctttctcttcctctttttctctcgaagcctgtagcagggagggaatgaaggcatgcagggttggcgtgtgagtgaggaagagggcttgtccccctttcccctctgtccctgcccccgcctctcctggggacctccttgcagaccctctgcagctgtgctcacatcccactactcagcctcactgctgttctaaaaaggcagcattactgcctgctgatcaggtgatgaggaacctgcaacccttcccaaatttataaagaaaacagaggaattcagtaaattctctttctgctcttggagtaggacagaccagtggtcagttctggggacagtgctcctggtgtggagacagtgttggctggacacacccagcttgggtgcactggggtcaggtggtcaggtctaactgcatccccctcctgtcactccatctcaacaattccccaacccagtcctaccccatctcaacccttcctcaacccaacctctctccatctcaagtcctccccatttcagccactatccgtctcaagcccttcctatgtcaacccttatcaattaaactcctcctcatctgaacccttccctaactcaacccagctcatctcaaccccttcccatctcaaccgcttcccatctcagccacttcacaactcaaccccttcacaactcaaccccattcccatcatggccccatcacaactcaaccccttcccatctcattcccttcaaaactcaaccccttcctgtctcaaccccttcacaactcaaccccttaacaacagaaccccttcccatctcaaccacttcacaacttaaccccttcacaactcaatcccttcccatctcaaccccttcccaactcaaccccttcccatctcaaccccttcccatctctacccctttacaattcaaccccttcacaactcaaccccttcccatctcaaccccttcccatctcaaccccttcacaactcagccccttcccgtctcaacccctgtcaatctcaaccccttcacaactcaaccccttcctatttcaaccccttcccatctcaactccttcccatctaaaccccttcacatgtcaaccccttcacaactcaaccccttcacatctcaaccccttcacaactcaaccccttcccatctcaacccttcacagctcaaccgctgcccatctcaaccccttcacaactcaaccccttcccatctcaaccctttcccatctcagccccttcccacctcagcttcttcacatctctaccccttcccatctcaaccccttcacaactcaaccccttccttactcaatcccttcctatctcaaccccttcacaactcaacccctctccatctcagtgtctccccaacttgacccttcaacatctcaaccacactcatctcaacgcctccctatttcaccctctccccatctcaagcctacctcatctgaactctacccatctcaccacacccatctcaaccctcacccatctcaacctctgccccatctcaacctcactcatctcaactccttccctatctctacccctgcccgtcccaacccctcccatctcaattccaccgccatctcaactcctcccccatcttaacccctcctcacctcattccttctccatctcaaccccctccacctcaacttctccctcatctcagcctcttcctcatcctaacccctcccacctcaacccttccccatctcaagacttccccatctcaactgctctctacctcaactcctcctccatctcaacccctccccaacttcaacccctcccccacctcaactcctctccaacttcaacccttcccccacctcaactcctctaccattgcaactcctcccccatctcaactcctcctccatctcaacccctcccccacctcaacctctccccatctcaactcctctctcatctcagcccctcccccagctgccatctgttatggttgcttctttcccctgtgtttatacttaagctgggaaaaattccccctccctccctccctcctccccttccctctttctgtgatgaacatgaaattatattacacatataggtctttgttttgctcttattcttttagtttttaaaaattacaggatatggtgtgcatctttctttggccatttctggaaagatgtccataacatctctttcacgctgcagagtattcctcagcatgactgaaccacagtttattccagcaaccctatcaatggatgttcccagttgctttgcagttaccagctgtgctgtagtaagcctcccctacatgcctttaggatgtgcactttcatttctgtagggtcaagtcctagaagtgggactgtggacaagtctttcccacgctatgccctcactctccggaggactggcacttctctcaacacccctcctcagcatctcagcctcaaattgaaatgtgaactttcacagtctgtgttatctctctggccccactggagaggcccgatgaattaataatatgccagcaggaaacagagagatggagttattaattgtcagtccatgagcccaccctctcaaggtcctaattagcatgctgacagcttcggttttatccagagctagggcaaggctctggggacactgtggctcagctaggggcatccggcacagagtggagagccctggtgcctttctgggtggggtggaggggcgcttgcaagaggcttgtgaattcagaagttccttcagggatccctttgtgcctgctgtggggtaggggagagaaacaggctgggagtgggggcaggaatgggagttttagtgtccaggtggtggtgatggttggtgtgtgctgctcttgggccccagtggtgggtttgtgattctggttctgctgcaggacagtgacactcaccaagctgtgttgggtgtagttgtctcagggaggtgcctgctttcaaaccaaagttcctttgatggggaggactgaccccaggaagactgattgcgtatcaatattactctaacccatggccctctttcataacatgcacactcctggaaaggatatcattaaatctggcattggtgcatggccaggctcacatagggttgctcaagaaatgttgctgtaaaggaggccgggtgcggtggctcatgcctgtaatcccagcactttgggaggttgaagtgggtggatcatttgaggtcaggagttcaagaccagcctggccaatatggtgaaaccccatctctactaaaaatataaaaattagctgggcatggtggcacacgcctgtaatcccagctatttgggaggctgaggcaagagaatcgcttgaacctgggaagcagaggttacagtcaaccgagatcacaacactgcactccaacctgggcaacagagtgagattccatcttaaaaaaaacaaaaaagaattgtttctgtaaaggaaactacctataggaagctgcgtgaccttggccaggcctcttcacctctctgggccctttttaatgtggattagaggtggtccttattttggtttgctccatactgggcagccagaaccatctagaacaccagccaggacttgctccccaagggtgctcctctgttgcggtgcctgcctctctgcccaatctctctccacacagtggaggctctgagtctttcctactttgagccctcatctccaccagcatctatgcgtagctctgctgtctcaggcgcctctcaagaagtttcaggcagcagagttggtggaagctgaaaagtcatttgaattagtttgcctgggtctattgctcaggagcctgggcacatctcttaacctttctggggctgaggacaccagcattcagggttgtgtgtgaggtgcttagtatgattattactcatgtttgttattaggctctgtcctgcttcccccaggctgtggccgggaagacagaacagccatttacacagtaagctgcccaatgaccctgcctttcccattcccagtctgcttttaaaaaatatgggtgtctagaccccaaccctcaaagattcagatcagttcatcttaggtgaagttttaacaggaagatgtatatagatgtatatattttacaagctcttcaggtgattgattagtttaagaaccattgattgagacccatggcaactgggcgggcaggtaccttgtgctcatggggcctgcccagccagacacagcctttttcaggagcaaatccccctatctcccttttgggacacagcagactgtctgagatcatctgatgacctctacatactcttttctgggactaagctgcctttctggatcagttagaaggcaactggaacatctctgaaaggttctggatctctgtgcacatacagtaaggggacagagctcattctgtgacagtcttaccaatgcaccacaatgtagcagtctctcgttgtaaggcatcacccggagttcttcgtttcatgaccaaaaaaattaaggagtgtggacaaagggtgaggttagaacgaaagtttaataagcaaaagaagaaagtcctctgccacagaggggacccgaaagagggttgcctttttacagttgaattcaaaagcttttataagaaactcccctcatctctgtagctgtttgtgtaattccccttatctgtgcagctgcgggcatgtccttaggcaagcacaaagcacagcttctcttgttcgggttactgtggttatgttttgggtaggtcccccacctccctgtgcaagttcccatggagcccactgtgtacatgcccgaaaagaggaggaaacctttctgtgggagcccactgattacaccaagaacaaaggctgctatgttgggccttacttgcttgtctgtgcagctgcagcctgagttttccccaggctgctctatttgtgcctgtagcttgatttttcaggctgtctttcattttgaaagaattttaccaaagacaagctttagctgtctgcccaactagtttttccttttctcctccctcaactggatcataacttatgactctgaggctgagtcctgggatagttggatgtagagggggcattatctggatttgaacccagtaattcttagctgtctgatattacataagttacttagccttcctgaacctcactttcaccatctataggacaatatgtgctttgcaataataacattagatttctagaaacacacacacatgcataacaccaggaacaaattttcctataacttattttattgatttcttttacatatatgaaatagaaaaatgatattccaaagaattatacctctcaattttttttaggaaaaatgtttaaaaaataaaaaaaaaagaattcaaattgtgcaagtaaaacaaaaggtaaattggagctctgctttaaagtaaatttcaatagaagattgttgttgttttctttaagtaagaagctgaaattgcggagtgagttttgatgtggcagtgtgtatgctgtcttggttatccagctgttttgactcggttttgatggcaacatatactgaccatgaaactcagaggtaagtaatttcaccattttgaagacacccacagctcttgacattttcaaagggtggttcccaaaataggagttcttttgagatggcattggtatattccagggtgatggatgccagagattggctgggtggcttgatctgggttgcagacagttaaaagttaaagaaaagtagggtagcttctacttccttcatgacctggtccaggatattaacagacatgccagtggacctgggtgcttgatgttacttaacacaggtatcatttccactttttccctctgctccaagccacagggaaactcagccatttccagggcccttggtttcaggaaggtctctgcagttgcatggagcctgctttgcctggcattctgcaggattctttagtacaaggattttgactgggtcaaatcagagatttgggcaaattcctgcattttaaaatagtcttctcctaaaaccctttcattctatgtgatggacagataagagatacagggctcctgtatcagaaattttatttgacttttggagtagagtgacctgaagaacaaattgcagttttatttttctcattacagcaagtcaggaggaggcagcctgggcctggtggggcacttctctgatgtcaacagggtctgcccaccctgccatctttagtgtggcttcctgcatcgccgatcgaccaagtggcagacctgagggcaaaaggaagcctgatattggagtcagccccctttggaagaactttccctacagcccacctagtaacttctgatgatacctccttggcctgatttaattcagtgcaccaaaaatattatcatttcaacacaaaaccaatgcaaacaaagaatatgcccctaaatgaaatggtgggatctagtttaatttttatcaagagaccttcctgaagccaagggccctggaaatggctgagtttccctgtggcttggagcagagggaaaaagtggaaatgatacctgtgttaagtaacatcaagcacccaggtccactggcatgtctgttaataaaaaaattttttaatgttttcattcatgtatcgtttcaactgaatcacatgtaccctaaaacttaaagtataataaaaataaataaataaaataaaataacaaaaaaatgttttcacaaagacagttttcaaagtaacaaaggacattgagaaaaaaaatcctttggttgttccaagtgtacagaacatcagataaaaataacatcaattttccacagagaaaccaaatatgtcatttaaatgcttccagaattaaacatttgatgtgtatgttgggtgaggaggcaacaggattggatagggtggtgggaagtctgagttttggtctcccctctctcactaactagctgtgtggctttcactaaacaactccagccccttaacctcactagctcagttttatcatctgtaaaatgaaaggattggtctcgatcagtgctgtccaataaaaataatatttgagccacctgtataattttaagatttttagtagccatgttaaaaaagcaaaaggaaacaagtaaaatcaatatattttatttaatccaatgcaccaaaaatattatcatttcaacacaaaacaaaattattgagaaagtattttacatttttttgcactaagtctttgaatgctgtgtataatttacccttccagcacatctcagtttggactggcacagtgtcaggcgctcagcagctgcacacctctcctggctactgttttgaatggtgctgccctccagagctccaaggtttctttcagtcctgacccttgaggattgtcacctttttttcttgactcagctttgagtgtcttggcctctctttccatcccccaacctggggcttctcttcaggcatggggtgaagggatcaaaaccctgagggccacccccactccatgatttctttctgcactgtctgctctctgtcctgtgctttcctgatttggaatcacttccctcgctttttctcaggctgagatccctcccagcttgccttatctctgcctggtccctgaggtaacccatttgcagcctcccattcctgctctgtctaggccatttcatgttctcttaattttgcattccattgcctttaaaatcttcaaccacttaaaaatgtaacaatatacatttttttctttcattacaaaagacgtgctcattgtgaaacaattgggaaatataggagcttataaagaataatataaaaatcactcataatccactcactccaacccaaccactgctaatgttttgatgtgcttatctttggtctttttctaagcattacgtatacatgtaaatgtgttttaaatttctttttctggagattttacagaatatatagttttctattctatttctttcacttttcattatactgtgagcgttataacaatatcattaagtatcgtttgaaaacatcatttgtaattgctaatggctgaggttcagggagagattttgataatattatgtcaccattaagctagggacttagataaacttagtatctgccctgcttctcattcctccttgttgaagagctcttgaccaatgtaaaaagcaatagccaaatgtgaaataaagaactaccttattaacagctcagcaagcactggagaccggcatgtttgcatttccacgctcattggtctaggtgaggcttcctggtccccatccctggaatctaagatgagctgggcttgtggagcaaccttgggcttgactttcctacttggctcagactggctttggcaaattgcttaaccgctctgggtatgtccttatctgtaaagtggtgattataatagtgctcacctcataggtctgttgtgcaaattaaatgagagagacatataaagtgcttatcatagttcctggcagatagtaaatgatccataaatgttagttttaccatttccctatttttggacacttaagtggcttaattttttttactattataaattaatcagtttatcagtaacaaatatttattgagtacttactactggccaattttttttttttttaaatactagaaattacaggggtaaccaagaccagacaagtgtctgatctcatggaatttaaattttaatgggagacatgatcaataagcagggtaagtttggatatggaaaaggctatcaatcacatacaacaagatgatgccctgagcttcaggtagggtgggcagcgaggagctttctgagttaggtgatgtgtgagcagacatctgaatgacaagggggagatctggggaagagcaagttaaagaccttgaagtggaagtgaacttgaggagttcaatcaaaattcagaagcagggagcgcagggggtttggtgtggtgggaggagctacgggaggtgggcaggagccacctggtcagggaacacttcggagctcagggtgaggactgtggacttcattgcaaggtgtgagacatgcactggaggcttccgtgcagcggagggatgcctactcagtggtgtgctggagcgggctcatgggagcttctgagagcctcttggcacgtctcttcccagctccttattcagtgaaatcatgttgataagtggcttgatctgggttgcagacagttacagattctcctcgatttatcaggacacaatctgatcaacccattgtaagtgaaaaatatcatcagtcaaaactgcatttaacaccatctaaacccttcctaaagtcaaaagatcataagtcaaaccatcataagcccaggactgtctatatttataacacaggagtttatagcagatgctactcttcccctagagagctagttgttaaatgtttaccagcacaccactggaacaaactaatctaggttttaaaaaattctctttgcctatgctctgtgaagaatgaattacagggaggcaatatgcagttttgactgtagttttgagaatttccttaggataaattactggaagtgaaattactacagaaaattatctaattgctccccctactgaaaatgttcatcatttatacctccactagcagcaaggtaccatttccttgtactcttactcacacttagctttagccacccccatagaatgttccttctatctagaactttgcattctgttctctatgtgtagctgattatttatttatttatttattaatccttcaggtctggtctcacatctctcttctcagaggactttcctgaccactctatttcattgtaattacttatttgccagaaccatggccatttatttatgtctaggacagggtctgccacatagtaggctcccaatatatattattgaatgaatgaatgcatccgcctacctttctgaattctcaaattgatactaatacagtcaaaggagttcctttccttggaatgtctaggattggcttttttcagcttaatgatatttctggagttgaggtatattaagtccaaagagttcaataattgataacaaaatactgtgcaataacctaacattataacaagatattttgcaataaaatgcagctttaaaacatctgttatccaagtgaagtgatgactcacagagaaaatatttccaaaccatacatctgataaggagttaatattaaaaagatatgaggaactcaaacgacttaagagcaagaaaacaaataaccctattaaaaaatgggcaggggacctgaacagacatttctcaaaagaagacacacagatggccagcagatccatgaaaagatgctcaacatcactaatcatcagggaaatgcaaatttaaccacagtgagatatcagttcacacctgttagaatggctataataaaagagacaaacaatgaatgttggtgaaaatgtagagagaaggaaattcttatgtattgttggtagaatgtaaattgatacagccattatggaaaatagtatggcggttctttaaaagctaaaaacaggactaccatatgatccagtagtcccacttctgggtatatatccaaaggagatgaatcaatattttgaagagatatccacactcccatgttcattgtctcattattcacaatagctaagatatgcaagcaagctaagtgtctatcaatgggttaatggattaagaaaatatggtgtgtatacacaatgaaatactttcagccttagaaagaagaaaattgtcatttgtgacaacatgggtgaacctggagcatattatgctaagtgaaataaacaggcaccgaaatgccaatatcatatgagctcacttatatgtggaacccaagaaagttgaactcagacatacagagtacaatggtggttacagaggctggggacgaggggggtggatgagaaaggggtgaggttgttcaaagggtacaacattttagttagacaggaggaatgtgttttagagatctgttgcacagcatgttactatagttaataatagcagattgcgtatttcaaaattgcgaaaacagtagattttaaatgttctcaccacaaataggtatatgaggtgatggatatgttaattagcttgattttatcatgtaaaatctacaatttaaatatatatgaaaacatcacattaaaccccataaatatatacaattattatgtcaattaaaatgaattaaaataatagaaaacccccaaaaaagcatgttatccattaaaacacgaaaaaccaagagccgtcaataactgcatgtttctagtgagactacagcaatttctctgtgcacttgccagaggcttctctgacatgtggtcaccctggagcccatgcaacaccctcttattgccacagacttctgtgctcactgcatggccaatatgtgtagactaacttctgacagttttatattctcttttaaaattttccacatttgctcttgatctcattctttcttttttctgtgctataaatttctccagctctactagatcatcccaccagtgtaaaaacatgcaatagaatgtcacatataagaacaaaacacaagaatccttgctacctcatacgcctctttatcctcggtcccatttctctgctctcctgtatagcaaaacttctcagaaaagtggcgaatgttgtccccactttctcatctcctgcccctcctaaccactctaacaggtggtctgctcacaaaaactgctcttgttcaggtcattagtgatgcccacattcctgagtcccatggttctttctctgtctttatttgatttgacttctcagagtacttagactctcattcttgaagcatttgcttctctggcttttgtggtagcatgctgttctagttttcctatttcactggctgtcccattccagtctctgttgctggttcttgctcctctgctatacccctgatgtaggtgtgccccagggctggcttctgggccctcttctcttctctgtctatgctcactcccaggatctcacccatttttgtaggtttacataaatccacatgtaaatgactcccacatttatagattcagccttcatctctcctctgagctcctgaggctgaaatccagctgttcccttgacatcttaactcaggtgtctaatgagagtcttcaactgaacaggtccaaggaacttttgacttatgccatcctccagtctattcctcctcatgtcttcctttccccacaaatgacactaccatctatggtgtggctccaattccagattatactaaacagttaagggaggtgtgtggtgagaatggtggccatactcccttggggtgctgtcaccaggaccagtcttgagcccagttcagccctccttgtttagtagcatatgtctcagaacatgatatgcacggccacttccacccactgctttcacttccggccccttttcttaggagttttggtctcataatggctctagaagcagaggaactgaaggctagagtgggcaaaagtattctctctacttccaaaattatattcatgcaagagaagttgacttcctggttttctgggtagtacaatccctaggtccatatgatgtggagctggaattgtggatggggaatggtgcatttatggaaattctttcagggcagtaggtttgttccaattccattctcatttttaaaaataccatttgcttttgcctttttatttttttaaatcatcaggtggggagtgggaaagtctaaatcaaagactgtcattcagatggtattttaggctagaaatccccaatatagaaatacaaatataaacaattaggagaaatttatttatacccatgagaatggcaaaattcagaaaggtggatcataccactcttgtcactgatgagggagatggaaatttgcacgcgtacactggtgggagcataactggtacgcttattttggaagaatctagtgaagtgaaatgtgtgcctgacctataatccagcaatcccactcttgggtatatatgtcctagataaattctgaaaagatgtgtacaaagatttcattgtagtattttacttgtgatagcagggacttagaggcaacctaggtacccattccaagggaatagataaagtgtggtggagcatctatgggagggatatgcagtggagaagcgacagcctaaacacatatagcagcatggttagattttcacaacagtgttgagtaaaaaacaataggaactggatgagatttataacatattatgacttatatgttaagttaaaaacatacctaccaaacttttcctatttgatttggatatttgaatatttaagtttgtatgttaaatatgtcagagatggtacccatgctaggcagggggttgaagggggaaaaagccctgtagcatctggagtcaattcagacatagagaataataatatgtctaaaattaaagacagagatttcaaatttgagatattttccctgtaaattttagaaggttagagtttcccaaatttagatttttttttttttttaaagaactgcctttaaaccaagtttcatgccctgcttgagtaggccatgactttgtctatggcagttagagctagactctaccttttttctgctcccaaattgctccgagttgcttgtggtgtgaaaccggtatacacaatcagttgccttactttctagaggatgaaccccttaaggacagggctgcaactcagtcatcctggtgtccccatcacccagcacagtgaccagcagtgatctgtacttatttgtcacctttaattgcatcacggtgtttgtagtctttttggtgtatgtgcgtgccctggcaagaggctcatctaaggcatttccccacaaaagggcaagcctctcccacagatacagtataatactaacttccaagaacataacatgtcatatggtcacaggtataaaaacataaaatggattttcccgagtgatggccaaatttatccccacagggaggcagcatcttttctacttaagaagtacctttcggaagtgcttttcaagttaatccaatcgcaaaaacattgaatcctactaagtgccaggggacagaagtctagggggcatttccaccaagatggccagaaggctctagatcaagtggtaaacagagcgtggtatgtggagtacaatcctttcggcaataatagtcataataggaaataataaagacctacatttatagaatgctttagacctttcaaaagtactttcgtgtcaattatctcagtatggtttggtgaccaaatctcaggcagcacctgtgatcaggtagatgttttctttggaaaatgatctccagcattgggctacatattttttaggttgcatgagtgtgcgggggaaagaggcaattgtcgtatgcttccatagaaggagatgaaggagcgaagaatggaaactttcccatccctgggagtaaaaccttacatcagtgatacccaatcctgcttattgatgccccaggggtgtcttgaaattcttcaaaggaaattaattgtaattcacttcaatttttaaaatccacagatatgctgcatagcacaatgcttctgggcagggtggcccaggggaggtggactgaaagttgtgtgtgtcaaagaagctgtcaatccaccaaagaacaatagcaagctgaaactcccccaaatttgggggagtgattggtctgtgtttgaacctgcagggtaggcagaggcagaaagggttgatgttgattactgaaaaagttgaaatagctttgtgggtgaccagaatgacatcatgctctcaacagaggatgccctgcctggggccactgctattaagatgcccagcttggctggacaccatggctcactcctgtaaactcagcacttcgggaggctgcggtggatccaggctggggtaggccttggattgcctgagcccaggagttcgacaccagcctgggcaaccttgtgagagccctgtctccacaaaaaatttaaaaaaattagctgggtgtggtggctcatgcctatgatcctactcaggaagctgaggtggaaggatcgcttgagcctgggaggtcgaggctgcagtgagccatggtcatgccattgcactccagcctgggtgagagagcgagacgaccttgtttcaaaaaaaaaaaaaaaaaaaaaaaaaaaaaaaaaaaagcgcccagctcttcccaaagtctggaaaagcaggcttcctggcccctaggggctatgtcaaatctgtgttccacagtggatggcaaggcttcattttatccttatcatctttaatcggctaagttaacaattcattgctcttttttgagacaaagtcccactctgtcacccaggctggagtgcagtggcgcaatctcggctcactgcaacctccagttcccgggttcaagcaattcttctgcctcagcagaagtccagagtacctgggactacaagcgcctgccaccacacccagctaatttttgtattgttagtagagacggggtttccccatgttggtcaggatggtcttgatttcctgacctcatgatctgcctccctcagcctcccaaagtgctgggattacaggcgtgagccaccgcacctggcccaattcactgcttttaacatttgttgatgccaagaaagtgctactggaaggctgctataggtttaagaacacaatgattggtcattctttttctttcctacccagattggaaattccaagtttgctctgtcatcacatctggttaatgcagacactcgaatcactgtgtgttctagtactcagaacttaaaagtcatcatatcggatatgggagactcactgacaactgggcctcaaaggaatttatcaagcgccgcctctgcttttctcttcctgctttgctgggtttgcatgggagctgggatttgcgggcagctgtaagtgtgtttgggctggaggcaaactcttgtgtctttttagcctgattctacatagcatagtaggaaaggggccagagaaagtggctggcagtaagaaagcctctgttttgagaatgtgaagcagcctgggagagagtgagggaagaaaggaggggagccgagagttagaaaagccttaattcatttcatctgacagctcagagccagaagttgccaggtctactcatttgcaggttgtgttgtcaacacaatcacagtattttatagcccacacggaccttggactctggcatgccatgtaataggctgcaaaaagtagcagctctgcttcccatctcacttggggcatggggagaggaggattgggtttagggaggaagggtacaggtgtgaagggcacaggtatgaggtgcataggtatgagagactcaagtgtggggggcacaggtatgggggcataagtatgagggacacaggtgtgaagggcacaggtatgagggacacaggtatgagggtcagggcatgagggagacaggtgtgaggggccaggtgtgatgggcacaggtatgagggacaggtgtgagggacacaggtgtgaagggcacaggtgtaaggggcacaggtgtgggggaacatgtgtgaagggtacaggtataaggggcacaggtatgaagggaatggatgtgggggacacaggtgtgaagggcacagatgtgaaggacacagagcttcatctttgctcctcattttgttcttgcgccttctctttccagctgttacaaagtgccttccagtgggccacctccccacttcctctgttgggggcaggccagcacagcctattgcccagatggcagggtctcaaaacagcctcccagtgacctggttctataatatcctagaaggagttggaggacatgaccatgtcctggttctttgtgttcagataaactcaaaggccctcaatttcaagcccttccacatcctgtctctttcttccttccattccccagaagacagtgattggtgggtcaatgggctccataggtgatgttccaccccatgggagagaaaggatcttagtgcagctgtgcccactgtcccatacgtgggctgctccctctgcaggaagtctatctctgcagaccagccttgctgtcaggagcgccctggtcacccggcctctctggcttattgtgcaggaggggcagaattctaaaccaaggagaagaaaagcccaaatggagataagctggcccagtgcagaggggcagcataacttagtaggaagcactaggctagagtttgagtcctggctctggctttgcaaagtgtgtaagtttacacacaccactttacttttttatactcaatttctttctctgcaaactatgggaaaaaatctccactttctctactttacagaactaatataaaaatgtgtgaaagcactatgcagaatatgaaataccagatgaaagtaaggtggtggacagaactgtacagcctcaggcttctcaaccaaagatccaggtccattctgctgtctgcctccagtagatgtttgacacgaactccatagtctcaatttcaacctcatacttcatggtttctttgtctcttccctgggttttccccatggcgataagagatcagaaaatgtgctctctctttgtgtctgagatgttggagatgactaagaaaatatcttaaatgtattttgaggcctggtattctaaaacaaagcctgctgctgaggaaaactacaaagggtggtacagatttaaaaggaggcagatagcctgctgcaggcaggaccacagtcttatcacctcactacacagctataaagacacacaggttctgaggtggcatgtcctgcagcaactgtgtaaggcagggcttcttatccctgttttacagataaggtaatactgaggctttgtgagcagacagaggtctctccaatggtgaggccaggatttgatcccaggtccgtcaaactccaggatccattctcttccccctgcagcacaataaatttgattatgcatagaatgtatatgtgacagctctcatcctgtatctgcctcacagcaggacttagtgctttgatgaatcctcaaaataatttagtttcatagtacactgatgggaaatggagcttttactgaagattttctggggccagatcaagaagacattttgcattaaacatcatctaaacaaacttcctttaattccttgaattcattcttaacatctctgttcttcctaatgcttgtttctcagctctacttccaggattggttcatctattttttctcactcttttgctttgatcccttggtatctcctccattgttccaagtaattcatttccctcccgcagcataggcagggtggccgagaaaaagccctgcagttagttgagctgccttcctttgatagcaatccagtgagcatctgggttattctggcatgtccccaggtggggctgaccaaagcattcactcaacagagtaggtgtcctccaaggctaaggtggactgtgctattaaaaaaaaaaaaagatttttctttatattgtgtgatgtgggagagatggagaaggagaggtaaaagagagggtgtaaggtactggaactgctatggggggaaagggaggagggaattgacaggggacattaaaatttgaattacaggacttggtgattatctggagaagtagagaaaggaaagagaagggaggactcccaggtacttgactacagcagcagggtagagtaagatggagaattctggaagaaaaatggatttgagatgggtgagaagaagaatagtttggggaagataatttagtttctgaatgtagggcttccttgctatctacttgggaccctgcccctcctgtctgaccccagcagatgcactttttgctttagttttaggtcatctgctgattcatctgctgattcaggccagcaccagctggggagatgggagcagccagcaagctcaggagctcagaatgtgattccccagctcaccgccatgatgagtgctccgtagacaacttactctgcttggagtcccctggggttgctcccacctctggggtctcctcttccatttttcccagctgtggttcctctgtcttctctctctgtaaattttttgacttctgatctttcagaaatttctcacatctctggctcactgatggcattcatgttttccagtactagttttagatatgttcctaaacaaaacacaacaaaatggaggaaaagaaagagagatacgtactgagcctactttcttgatcaacacttctatacttatttgttttcatgtctcattccccttcatgactttgaatttcttaagggcaggaatccctttctttctgagcactaaccaattctccttttccatgcactagggaacttagtatttaggaaattctgtggctacttcttttgtaattgaaaacaaagattaaaatacaatacataatcttccaattcaagatttgttttttcatatatttccaagtcaacactattcctgagtgcctcttctgtgtttagcatgaatttaagcaaatatgtggaaaagtggaaaacatgaacacaccagatgaccctgctattccccatgcttctgggtttcagggctggagaggatgaaggataggaagtgaggatgaaggatggaagtgattctctggcctagaggaagtgccttgtgtagctggctcattggtaggtgagcttctgtcagtcctccccaacttcatgtctttgctgcatacttgtcctgtaattggtattacaccaggagtatgaggtacaacaggtgatgtagcacacaagggccttgccctcaatgaactgggtggatcagcctgacacagaggcagcagttggggagcattctaagttaagagttaaaaattgtagctcttgacagatctggtctcaagctcacctgacttgctaaattagtgattcatgcagtaagatcattcagattccaaaaagggaggcatcagtatggggagagcatcttttcacctttgcacatggctccagaatttccactggttcaaaagaatccccagcaaccccagtctcaggagataattgctcttaacagcgcaccacactgggcaccccagcacttatggacagcagaggaatgtaagggtgaatgcatgtttttttttctgcaaatgactgtcactcattcatcttggagcccacctgacaacttgctttccaggtaaaatagcatcatttttctaggctggcttcttctatgctcactagcagggctgacctcagatgtctggggcagtcttaggtaccttaccagactgtggtgttctttggggggacttccaggactgggagaggatgtggcaggggccattgttctggagtctcccaatatctgtgaggtcatcacaggggtgccatcctgcccttgcagcacagcttagattttgccttggtctgtaataaaggatgaagtgaatctctgccaaaggtcccaggcttgcttggtgccaagggtttcattctgagcacgtcagcatacagtcggcctaatggataaagctattatagattatctaattaatacagcagactgctgtttcattacaggggctatggactctgtcagtgcacaatgcgtagaggtactgccatcagtttcttgttcctggtgttggggtggctaatgtactatatgaagattcagaggcatttaaaaagatgatcaagtgccatgctgaattcatgtttacagcttcttggcttgggctcttgaaatctagaagtctttgggactgaaagcgaagaatttgtcttggttcaaatgctgtctgctcaatcccattattgccttccagcacgtgcccttggacactctcgtatcttgttgtctggttgtagagcagattttcacatgctgggagacatcatgaaatgtgccatttgtttcactgagaaagctcttctggtggctggtggggctgtggcacctactagatcactgtgttatttccagatcctgtgtttggtgtaaatggtacctggtttgtttcctatctttaaattacagtattcttaggagtgctgttcttttgaactgcacctgttggactcttcttaattcccgaagaatctgggccattgttttttaagcttgtaatattatccttcactgtagggtgatttggtaaggttgcacttccaaggttcttacattcttcccaaatgtacctcattgcacaagctgctaccaggagaaaagggtgcctggattagtctcagggttcaaatatccagaatatcaaggtttctcttaggaatagttaactgagtaaaagaaaacctgcttgttattctattttgggattttccccccctataaaaatagaactgtatttaaaagttaaatctagactgggcatggtggctcatgccttcattcccagagctttgggaggccaaggtgggaggatcatttgaagctaggaatttgagaccagctgggcaacatagcaagacctcatctctaaaaaaaaaaaagaaaaaaaaaattagccaggcatggtggtgtgcctgtagtcccagttatccaggagcctgaggtgggaggatggcttgagcccaggagttcaaggctgcagtgagatatgattgcacctctgtactccaacttgggcaacagagtgagaccatctcttaaaaagaaaaaaaaaaaaagcagttaaatctacgtatagatagtaaagtgttttagtttttctgttactgcctttacaaatgaccacaaatttagtagtttaaaaaaactccaaatttattatcttacaattctgtaaagcagagacctggtatgggcctccccaggctaaaattaaggtgtgggcagactgtgttcctttctggaggctctcagggagaacgtatttcctgctccttctggctgttggcagaagtcaagtcttgtggctgtagggtcgcagtttccttcccttgctggctgtaacctaagggctctttcatgcttctggaagctgctgcattccttggcttgtggcctcttctctccatcttcaaagccagtaatagcgggtggggtctttctcatgctctgtcttttgaactcactcttttctcttcatctctgcttttaagagctggtgtgattagataagagattatgtaattagtcagaccatgataatccatgataaatctcttcattttaaggtcagctgattagcgacctcaatgccatctgcagtcttagttcccgtaatttacaggttctggggattatgatgtagacatctttgagggggacattattctgtgtaccacatatgatttcttcattaaacacaatacatgtaatttaaattctagaggttacaatggggaggaggtaaattagctttttttgagcacctactgtatgccaaacctcatgctagatctgcacatgcatcccctcattctaacatctcaacaaccagatgagatagatactatccttgtttgatgatgagttaactgaggtttagagaaattaactaactttcctgaagtccaaaagctagtaaacgtaggagtcaggactcaagctcaggtggctaagattccaaatctgaatgtttctctttccaccacatcatattttttctcctgggatctcaactaaaagcctcagaagtaatcacttatttaaatgtatgtgtttcctccaggttcgttatagtctgtttgaagtctgagtttgacgtagatagattactcatttcccctactccagcctctgataagcagcagaccaattgtatattaccacaacctgggaaaagagagataactgataaagtgaagagactttgtctcaaggcctttggtggggctgagctctaagtcaactaagtggcttaaagtggaaccaggcatcttatccctgcagggcctcccctgggtgtgacaggtggagggcataccagtcggaaagctggtccaagcctcctctgtcctgctcatctcagctgcctgggactctgcagagaggctgcctgggactctgcagagaggctgcctttggtcaattcaagctgccccagccagcacggttgactggcacagaacggcctggagtggctgtgccaactcagtcataatgggaggagctgtgcagagaaagaccttccaggaattgagggtgcaaggagataggatggggcagatatgagcggcaagtttggtggggccattggcagggccacatctggaggcctcccattctgtgaaacaccccagcagtgtgttaattgatttattttgagtgcagtttgtttggatgtgggtagactattgatgctgtggcactttggaagctcacgtttccaagccagagatacttcatttgtgtctgaatgagaaaaatctcaagatacatgccgttccatccctgagatgcctgccacagtaccaactcatggaggctgcagttacttcagtctcatatacacatatatgtgtgctcacatacacacttttaaataatgtgatcggcttatgtcctgcttcagtattcttgctcttttcttccaatttgggtactgctctgacaggctggcagcacaccacaattctgtctttgcacattgattgacctgactctgacatatcaggattgcaaattactaacttgcttttaggccctggctcctgaggaatttataatgtctattgggatctcttctcccccttagcttctgcattgagagtcagaagtgtgcatgaagtggtgttggcttctttctgtttgtatccaggagggtgggaggccccaggagagcagacatctggggcttctttctgttgcactgccaatgcctatccacagatgaccttatgtgaaggtgctaggctgtgaattcctttgttttatttcaggaaacattgattaaacatctattttggatattcaaagacaaaaaatgaccaacttatttctcaattaaaatggcaaatgcaatatagtgttatcattgctatggggagtggttgggaaatataaggtattataggggcacaggggcacataggagggtgcctatattagtctgttttcacactgctataaagacatactgagaatgggtaatttatgaagaaaagaggtttaattgactcacagttctgcaggctatacaggaagcatggctggggaggtctcaggaaacttacaatcatggtggaaagtgaaggagaagccagcatgtcttatgtggctgcaacaggaggaagagagagagcaaagggggaagggctacacactttcaaacaaccagatttcatgagaattcactatcacaagaatagcaagggggaagtctgcccccatggtccaaccttctcccaccaggtgccctcccccaacattggggattacaattcaatatgagatttgggtggggacacagagccaaaccatatcagtgagtgcccaaccccatcttggtagtggatggtcaggaaaagcttcctttaagaactgacatacaagctaaacctaaaaacaaagtggagattttcaggtgaagggggattgtgtgtgtgtgtgtgtgtgtatgtgtgtgtgtgtgtttgtgtgtagaaggggttcaagaagaaggaaagacaagttctaggcagaatagatggcatgggaaaacacccagaggccagagataatttggcaattgagagaattagaaaccgagattatgggtggtttttagagcgcagtaatatcatggatggaggtatggggagagattagattagcaggaactaaaaaacgagataataatgtataggccaggtgcagaaatttgtgctttaaccttagggaaatgcagagctactgaacaattgtagaatagtttcatgatcaaatttggctttaaaggagatgattttagctgtgatacagagaacggcttggaggaggcaggaccagcatcagggagacccactgcagtggtcttaggtgataagagcagtagcctgacctaaggactagaatggagaaagcaggtgaatctgaaagatatttaggaattgcaaagagtaggactttgtgattgaagaataggattgagggagaggaggtggcaataagaatacccctatttctggcttaggcaactggatggtgatagtggagccattgatggctacagagacagagaaggcagcacaagtgtggaggcatggggtggaaagatgagagctgtatgggcatgtggaggtatagaaatacttctgtgctgttgacgaatagtcagcccttagcaggcactcatatattttcttccactgcctcgctcaccctaactaacccagtacctagggcattctcaagatctagaaatggaacagttactgtgtgacatagcaggaggtctcctgttctgactggttagtgcccttgccataccagatcaatatttttaacatcccttctgtggagacagttcctgtggtagggttcctgtggcagttggttgtaaaaagacaagagctgaggagaaagaggttatagccaaccaggcacggtggctcacacctgtaatcacagcattttgagaggctgaggtgggtggatcacctaaggtcaggagttcgagaccagcctggccaacatggtgaaaccccatctctactaaaaatacaaaattagccgggcatggtggcgcatgcctgtagtcccagctacttggctgaggcaggagaattcacttgaatctgggaggcagaggttgcagtgagctgagatcatgccactgcactccagtctgggcaacaagagcgaaactcagtctcaaaaaacaaagaaaaacaaaaaaaataaagtcatagctagcaatgttttatttgagagtcaccacctaaagggtaaagcctttgagtgcatgaaagtcttcaggaagagtgtagcaagaaggaagacagggcccagggctaaggaatttggactttaccctacgagaagtggggagccaataatgtattttaagcaggggcatgaggcaactggtgaggcctgcaggactaaagggagtgccagagatgtctgacaaggttgctgccctcaatgaactaattggggtaggcgagataaatgtctcttggaaagtaatggtcatgccaggtgtgatgattaagtagcaggtgtgtagcacagagagtaagggggctaattgtttcccacaaagtaacttggagcccctatggttagggccggatgagggcttagtcaatcaatttgcctttgtggtaatcctgaatagaagaggctgctccttgggtgagaagacaaatagacttttgagttccctttaaaggctagacacttggataactaggaagggttcttagtaaaagcaaatgccttttatgagactgtgcagtttacaaagccctttgatgtctgctacctcatttcattcttttaacaagtaagttagaggacattgcagagataaggaagtgaggcccagagacgttagaagttaattaataagttatggagccagtcttcatgtctgggtctttagatccaaagtttgattctttcacacttctccagtggtttgcaaactgtgttccttggagcccttcagggatgccttgggcttgcaggtgatggggaggggatgggaagcattcagggagcagggcttctgctcccagagccctacctcagccagggctctcaggaattttccagttttctatgtcagcctgttttggaaggtttcccccaaggaagcatttcccaatgtggaaaaacctactctatgctgtcttcaaggctatctctaggtaggcctgtccctaaaccctcctccgaagttggtgtgaattcctgtgcttaaccacatacaagatctagcaaaacacttcttcttttctaaccctaactcttcagctccagctccagcctattccctctggatcttgttctaggttgtctggtggttcttctcagtacaatctgtttcgtttctgccccaacaccctaccacctttttctagattcctggcactccagacactggaagaacgagtataaacatttaccagcttggatcctttcccagacatgcattgttgctgaccctgtgaccatcagctggacagttttagtgtcttcaaatcttgatggacttgtatttggacactttgtggcagtgtttttctgaaaccagtgcatctcaagtagttggatctaataattcctttgttctcagaaattgtacgttcattaaaacaatcctttgtccattaagttactttttttaaaggctacagtttgcctggatgtatccagtaggcatgagttagagattaaagacaaagggcccaggggcaaaggaaataattttgtttcctaatcatacagtgacattacaagttagcatttctgtagtttcccttgctgagaactgcctagaatttagtgataatttcctgactcacaaattgtgaaacctaggcctaagcctttctcctcttcttaaatatttattgagcacctacagtataggtgcaaagcttagctctaggctctgtaaaggatacagattttaacaaacagtttctgccttcaagggagttaatggtcccagcatgtgcctaagtaatacaaggaggaggcagggaggggtggatggagtaagtgctgagggtggcctgaaaatggaagtaatcagtttatttcagggttccaaatgagaacattagtattatgctaagtaacttctcttttatatcctgctccagaagtgtaggggttggtggcagaatcccgcagtggacagaggcccagaagccaactggacagaaggtctagcaaggagagctgaccctgataaatctagtcccagctgctggtgtggttgatgatagagagctgtgggctccagaggaattctggtgctgagacaaactcacgtatttcagttgtatgctttgcaaaatctgtttgattgccagtagctcttgagcccttagcccctgataggctggtcacccaccagatccacagcagggagaacacaggctctgcagacagagactgggtataggttactgctctctttctcactttactgtgttggttgcttaacttctcttgcctcagggttctcacagtgcagaggggaaatgatacctaccttgatgggtggttgaaagggtgggagagcgtgcagggaaagagcttggcatacagtagacactcattagatagtacctcattacttttgttatgaatccaagggcttcatggtgggatcaaggaccacagctgtggtggcctagcacagatgttgcattttactcttgtgagtggtcaggaaagccatgctgtatggtggagtgagggtctagagatcaggcccccatccccaccccgctccccagagcctccaggggaccttggacaagactcttaaccttctctgtacattattcctattcaaacactgataaaatggaagtgaaaaatcacaaccttctgaattgaaagggacctttcaatataatctacaataggtgtatttagtagaagagacagttgaggcttagacaaggtgaaatgaagctccaaaggcaaatcagggggtggccctgtcttgactcccaatataatgctccccttcacatagttgctacccaagtaggtggtggcttgagagtttgggagcattcatgaactattgcatctgaggtgcttttggctggaccacttatatcatagacaaatccatttttattagcatcattcaaggttcatagcataaaggcagcaagaaatggtagtgaaaatatgctgtcttccccctaaaccagttttaatttcttaactccctcctgccccttagttcctctaagtattttcctcctctgacctgatattcattcacttggtatttattccacatgtactaggctttgcgtactacagggacttcatagccaagacatgcaaagttgaaaagttggataaacaatacaggaaaaacaaaagtgaacaaaaatgcaaagcactatatgattaaatgttaaatgagaaatctatgcctgtggttcccaaatgctaatttatggatttgtacttgttgatgataacattttcatcagttttctgtgaaatgagaaaaatagggcaaggtgtgattatttcataaggctacatttatttaataggattttctgagattatatccttccaacattttagtgctaaaatgccctttcttttatgagatgttggagcataaatagtggtggttgaaagcccatacttaaaaaaatagaaagttggccacattatattggtttcttttgaaatttggctcatccttgaaatctaaagctaagacaaccactggtgggcacaaaagtccagagtgaaggggaggagcaatttttgaggagtggagtgctcagggagagctccaaggacaaggacaaacactgataaggaattgaaggatgagaggattcaataatgtggagaggtttggggaggcttcctcttgagaggataacgtgagaagagccttgggagcaagtgtggagggtctgttcagggcaatagggagaaaagtttggatgccttgtctttttacctgctgtgctcgtaaaaaattcacccagttgttaccacaataaaaactgatctttggctcctttcaattaaccaggtcactgtcctgaactacttgccccagtcactgaatcaatgccccagttcaccttgtattccagaactagtctttcatctgctcaaggcaaggtcaaaaacaggcatacaagagcatctgatgctcagtaactcagctccagttctgacttcttttttttcatccttgaccataatttagactcattaatgggttagatggtctttgctcattctggcctcgtttctgggccctacaccctaggccatgcccttgaatgtgtccctagctctgtgaggaggacccatgagcagtagtgtgccagatgcgtcacagaggggacttagggaatggaagaaggctcaacaggatgcatttactgggtggagagggaggaactggtggcctatgcctgtgggactgaggttcggatggttaccattgactaaaatgggaagagagcctgtttggaggagaagaatttggtttcagggatgttgagcccaggaatgggaagggagaactggtaagaaattggagggaggtgaagggaggatgaggagaaggaccaggtccatttggagtcatggtcaaggtcttctggagagagactgcatcattgctgatggtaccagtgagtgaggaggaaactgaaaagagttcagcctcacaggaaggctggaaattagtgcaggagggatgggcaggtgagtaggaggctggggaggtcacagaggacaagatgagagagtccattaacctagagaacataccatttgtgtctgtagggggtactcctgtgttctggactaggaggagttgtgtttcactatgggtgaagagcctgagggtaaggagaggctgtgcctgttctgcgaccctccatgtgatctgaggtattcccttggcacatactcagacacccacctcctttgcttggtgtcttcaatctttccatacctcctcctcagggggaagaagtccttgcttcaagtaactgactggctgcaagtcatggagagggttggggccaagggagccatctttttttacgcctccctctggggctgctaagagcagtagatctgtttgagcttatttatgtgcctggagttgagagctcatattttgcttattcaaccagcttcccacgctgccaggaaggcactaagcagcagaaattcatgttcaccctctctgtctccctctctctctcactctgtctttggtattcttcagctccaatgggagctaatatttacctgcagtgttagctgtggggccgtgggatgtggcagctggaggtggagaagacttttttctcccttcctcctccacctgtctttccctagagatttgaaaagggaaaaattgtaattttaatctttaagactgcctgtttgagatttcagatgttgttgagaaaagtcaaggggtcttgtgctcacttttctactgaaagataagtgtcttagtctgtgagcctctataataaagtaccacaaagtaagtggcttgtaacaacagaaatttattttttatagttctggaggctgggaagtccaagatcaaggcactggtagatttggtgtctggcaagggccctctgcctgatggatacctttctttccactgtaaccttacaaggtgtaaggggcaaaggatctctttggggcctcttttaaaagggcactaatctcattcatgggggctccacccttatgacctaatcacttcccaaaggccccacctcctaataccatccccgtggggggttaggatttcaacatatgaatttgggtgaacataaacattcagtccatcaaaacaaggaggaagatgagattggtgggcttttaggacatgctgcagagaagggagaaaatgtcagccaaggaatactgtcatactgttccttacaagtggagtgactcccgcgttggtgacaagagggcatggatgacagagtctgagacattactatgactggtcttacttggtgctggtcagctcggacaacttctgcagggggagcctagcagatttcatgtgctaggcacaacaagcagggctggcagccatagcttctccctacctgcagggaatgtgcataggggcaagttccctctgagcccactgcctggtgctgactcagcccaagtgcttacctgctcaccagtcaggagttgaacatatagatgaagttgaacgaatgtctgaggccaggaataggaaaaatgtctcagctcaatgtggtttgcgcatgacaaaaagagtaactggtgatatttctaagaccttggtacattcccactatgggacaggatcgtccctctccaggatgctgggggaagggacaggtgggagatggggcagggatgaaaaggagaaccttgaggccgggagtgggtggggatgttggcctgcatggattccacacaaggtctaagtccatctgtgtgtgtaagccagcgcccatagcggctggaggctcctccactcacttctccagtgccttttcctgcctttatagcagttttccagaaagtctattcctgttcttcaaactgctcttttatgctgtgtgtcatgatttctcatgccccagtttgtcctgttgttgccatggtagctggctaggggtcgtctccagttgggtgggaatatcttgctggcaggccacggaggcagaagaagatatgggtgacttcaggctggtgcttcggggactcctggtgttacagaccaccacctggctccccattcctacccctctgcatttcccacagtttcctatgcccaccagaaggcaaaaacagaggaggaaataagtgtaatatttgcctttgttacggccatttcagaaaaagcctggcaaggcatagactgcccctttcaagattgagctatggcagaactaagatgggacccttgtctgggcaagaaccgcaagggaacacttgtcccatcaacacttagaaagagaaaagaaggcagcagacagcaaggcaggatttagctgtgaaaagccacttccaagaaacacgaagataaactgaatgcccttgacacctatgagctaagcatctggcagctgggactctccatgcctatgaatatagaaacttttgtatgggcccttgacttcacttttgtgaagtttcctgtgatttgggcacactgcattattgtttgcctttctatctttcactttggtttctatcacatttgatggctacttttcacatgatacattttaaatcatttatttacccatccatccatccatccatccatccatccatccatccatccacccatccatttattcaacaaatattcaagaaataaccattgattacatactatatattatgtactgttccaactatggggagatagcagtgaacaatattgacagtctctgctctcaaggagcttacattcatctgagatagatcaataacaaatagacaagaaaatacaggatagtaaagagtggaagattaacctggggtgatgtcacagactgtgactgggtggatggtccaggaaggctctgcaaaggtagcatgtgagctgagatctgaaagccaggaagcaaccactatgggaggatggggaagaacattcctagtacagggaacaacattcccagtacagggaacaactagcttaatgccctaaggcagaagcaagattggtatgtttgagaaacctcaaggagggcagttgagataggtgagccggtgagcacttgggctgagtcagcaccaggcagcaggctctgagggaacttgccctttacacatgttcaggtagggagaagctatggctcccagccttgcttgttgttgtgtctagcacatgaactctgtgaggattcctctgtagaagctgcccacgctggccagtgccaagtaaaccagtcatagtaatgcctcagactccatcatccatgccctcttgtgcctaacactggagctactccacctgtgactggagcgatggggaaggacgtggaagatacagtcagagggttagtgtgccagacaccttacctgcaccacgtcacagccttgtggcctcaactgtttctgggacttttggctgcttgttcaggttccagttgtcactgcagtgactgaccaactccatgcatgtaaaacccgacagcacttcacctcatgaaggtgtacctcccacctcttaccctggagcttccctattgacaccaactcacgagatgcacaggactctcctgggcaactggaaggtggagaggaaattaactccctgagtgatgaacatttgatcagtgagagattgagcagatgaattcttctctgtcttctgatggactgtcctgaggcacagttgtcttttaccaatggccagctaggtaatgcaccatcatattggctctccctccttgcctgccttacttcccttttccctcactcctgcttccttgcgtttgcataccttaataaaggcacctgaacccttgcctcaggctctgctttctgggggaaaccacacttagacggagaggcaggcaccagctgatatagggcctggtaggacatgataaggaatttacatttcattttgagaattaggggaggttattagagaatactgaactggagaatgatatggtctgttagacttttaaaaaagctgactctggttgcagtttggagaatagattgaaggaaggcaggatgagcagtgggcaggctactatcacagttcaggggagagatggatgatggcatgaaccagagtgggagcagtggtggtcatgagcctgtgtgtttgtgaagggcaaccataagacaaggctgtactgagaagcatactgggtagtgggccaggaacaggacccacacctttgcacagcagctgttatggttgaaattcaaatatgtggttcagcaagacaacaaattacaacctaccaaggaccttcatcacctgttgaacatagagagacttcagctggggagaactgaagacctttacagaaacctcaggacatttttattcaaacccatccatggagttccctcaggaggaaggagcttgggttcagctcctagttgaatcaagtaactctccgccttcatctgtttaattcatttacacttagagtagtatttcttttgcagaaagggatgcatggctaaaaatgtactactgcttccattaatgaaaattaatttagcttaataagatgagtctgaatcttggattctgccagccctgagtttgaattctagtttgacccgtttctaggtatgtggcctttaagtttctcatctgcaatatgggaattaacactaacttcctggagttgtgagagttaaatgatttgggtgtataaaatatctgatacatgctctttataccctctttactccactcatagtaaataaatcctgtgggaagctgaagtacggtggggattgaattgaggtgggtgcaaccttagccctcacctggtagacttccttctagagtttaacctggagatactggagcttttgccattaagggaggtaacagatcattacaaaacattcctctggagttattcaggagactagaactgagccctttcttttgagagggtcaaaacagtatcggtttatgaatgactatgatagtacccctgtgagatagtttaaaagaagtgttgggccgggcgcagtggctcacgcctgtaatcccagcactttgggaggccgaggcgggcggatcacgaggtcaggagatcgagaccatcctggctaacacggtgaaaccccctctctactaaaaatacaaaaaattagccgggcgtggtggcgggcgcctgtagacccagctactcgggaggctgaggcaggagaatggcatcaacttgggaggcggagcttgcagtgagccgagattgcaccactgcactccagcctgggcgacagagcaagactccatctcaaaaaaaaaaaaaaaaaaaaaagtgttgttcaatccattttatagatgatagtttctaatacttcaggcagttgtgccttccctctgcaatcaaactctggggcatttttccccttgatgctgtcttcttcacttgctcaaccaaaaataccagctcttgcagaataaatcatcaatttctgagggtggctgatgtgaacaactcatatgaatctcaggcccatcttagatttttttttttttgggaaattacaaaagtattttacatttgttatagaaaatatggaaaagcatatggaagaaaatgaaaattatccgtaatgccatcatgtacaactgatcgttaataatggataaatatccttctaggcttttttttccctacacacatacctgtatgtatattcacacacatacatatacccacatacagcttattatactaatggggattatagggtgcacatcttgcttttgtaaccagctttactgattaataatatattatgaacagtgtactgtgtcattaaatatagttttaccatgtgattttgaataattgcaagaattctcttatgtgattcttatgatttgataacaagttccttattgtttttcacttacaatacaaaaagattgtagtttttaatattcaaatgaacaatccaatgaccagttttataaatgcatcttcatgtgcaagtctaatgacctgataaggagaaattcctaggattagaattattggggcataggctgtgcacatatttatgactcttgagaagtattgccctacctccttcaggaaaggttgtgctaattccaacctcacccacagtgaatgagattgcactcatctttgccaactctgggtatttcagttagtaagaatgtctcttgaacttctcctaaacacagtttaattatgatatatttcgaacatttgtatagaaaacaagagacacccacgtacccactaccaagattaaatacataataatatttgccatatttgcttcatccctctcccattttcaaataaatacaatgttacagatgcattttgtatgctcattctttgttccttgctccggaagtcatcactcctctgagattgatatttcattaccatgtgcatttttgtaattttactacatgtgcatttatgaaaaagcatgtatatgaattttttgagttttaaagttttatttacgtgatacatagaatgtgtccttttgcagcaaaatgaacatttgtttttaagatttaccagtattattacatgcatactgagttcattatttcactttctgcatagaactccattgtataaataaatcacaggttcttaattcgcttcccttctgaggggaggctaggttgctataattttttgttattacagataaaatgatcatcttgtccatgtctcttgggtgcatgtgtgagattttctctgggaaagatacctaaaagtggaattgctgagtttaggaatacacatttccaacttttattaggtacagtagttcccccttatctgcaggggataagacccccagtggatgcctcaaactgtggatagtaccaaatcttataaatgctatatttttcctacacatacatacctatgataaagtttaatttataaattagacacaggaagagatgaataataactattaataaaatagaacaattatgtgatatactgtaatgaaagctattcacataacttatatgggctctctctccctctctaaaattatcttaatatttttggactctggttgactgagggtaatggaaagtgaaactgtggataaggtggggactactgtattatctaacacattgcttttcagagtgaatgtgtcatttccactctgcatatcatatgcagcactcccatttctatatatcttcaacatcacttgagatgttcagaattattaaagtgtgccaatctgatgggtgtgaaatggaatccaattattgcattaattgcactttccctgattactaatgaaattgagcactgaacatatgtttgttggccatttggatttcctcttgtgtgaactgtagattcctatcctctgcccatatttctatgaggtagtatgtgtttttcttatgatttctgagaatcttgtatatgttctagatagaattcgtgagttgtcagtatcttctcccccacatgacttgtctttttcactttgtttatggtgctttttgtcatacagagttattaattttagtgtggtaaaatgtatctgcatttttttgatgatttttgttcatcttctctcattaaaaaattccttccacatactgagataaaaaagaagtcatttatattttttaaataacattttttacagttttgcatatcacatttggctcttttaatctatctggaattaatttttgtgtatagtgtgaggtgggctctaattttatctattttttctctgctatgattagtcctttgactcaacaccatttagtgagtaggcaattcttatctgctgtttctgggcactttattttattccactggtctatttgtatatccctctcacccatgtctcactaatttagtttttataactttgtagttttggtatattaattctccccaaattgtcttggctattggctctttattcatcatatgatttttaggatcaccttgtcacatttcactaaaaagattagattttaattgaaatggaataaatggatagattaacctaagggagccttgccatatttaagctacttcgttttttgttttttttttagtccctgggcatgacttatttcttcttatgtttagagctttcttaaagtccctcaagagagttgaaaatttttctttacatctttaattgggtttgtttttaggtaccttatggttttgttgcttttgcatggtgtcttcttatcattactttttctgagtctttgttttaggtgtaccagaacttgtacttttgtacactgatttcatgtccaccatctttgtagaattctcttactactgtgagtggctttttttttttttttgtaggcaactcttatattttggatgcaggcagcatcacctgtgaataatgataactttgttttttcctttataatccatatgccttttctttctttttctttacttattacattaaccagtacttcaagtccaatactgaatagaaagagtttcagtgggtgtcctagactgatacttcactttacagctatgtcttgacttagtccgtgttccctgtgaacaccaccttacctctgaccatcctgcccactttacgtggcattgttgattagtaatttagttccttttttgtgtatgtattcataaattagacattatatatatataaataaaattgtcattatatccactaatatcttttgctcctcacaccattttcttgcagaccattcttttcttccatttaaatttcctccccaagaaatgtcttatagtacttatttcccctgaacttgtatagtaaactctctattttcctggaaaagtctttatttcgagtcataatttagctattttcaacacttgatgatattattctatcactttctggcctggcctctattattataattaataatctaattgctgcttcttgtaggtaatctgtctttcctctcaggatgcttttaagattttttccttcatatttttggatcttttgatatttcactagaatatgtgtgtataggttgaatttatttttatttatcctccttagaattcattgaatttcttgacttggaggatttatatctttcatcaatactagaaaatttatcctacagatcttcaaatattgtctttctgcagtctctatgatctctttatagaagtcccattagatatattttgggtctcttcattctgtcttccatgtctgttaactttaatcatattttctctatttttatctccctgggctgtatactgtggagtttcctcatatgtgttttcctgtttactgacactctccttagttatatataatctaatagttaacctatctattgcctttaatttcaatgattatatattttattacaagaaattttgtatttgccactttttcaaattatctttttttcatttcattgcattctattattttatttctttacatatcttttctattatttcaagtactggagctttaatcttcttgttctttgtattagctaacttatccttatgctgattatttccttgtgtgcttcaaaaattttgattacaagtcatgtttagtagtgcttgttttccccatggaaatgcagtgtactcaggattgtgagagtagcctaatagagtagttttgtttggttttcttacttgacccaggggtgttattttcttggcctaagtgttcctgaatcccgctgaacatgtaaattcagcccataaatccatgtcacacacaatcctgagttttgatttctcagggttttgctttttctcattcactcagagacagaagcttccttgttatctatttttgctgtagagttgattttcatgcagtttatttaactgaaggtacagttctttaagggttatagcttagcgcagaatcttagttccaacttctgtccacataaggtctaaagaccttatcacttctcttgagtggacattaaaacttacccattaggctgggcatggtggctcatgcctataatcccagcactttgggaggccaaggctggtggatcacttgaagccaggagtttgagaacagcctggccaacatggcaaaaccatatttctacttaaaaaaaaaaaaaaattaagccttgtgtgggtggcgtgtgcctgtggtcccagctactcaggaggctgagacatgagaatcgcttgagtttgggaggtggtggttgcagtgaactgagatggggccactgtactccagcttgggtgaaagagcgagactctgtcttaaacaaaacaaaacaaaaaataaaacaaagcaaagcaaagcaaaacaaaacaaaacacataaaaaacccaacccattaaatctttgttaccaggactagttactgcctatgggacagctgcaatttcaattcacacgcttcctcctttgtatttcaattcctcctagggatttccttttatatctttcaagttcagcaatatatcttttcaaatatatttgaaaatatatttctgtactttatcagtttttctagaaatgtgtagcaagagattttcttattctgccatctttctagtactgaatccttgaatgacttttacaaagagaataaaataggaaagcataaaatagtccctgggaaatacacacagtcctctaagacttgaaactagatgttcctaatggagaggttagtaagagtgccggacacagcacaggggaagatttgaggaaggaagtgggtgagaaacagcagtgcattaatgggcaattactttctgccccctcagatggtacgtgagtgcttagctaatggcagttcacttagaaaagtgatcattggtaagtccttaccagcagctcccaaaaatatcttgcctgaagtgatcgagcctttttaggaaacgaaagatcagattcagaaagcaaggagatggttctcaaattctagtgaagacaaattctagaagaaaagctttcaaagggtgttgttgaccagagaagctgaaggattcaagctttcttgtagctttataaataagaagggaaagaaaacagaatgaaaagcaggggatgagggtacacagggttgagttgaaagcatgagtgtaggagttttcactgcagacatagctgatttgagggggaaacattgttttgcagggcttgtgaccaaatttcttaggatccaaagtgtcaggagaaatcctatttatttgaaatctagttgataagccttaagctgattatgtcaggttgaggtcactttttcttttcagcttgggttgtcccttcagactctgctgtcccttcagtttcttttatcttaaggcatggagccctgtgcaggcctatgagaccatcagaaaaatagaggtgcagctctgagttcactccaactctcaaaggctgtgacttactagatatgagggagaaaatgaaagtgtacatagtgaggcaaatgcattccactggggttcctgcattcctggtcatgatgttgatgagtcctatgagctagagcaatctatttaattattctacaccaggagtctcaactgggaggtgatttgggccccaagggtcatttagcaatgtttggaaacatttttgattgtcacagctgagtgggggaagtatatctggtgtctagtggctacaggccagggatgctgctgaatatcctacagtgcaagggcatcccctatgacaaagaattatgtgactcagaaatgccaataatgctgagcttaagacacccttctctacatgtcttttcttatctgcaacatggaggggttagaagaagaggttgatgtgtgtggctagattaggttattacccatctgtctaacagagagcacttcaacccacatcacatctctagatacatggaggaaatgaaattagttgaaaatgttccccaattttctaccaaagaacaaaatattgtactcgagatgtgagctttgcaggttcacggtgaccactgtgtctgcctccacgcattgggtcattggtcttgtcatgttaggtttgcgagttgcacttgcacctgtgaagggaaggttgaggacaggcttccttgagctgaactgattgtctccagaatggttttatcagctgtagcttctcccacagcaccttcccaacatggtgcagatcctaaggagtccatgtcctgcttgtgtccatttggctttgtttatagtttccattcatttatttatgcatttattcattcatttaataaacatgtattcagagtccactagacataaggcagtgcattagttactatggagaatgcaaagatgaatgagccaagccccttgtagtatagtggggagccaagatgtgtacaccacagtatctgaggcagggtgacataaagtgccagcagtactcagaggagagagagatcacttttgtcatatgaccacaaattgcttcataagggaggtagcatatgggctgggcttttaagtctaaataattttttggcaggtggctatggaagaaggggtaaggaagggagaaagaaaatgagaaatgatatggaggaggtcaattacaaggtgttctcagggaagggttaacagtcctgcttcattggagcagtagtaggagatattgctaggagcataatggcaggtaataaggacttagactggatgacatttaagttttctttcaaccctaagatgataagatcttatgattggatagttatatttgataggcactagaaaactcattcattcattcaacaacaacaaaaaatttattaaaattttttttttaaccagatactgttctaggcattggggatacaacattgtacaagcgcttcaattttattgcactgaaaggtgagatagggtcagagttgagctgtgcaatgaatttttgtggtagaacctggaagaggaagatggatgaggagactctgcccatctcctgaatggaaggtaatactgactcgaggggtggtggtgcaaatggcaaggacaggaagactgtgactgtggcatagagagaaaaatgacagggcttggggaatgcttgttgtgggagttggagtcaaggatgcagccaaagttttgtgcccgagttagggggagactgcaatgctgcaaacagcattagagacctaggagggagctggtttgtagagaaagaggatgagtttgcttttaaacaaactgattcatggtgctgtcaggtcatccaggtggaggtgcccatttgagccatggtgaatatagtaccagacaacaacaaaaacaaaaaccaacaaaaaacagagccgaagataaaggtttggaagtcttctggatattagctttatttgaagccatccatatggatgagatcactgagagagtgcatacatagtgaagaaggcagacaccgggatctgaggaatgttcacatttaggaggcaggagaaggaaaggtgaagaagatgaaggagcagttagggaggtagaaggaggagtttggaaatgctcctgagggaggcaggaagaggaaagccaattcatgctgagtcccaatatataagaatgtgtgcacaccctaatagcctccagggaaacagactttggggtgaaaaaattccctggaacatatttagctgtaaaagtgttgagccaccttatcatgttatcacttcttagtgcttcagccagagggtgaggagggagggggagtggaggaggctttccagtgagtcatccctcctgcatgttaggagttttggttaaaagatttacagagagagagagtgagagagagagagtgagagagagagagcgtgagagaaagaaagagagcaagaaagcgagagagagagcacgagagcacacaagtgagcgtgagcgagctgcttgatttattttaattttttttagagatggagtctctaaaatatttttttttttatagataggatctctgtcacccaggttggagtgtagtgctgtgatcacagctcactgcagccttgaactcctgggttcaagcattcctcccatctcagcctcttgagtagctgggattataggcatgtgccaaaacacttggctaatttatttttatttttatttcttgtagaggcagattctctatgttctctatgttctctattctctctatgttgcccaggctgatctcaaactcctggctttgggtgatcctcccatctcggcttcccaaagtgctgggattacaggcgtgaactgccacatctggccttgatttattttctaataggttcctagggcactgtggcaacaatgccttttcccctgagaggtatataaccaaggagaggacatttggggaccttctatgattgatttttgtctgtgccatcttgttccccatagccttgatggccaagtggctatgtggggatctgtagttcacacaaagcctacagttcccaggtaaagggactttttatcttttcacctttggccatggcttggaggaagctttgggcctactgcttggctcttatcaagtcctgagtgaccccctgctcttctacgctaggcccttgaaactctcctcaactagtcttaagttccaggctacaatttctccttcagcttgtctcttgcaataaggttgtcttggtctgtttttgctcctataacaaaatactctagaacgggtaatttataaacagcataaacttatttctcacagttacggagcctgggaagtcaaagatcaaagtgctggcaggttaaatgtctgtcgaggacacggtctctgctttcttgaatgctgcttcctccagagtagctgatggcagtatcctcacatggcagacagctgatggacaaaaagggcctagctacttctctccagcccttttataaaacactaatcccatccataagattagccctgatggcttaatcatgtcctaaagactttacctcttaatacttctgcattggggattaagttttaacatgaaatttgaaggtgatgcaaacattcaaaccatagcaaagggcagtagtaagatgtagtctctggcatttggcaggcccaggctccaagtgtagttctgtgtgatcttagtgtaggaacttagtttctctgatctttattcgccttatttgggaaatggttgaagctaaccatacctatgttgtaggattcttgtgcagatcaacgaggcaacacatatatagtgcttcagccttccacagatgttggttactgttgctgctttgaagagtttctttgattttttttttaacttaatactcttttggttgagttgctttcagaatttctttcccttttctcccaatgtttttcaattaagaaaaaaatgtaattaatttgaagaaaattataacctaacacctcttagccaacttctgtgcggctcttggggaaataaagggccgtgaatgctttgattatagtgatataattcccttttggaaataagtttgtttttttacatcatctataatgcctggtgtctgtccctgcaaatataacaataataccacccacagtggtgtgacactctgtgtttacaaagaattttcatacatatcaacaatctcagtatcattctgtaaactgggtctttcaccctcagtgaaagtaatcccttttctgatatcaccacctcataaaggtatctgcaccctcatgttcattgcagcattatttacaataactaggatatggaaaaaacaaaatgttcatcgatggatgaatggataaagaaaatgtggtgtatgtagacacacacacacaatggatttttattctgctgtaaaaaagaagtagatcctgccatttgccccaacatggatggacctggaggacattatgctaagtgaaatacacacagcatgatctcacatatgtagaatgaaaaagggaatgaaacagtggttagcaccagtgggtggggggtggggactggaggaggaagtagggagacgtaggtcaaaggatacaaagtaggtatgtaggatgaatgagtctagagatctaatgtggggcatgtggaataaaattaataaaattgtattgtattagagacttgtgttaaataagtagatatcagctgctcttgttacaaaaaaagtaactatgtgagataatggatgttaatcttcttcactgtagtaaccatcttactatctatatgtatccgataacatcctgttgtaaatctcaaatgtacacaataaaatttattttttaaaaaaggaagttgtcttttgacatcacctataatgcctggtatctgtacctgtaaatataatagtaataccacctacagtggcatgacaccgagtttacaaagcattttaatacacatctctaccatctcaacatcattctgtgagctgggtctttcagccccagtgagctggtgactgtcttcaggttttagatgcacgcgtgcgtgtgtgtgcgcgcgcacttgaggtattgcttcttttaacacaaaaagctgaagtttcaaagcaggtggggtgtgggttaaacaccgttctaaatggcaggcctgctgttcatggggagggagagtggcctgaaagtttaaaaataacctgaacattatagactcctgtgaattctacagcccagagcactgtgagtctgtgggtgttttacctgctggagtgcaggcaggaaaactagttgagatgcaggaggatttaaattcgctgagtcctttagtggcatgggctggcagcagaagtatttgtgaaaaaaaattaaagccagaactaatgatcaggatcgatgttcctgaatggtaggaacagtgctaccctttgatttgctgaacaccgcatagtatttgtatcgccggtgcagcagacccttgttttctatgactgaacaactatccttcccccttgctccctgaactcccttactgacctctccagagtttggctgataccttttgcagatagctaactgaggctggcctaccagggagctcagggttgggacattttggatagacttagccattcattgaaaaacaagtaaatggtgtaaaaccatgctaattatgcataaattatgggcaatagcataccctttgaattttgagagttttgaagggttgaaataatttttgaattagcactcagttcttgatctgactcctgttgctctgggatattgcaatgcaaaatgacagcagcagtaggaggagcaggttgggctacgaatgtatcatcacatttggtttatcagtagccccatgcgattcagagggcaggtactacttttgccatttttgcatgtaaggatataaacccaaccaggactgaggtgcaagcctcctggtgttgtttccaccctgataactcatttattctgaggcccttcggcaccatctgtagagtctggatatattcttgcctcttggaactgtagaatcatcatgaaatctctattctctagctcaaatttctattaatgatatcagcgagatgaattaaagtggctaagataatgggttttgaagtcagggtgacctaggattgatcttttgctatgtcacccaccacctatgtgaccatcagggaagttacttagttcctttcagtcttgcttctcttcctgtaaaatggggtttataatagcacttgccacatgggcttattttgagaaataaggaaagtgaatctggttagcatggagccttgcacattgtaagtatttaatacctaggacaaataatattataaacagcatcacctatacttttctttgtaattattctttatttgtttgatccatgtccatttttcttttttttacagctccagaatttgcaatatgaaaatagagattatttaaacaaaggaaagtagcataactggaaactttgaattattctattaatacttgactacatatggaagaatattattgaaaaatatgatccagtgatggggtggttttgtgaaaaaatacaagcctttaaaggaaaaagctaaatcttgagtgcatgtatatgtgtgtgtccaaggagttggcttgtcagtggtgttaggaggatttcagaaattctctcttgattgagaattacatttccacctttccaatttgtaaactgcacattaggaatattcagaaacctgcaaaagagcctgtaattcttcacatttgaatgtactgtattaagcctgtctgaaaacttcccgtagcatgggaagataacctgcatgtttgtacacttggctggcagaacgtgagatcacatcagaatctagtgcatgtctttgcaaacgtgtgtgtcattttcatatgtaattcttcataagagaaataggcatgatgacatttgcctttttgtaaagaagagatagaacgaattaatactgtagttgatatgggttttttttgaagcaggactttattatcttatgtttaattttctgtggaaagggatctcaaaatattctttaggtggggagctgtttccttttaataactgattccccagatcttatttcaactccgtttctaagagcaagaaatattcctcataagacaatgaaccctattgtttaatgattgataagatggtgcttgggcagttagtgtgctggagaagttacccctgagttagaggcacttaatttcctacaagggaagtaaatacccctttttgatatatatttattcctgtttatatcatctgggttgatgtccactcaactcacaagaaacagctgggaacacctggcagcagagagaggcttctagtcagagctagaatgtgttaggggaagggtagctcctcagacagggcccagatacctgattgatgcccaagctctttttcaccaataacagttgcaggagatccatgcattcagtgacaatttattttgcaaaggcttgctatgaggataacataatgcaggcactctaggtaaaagaacaaagagaaagatatgtcctctactcctgagaagcttacaccatagttgaggagacaaggcatacataattgaaaaactaaatatgaatataatggcaaagttacagttatgacaatatcagtgataaaacagtactatgaacgatacagaaattctgtgagtttataggaggtacaggtcagtgttggagagattatgaaaggctttgtgggagagcagatttgaactggaccatgcatagaaggatgcctaggagtgggagaagcagaaaagaggaagaatatttttggggcagtgtgaagcaggcgctgtgagcagggctttgaggcaggaatgggcatgacacgtttgtttatgtacctcatactatggtacgtgaggagatagtgttggaaagataggttgaattctgattgccttgaattgtcaggctaaggtgtctggccattttataggcagtggggagccaccgaagtgatgacaatgtaacatgcatagcaactggcattttgggagggggagcttgctttgaaggatttacaatgacgtcacttttacacatattgagtctggggatgagggacaatccatatgcagctacccctaacttcattggacacctgggtctggaaatgaggcgaaaggtgaggtctaggagctagatgtggtgtggagggggtagttgaaatggcaggtaaggatataatcttgaagggagagaagtcagacagaggaaaggggttggggacagacccatgggtgccctacaggtgagagcagtaagaggaagagaaggaaacggtgagaaactgggagatgtggtggctgggatgccaagaacgatgacctctgaggagagggggaggtcagtggtgtcaaatgctgcagagtggtcaagtaggagggtaaaaaaagggaccatcaggggttcagtggtagtcttagagcaatttctgtggagtggaaggggcagagctagtaaatggcctgcccaggtatatatttcaaaactggccttaagtccatatcatatgggaatgccttcttccctttgattattttatactaggtgggtgtaaccagctgctcagtgtaggagagagtgggagagagagggtgtggtgatggacaggtggtggcttaatctgctgatgattccaacacaaagggttcttggagaggcaggattggtgggtgcagtggaatcttattctctttctctgggccttcagggcccctttaggcttgactgcagctgtgagctgcattttctgttactgcggcattatcttcaagagtgaaatgtagggagtggatcaagaccaggcaagacacgaatccaacctgggcaccttctcctaggcactgcctcctttgggctagcccctgacatgatacctgacacgtggaaggtgctcactgcatgtctgctaaatgaaccaatcggcctgagcccacccgggctgaacgagctttgcaaggtgtgggctgtgttgtgttttctgagtcaagaggccgtgggggtggatggatggatgtgctcctgccggttgttctcaccctctgctcacccccatcagtgggagctggggcgctgctgagtcctcctgctgcactttgccttggctgagcagcaaggttgggccctgagggtgggaagggaggtagacagtgatgggcatgggatcctttgctgtctggggctaaactccgaacctccaaatcaactttcccaataaagcttaatatctattagggtaagcatatttttggcttttctctgggctgaaaggtgacctcatcttatgggaaagaaaggcttgaagtggtaatgctataatcttcgtgatcctagatacattgaaagaaaataaaaatgctgatttactaattaactccatgcatcttgtgtactgcccccctccccaccccccaaaacatcctaaacattcatgctgcaggctgctgctccatgcctccaataaactagctcttcaaagagatctcttttgtattcttcccttttccagctgcctccagtgggaggggatggctccctgctctgttgtctcccagtactctcctgtggtgcactccacatcccgccttgtattcgagccctttgtgggtatgttttcccttctcctcttttgaactgtaagtttttagaggctatgactgtgtctaatttatctctgagccccagaatccctgagaacaatgtgtggctcatcaaaggggattaatgagtatttgttaaatgggtttatgaattcatgaataagtaaacaaacacacagctctctcaggtatcatggcctttgggtctccagacactggtctctactatttttttttccttttttcctccattcctctttctgacctgatctcaggcacttacatgtctctgctcctctgtccatcccccgcacaacagagtgtgttcatccctggctgcacttctgaagttggctttcagaaacagagtctgtagacatgcagtgtttccagtgtgttaccgtggtcacagctactgaaggtgaaatgtacataacaagtacttacgtagcacatacttattgtgtgcaaggtactgatctaagagctttatgcatataaactaacttaattttcacaacagcccagtggagcagaatggtattattcttaacaattaaaccctctgggagactctctggttcaaggtcatgccttacctctctaaagctcaagatcctgcctataacttgactcttaagcaaggaaaatattattttgacatgcagtatgttaataatggtcacatattgtgaagaatcctgtccttattattaggagatccagctctgctatttcctagctctgtgcacttggacaagtccctgactctctgggtgttcagataacaggatgtgcctcacagtccttctgcaaagatgcaatgagaaaacattacggttggcacccaggaagtgatgggttgtcataaatgaatggtttttaaaacactttaaaaccaactttgctgacctgtggttagctgatagcatgttggagtgtggggcttctcaggcttaggtttgagagatgctgattctagggacggacattacataaggatgtgaagttatgttttcacccaagtaagggctgtgaggtattgtgaaagccaccagactcccaagatgtctgcattgccataatgctcctctgctccactatgcatttgcacatggtctcctgccaacttttttcttaagaacccactcccaaatcctctctgcattatgttccttagagcactgctttgcataagagtctatttcttggaaaagctcaacggaggaaaaatagaacaaaaggggctctgataacttaagcataagctatctgagtgtaactggcagggtgggggaagatgaaggagcaggcctggtgggaggggcacaggccatttggatgaagcccacattcacagacttctcagtgatgggtgaaaaatctcttatgaagatggcccaaggcctgacagatctgggaagagcttaagaatgagggtaataggccaactgcttctccaactttgccactcatgtccatctgtcttagtacaaactcccacaggctgcctgatctggggcagtgtggacaccttgttttctgccttttccagaagaggctggagggactacctaccagtccccttcacacctgattgcagctcgatgatacactgcagtagaggggctgcaggataaatgctttgaaatgtaatagtcttcatgggctttataaagtaggaaagttttccacttgcttccttagctcctgttgggtttccactttgcaggtcattgctttcagaaaaacatgtggagcatttggtaaccccatcttaacttgggagggtgtgtgtggggctgcactttccaactactgtgagatgggctggctgcattgtggtgaaatttagtacctcaacaaagtcccataggggagtagagggctgttgacaagaggtcagagcctaggaatatctaagctctgaggcatggtgcatggggtgctgggctgccaagcactcgtgctcagtgaccagtagatggtgctctgacaacaggaaaatacagttactgtccctctgagactggaaagggattttcagatggtcttcagactggtttccaatcagagttatgactaattgctgattttccacatttccatttgtggatccttaataggacagtggaactcggggcactggaaggagaatgcccaccaaattcccatatgaagaaattcccatatgaagtcatgcaataccgcatgactacagtattctggtcatgaactttttctgaggatcctcctggatattgagggcatggtgccaggaacacttggcctctgatcaaattcaatttgaggatggtaagcatagcatttccataggcttagtgtcattgtatagtttcttctcttgataaacaatttagaattaccctattgctgtcctgaagggcagcatgggttttagaaagagccgcagattggaagtcagatgtgttagaagtccacactctgccgcttatcagatgtgggcaaacggcttaacgttgctgaaactctgctgctttgtctgtcaagggtcgtgatacatgtgttaccaggctcacctcagaagtttggagtcaggctcagctgtggggcttatgtaaactgaaaactattaaacacatgtattattcaaccattaaaattgtagccactggcggggcgcaatggctcatgctagcactttgggaggctgaggcaggtggattgcttgagcctaggagttgccagctaggacaacatagtgagaccgtcgtctctataaaaaaaaataaaaacaacaactgtagctgccttgggggctggtagaatgggggattagagagtatgaaaccagtatagaaattcatagatctcaaagctctcaagagctatgacagccaggtgggggtggaagatgagagtctgtcttcctgctagcactgctgcccttaggccaagtctcttcacaaagccatttatgccattatgtttgcccctttcctttttggctgcaccctccaagaattatcccttttaactcacataggtgctgaaactccctaaggtattccacattaattcccaacctatgcatttatgattcctgtctccttggaaggcaagaaggcagatatcaactccagtgtgtcgtcgcatttgcacatgtagtatcccatcttgagtattctaggtctctgaagaattacaacagccaaagagaatacaggacgtggaatactggatctctgctgacatctgataacactgaagagacaagtcggggatctctgatgttccaagaactaagtctgggaagtaaaaggctagtgagccctgcttattctgggcattgagaaggtatgccgccagcctgctgaggcagaaccacaaaggaaaggggtgaggtgacagcatgagagtgaagttcatgaagctttctggcctgcaaggttatacaatctagtataatctagtgtaaaaagctacatgatttatgtcatcacccatcttgttcattatagtatcctcagtgcctaaaacagtgcctggcacctggaagggactcaaagatacttctctaatgatttgaatgaattttgtgctatggattatggtactgtctgaaaggagcgacatacacttaataatttctgaaagccctttttctaaccctatgtagtttacagggataccgagatagccacttgggactagttctaagtgactggctgatgggacttcatggttcacagcaccaccctccctccgtttcacgactgactaggtattcagacagaagaggaccctctgattaaagcaggaggaaggacagagtaaggcagtaatgtgaaatcaaagtaacaattacagctgactcaccttgaatagtaatttcacctgaaatgggctcccctgaatccaaaggtcaaatgccttccccaagggcagcaggctggacatgttgagaccattcctttggatttccagtagagaattttcctacacacacacacacacacacacacacacacacacactctcacatacattctcacacaacagacacatgtcagtgctcacagggccttgcccacagacagacacatacccgtagaaacacacatgccatgcactcagacatcacctcacttctcaacagttaatctcacttcacaggcgtgaagccatactcacccatggtttccaacctctgggctttggtcagtgtctgtttccttcctcagcccctcctttccttcttcccttccattgttcgggttggaaggatttggagaggcctatgtgttgagccaaggcaggaaaacacagaagacggtgtgccccagctagtgtggacatgggaggggacagctggtccctgccctcagttcaaaccaccagtcacctgtggggaagggcttggcggctaaacaggagctctttccctggggcttggagtccacctttcccacctctgcagctcagataccaattctatttttttttttttctacattaatgggttgggtttgagaaagtccgtggagcttatttgggagtaaaggatggggggcgggaggatccttctgattgttcgcatttcgagaagggtagttttagcccataactcaccatggagggcccttccaggagacgtcgggcagggctttcctacagcggaaccgggaggccgccccgtgagggcagaagctcccgccaggagccagcaccaccagcagagtgtggaacccccagaggtcctagcctcctccacggggcctcccaggtgctaagtggggagatggggagagggttctgccctctacttggaaatgcctggccgtgttcgtggagcctgggaggtgcggaggagcggcgacgcggccatggcgctaggcgcgcaaaggccccgacaccttactagggcggcggcgggcccgtggcaccgctcccggcaccgaacagggcacagcactggggacacctctctgcagggacccaagacgcgcgtgcgtgtgcgccccacgccaggccctcgctctcttgcggagactccgccgcatcgctggctgcacctgcctctctcttctcggcattacttgggggaaaggggactcttcactggacctttgcagaggtggctgctaccctttggccacataaatcaagaaggcaagccagcctcaccttccaggaacctccagccttccggctgcgtccccgcccctcccgcctggccagctcctcccccgcttctcccagcgctcttgcgcgcctcgctgcgcctctgcgcgccgctcgctgtcctctgcctcgcctccccattctccttccgcatcttctccagtgctccgccgagggcgctgcctgcggggaagagggagactgagccgttagtgaggaagttcggtctgtggacaagtgtggtgccaggccgccgcgaggctcggctgcaacctgttcctcgcccgccggtgctcgccgcccgcccgctcgcactcccgccctctcggcggcgcagccgcggatcgctgttgcatgctgatccggggaggcggcggtggcgagcgctccgggcggatgctggcactcaggcttcgctgctctctggatgctgctcaacttctagcccaagcgcaggagctttgaagtcatttgtcccttttcgcttggatcgacttcttattttgagattttgggcattgcggtttacgcaggaacctcaatatcgctctccccacctccctccctctttctccaacctttggatgcgtctctgctggcagatataaagacccaagtcttcgcggtggaatttcttagatggacttgcaggggctggcgttataaagcatgtcatcgtaaccccgtcctcgtctttgtttatttttttttaaagttcttttgttttcattttcccctccttcccaccccttcccccaaccaataaatcaccaaactgttacctagcgggccggtgcctgcctctctccctgaactaggtggtgcgtctgccagaagaggagctatgtttgaagagcagcctactccacccctctcctctctggtccctgaacaccaccacacactggcattttgaaaaaaatattttcctccagaaactgggcacccccaagccctaccacccgctttttttttcttttttcttttttttttttttccttcttgaggaatggagcttcgcagaggttgcatttagattcaacagttcacagcggcgggctgctgctgctgcctctccgaagagctcgcggagctccccagaggcggtggtccccgtgcttgtctggatgcggctctgagtctccgtgtgtctttctgcttgttgctgtgtgcgggtgttcggccgcgatcacctttgtgtgtcttctgtctgtttaaacctcaggatggctcgcttcggggaggcggtggtcgccaggccagggtccggcgatggagactcggaccagagcaggaaccggcaaggaacccccgtgccggcctcggggcaggcggccgcctacaagcagacgaaagcacagagggcgcggactatggctttgtacaaccccattcccgtccggcagaactgtttcaccgtcaacagatccctgttcatcttcggagaagataacattgtcaggaaatatgccaagaagctcatcgattggccatatcctttcttgcccaccataactccctctccccctttgcatttcttcgggtgaaggggggtacctagcatggaatgtatcccccaccccttcctggtgccaatttgcccctttgctgaagcacactcttcggtgcatctaaggggcaagcttggtgccgtggagacccgtttgggcactagtgtttttcaaggtaagacttttggttttttatttttcctatgtggaaatctttagtgtccctgggtgcatccctttctgggctgggctttgtctgattcccagccccctccccacccctactcccttcacatgccgccctctacatagattgggttgccccaatgcttcctttcataattaattctcattttcctttctttaagccagccactctgcccgtatccccaccaaccaggagacaccgcactgtcttcctgtagggaagtcaaggctccatgaggggatttatcagttcagaagttcccagggccaaaaccctgtgtacagatagacaaatgaataaataaaacaggcttttgggtggggactcagctaactctagggacttaagtttaagttccactgaaagtggcatgagtgagtgtctgtcaggggaggtgatctctgttgccacagcccaaggagctcaaacttggagttctcctctcagccaagaaagagcagctcatcaggcccatcctgtccttggtccttggttgggtactcttgcttcttagtgcttgacccagctgattgctctcccagtatccaggatccaggtggatcggctgggcctgaattcatccgctgaggccagaggtgtgcatgcagtctctctctccctagctccaaaggaactgctctccccaaagcactggtgggggccatctctgatggtggtggtgtcagggtgaacaggcatggaaggagcttctttgcaggtttaatcaagtgcaccaaatgcagactgctgattaggcagctcactgccttgttcttcactaaggattggacgcctggcaaggccattgggaattgggggtggtgaggcagtgaaggggattagtaggaggcaagctagtggtctggcgttaaatatggggatggggttggagacatgggactttgggagggagatttgggagggatgcatctgcaatggaggccccttcttttctcccctattctccctctttcccacccccaccgtccaggtgtgcagcagtgaggcagctggagctgccttgggtctctagtattagccagacacgcggctcatttcccccagggcctgggcatctccctactcccccaaccccagtctctggccttccccttcttctctagttccctgcctcagcagctcggtgattggctggcgcgtggtgcttctaggcagcaccccctcattagaaacgaaggagcatctctaagcagatattcttcctgctgctgttcgcatcctcccacagcaaccccggctgggcttctccctctctcctctctgcatcccgctcccctgctccactctcacagagtgatcccaggccatccattgcctgagttgaacgtatctagctagggtggaggtttcgggcgggggaggggtcgggtccctgcagtcacgcctgccggtgcgctgcacaaagcggacagatctcattgtgttgtgtgctgcggctgcaaatattcctctaggcagtctacggatttcccagctgggccctcctttctcactcggcttctacggttctctaaatcttcccatccaccaggtgctgccttgctgtgcccctctcttaggggcgtgtttattcagacaggcgccctcccgtttctttgcggtagacaaagccgcccaaccgccccgcgggtggcaaagtgtgccagcagccatcgttggcacctcggacagcgccgctgaaactcccggcggcccggggctccccagttacccgggttcagcacctcgggtacttctggccgggcccagccttggagctgagaaaccaggcacgtttcctacaccacgtggtcaccttttttcacgttttctcttccgctgcaaagacaccgcctttccaccaggcgttgcgagcgcgcaaggtgcggctgtgagtcttactcctccctttccttgtctttggccaaaaatggaccaaagagagtcaaacgggagactctcgagggagttgatttcagcatcatgctcagtgccttggccccgagccctgtcccaatggtctcttttgtctgcatagttggaaatttcacagtggttctacagcatgtaggctgtggtaacagtgttcagggaacatctgctaaggtgtttagtggagccctgttggaaaatataaaatacaccatgtacaatgtaattgactaatatattccctctggtggtgaccacgtggaaacattgggcttccgtgggaaacgcacctaaattcctagtctcaccttcctttcctttctaaacaaataacttcccaagtatcttgctttgtcttattgggagtcagtctgggtagtggttgcccataaagctttggagctaggctgcctgggttgaaatcctagttccttcaccagctttctgaccttgaaaattacttcattactctgtgactcagtcttcttacctgttaaatgaggataataataataatactgggagaattaaatgacttaatatatatcacatgcctaaaacattatctaattacccagtaatcactagttgttattattaatggcatctttcagaaatttcagcgtgcctgaagtggggaggggtcttagttcaggtgaagtcctctagattcttgcctctcaaagagagcaaggagctgcatccacatcacctgggagcttgctaaaaattcagaatcctgggccccacttcaatcctgctgaatcagaatctgcattgtaatgagatccctgtgtgattaatatgctcattaaagtttaggaagtacttctttgctctttgtaagtgccagattttttttttttttttaagaaaggaaggttgttcagttgttcagaaaacatgtcaagacctgctttcatattgacatttgcacatttagcatgcttgaggattttgtttgtgttacaacacgttttgagacttacactttcattggctgcagaaagtcactgtaggacgagggggataatgtacacttctatgtgccgcattagtggtctcatcatgctgtgcattactggtctttaatcatgtttgtctgaaaagattggttaagtaaaaggaatggtttaatttatgcttctaggatcaccccgacttggagggggagggtaatcttatccagttattaataggggaggtctagttcttatgggaagaaatgctcaagataacccagatttggcatgaaagatggtggcaagtcaacagcctactctgaatgtgtttcatttttcttggaagctacatctgcatagggagataattttattttcttatggcactttcctctgcagtggataccatactctttttaaaaatgctaatgtgatttaaaatgtgatgttacattctatacgattcctcgttttcattttcttttttgctcatctaatagatcttctctggcagttggctgttctgagtgccctcccatgttcaccgtgcctcatgcttaccagctctcactgtttcatgcccagggccagttaccctgtgggccatacagcatctctcatgtggtttgcaggatgccccacacttgtttgaacttttccaggtcacgggtgtgaaggcaagaagtagtgtgtctggcttggagactctatgccagagttgggcaataggatattccccccacacctccatcgccttggttgtctcagcaggggagaacatgcttcgtgtggaaatgaatatggcttacagtaggaaggtcaaatatgtttgcagccctgagataatgaagctcatcacaatgaacctgtggacattaatccatgatttcttattgtagagaatttcactgtatccccaaagcactctggctatggatcagaggttgtatgctttactactgtgaatctcccattgtaaaatgtccgtttattttggaggattttggtgagggttaccaaaagttttagttcttaaatctcccattttggtgtcttcttttcttctgcttttgttgcctataaatgtatagcacattgcaggatagtagactgaggtcccggtaagaatttcaggtttgatgtaactagtgaatcatgagtcaagatgccttgattagggaagatgatggcagctaacaaggatgaagtctgtaattatatcctatgatcagataatgcagaggggttcatatcttctgtgtacctgtgcgtggatgcagatggtgaaacagatagtgactgcagctggtactggagctgtaggagaaagttcttcattttctgagcatcccaggacaatctctgaattgcctgttggctttgcttttgatatgaagtgtgggtaatgtttcatgtggaaaccaggccatgacttgttgtggggaccatttataattgggatgaagcctgaaaaatgagttggagtgaaggaatttgacagaaatgaaatgacttgaggatagagacaaaaatatcctcaatgtgatagttttgtctgttggtttgcatgtcattatttctccacttccctccacttgctttttctgcaataggcgcagtgcatgctatgaattaaaggaggaagaggaaagtaatgagaacaggcctgctttttttttcttctgaaacatccagactctgaaattattagctccatccaaaattacttatctctttatagcactgctgtacaaaatgtaggtgtttttccccctcaaattctgctgctttcccccttctttataggaacatctggtttctttcaatcttcatattcttagtgaaaataaaactgagtgaagctttgctaagctctcagaactcttgcaaacccttgactccatgtgtttgatgagcaggtcagccacctcccttacgtcatgcacagggctgcctggaaagctacagctcaccaaacaccaaagcccagatgtgcaatccagtccatcaatggtgactctgctgatcttattttgcttatcactgaccacaaagacataaaagaggaaacctaaatgcaactctaattaatatccatttattcagagagagagagagaccaggtctttactttctctttctgcccgtcttttcatctttctatatttctccctctctcatttttaggttcagcctttgtgaataattcattatatgtgtgggtttttcctaggattttcagaaaaggaaggttatttgtcttcctcttgggtaggattattaaggtctctcacagaggaccaacttcaggaatctactttttctctaagacctttgttttctgcagtgggactgtcacacaacagaaaggaagctggggagaaatcttgtaacctgctttttcttgtcatttttatgatgactgcctcctacccagccctgttacatttgagtgcccccaaaatatgcaactactagccttttctactcagagactgtggttaagtggaaggtacgtgtcactctgaatcctctcatcatcttgggttttcacactgataaatgctgaacgactaggctaaggaacagtcctctgtaaccatttcttttcaaattccagtgtgaatttttacaggaattacagggagcaggggtagttatggggaccaggcatggaaattagtgtctaacactccgccaccactaccaccaccacgatgtggcttctaaagcagtcccttccacagagggatagaaacatgaggggcttggatcaatgttacttttcccaagccttctaaacatgcacagagaggatgcacgtgtgggttcacccatcagtcatgtttccagcatcaatcttaattaaggacagaaggtatagcacaaagtttttagactcccccaacctcgtggtttcttagtgttaaggttattgcagagagatgtttatggtgtatctttgctcactgagcaccccaaatatgtttccttataaagcttgacgagccccagtgtcctcatctctggaaagcagggagcagctagaagatgtgttcttataaggtgaagatgggccagattaaggggaacagcaatgaatgactttaaaatgtgtcggttatccaagagatcctccctgccacctcccagagcagtgggtacttcttaggagcttcctttattgtatcttgagctccaaatttgtaggactagatagttccacccttaatcctcttacttattaaaaaaaaaaaaaggagcctcaaatagacccatttgtaaagcagtagttaatcccagaagcaggtgggtggggcttgggaatgctatgcccagctaggctccagccacgctccagccacgtgaggcttcagagagaggccctgcctggcacctgtgccaagcatgttttttttttttttttttttgcctgtgggtggttgatttgaatcactgttgcaactctgcataatcttgaggctatatttttgtgtgtgtgctgcattttgtcttttgctgcatttttgctgcatttgggctgcatcggttctcttcatctctggagaatttggaaagcctccttcagatatatgcctgagctttccaaagacttgtgtcattaaaggggggtgtcatctttcttccctttgggggagggattaaaaaggatgtagctggatggtaggtagcaggctagaggggaaaggaagaagtgctctggtgtagatcatgggtggagccttgatgatactcagtctattatggcatcattgctgagatgcaggacatcgtgcgtggccttctggatccagagcggaggctctgaaaaccagcactaggaggaaaattaatactctcgagcctttctcagccttcagctttgctgtaggttggaagtttttcaaactttctgtgcctctttctcaatttccacaccattgtctcatgggactggtcagagccaaaaagcatgaaatggattttcaacagtcactcactaacgtcctggcaatttccagctgtgttctcctgggaactgttttgctgcttttctatcagcgaccattcctttcagcagatgatttccatcaacatcaaggctaattcctcatttagttcctttgtgttgatgtcagacataggcggtctgcccgtttcatctacactactggctgtcaacctgtgtctcagaatcacctggagggcttgttaaaatacagattactaccccccactcccagagtttctggttcagtaggtctgaagtagggctggagaatttttgttggtcacaatttcccaggtgatattcatgctgctggtcttggacatcatgctttgagaaccattgctgtacatggttttgttatctgcctggcaatgcctttctagaaggccagtcttacaaattgctgatgcatttcctcatcccaaatctctctcatttaccagctaaagccctgctgctaacaaaagcttatgctttgggtttggatagtgaggaggctttgagacttctctaacaaaatgctgatgaccttgagaccagggacatattaagcaaaatatatgtcattatcaactttgagttagtttatcttgttctttcaggacttatcactgagagcaggctcttctgagaagggacatgcacccatttaattccagcacctagcacatgctggcacatggtgagcattcagtaaacttttgttggatgatttatacccaaattggctactattgagttaacaagcatcaacaaagtgcctcatattgccctgaccaggacctgtaagaccaggtgtagccccagggaggggacaggaggttgccaggaggtggtgtgagggcagtggatggctgggaggggagtgaaggatcatcacatgggaattgggaggctgtaaaagacaagatttagctacttcataattttcctcaggattctttcagtttctgtattacttgatgcaggctttctcacggaaaacaaaacaaaacaaaacaaaacaaaaaccagggtatttgttatctggcattttgttacatggaactctttattaattggcatatagtataatgacaattgagatttgtaatggtgaccccctaggtaccacagaatgttggagtgctttctgaagagcattcattgtattatattcaacacagttccaatggtgtgtgcacttcattgtattttgagctttgtgtgatttataattcatattgattatataagtagctcattaccactttttttgttcaattaaccaaagtgttcttctccagctgtaccagatgacagaggaattggtatgttgttctagaaatcagaccttttagttctagaaatattataggagctggaggtgaatcctggtgcaattgtcatgtatcaggtgatatttagaacaaagtcattatttcaaaaatggactaatagctcagcaggctttagatttactgggcaagttccccagctggtaagctggtatcacatctaactgggtgtgtttgtttctgtaggctaacactgaaaatgaaccaccaagatttccaagagagctttcaataagcatctcagcaagaggttgtcagatgataccttccccaacctgactctgagttatccaacttttatgccttgggcttattttcctgctcttttttactcccacttccctccttcctgaaggtcaggagatgttgagctctaaaatgattctgttgtagggtgatggtctttaggttcttcagggtcagtttgaaactctatggaacttcagagtatgacctgaataaatgtctgagtagtgacctgagtaagtgtctagatgacctcagtaagtgtctagatggcatctagatgactctttttggagtgttgggaccattaagtccctctagtacagtgtttgttcatttgctttctatactgggatcacaaatcctactgacatctggttgatgctatagacctgtctctcctgaaaaatacacatacaattttgcattcaattttagaggtctatgaatcacaatttaaaaacatctatcatgttaaaaaattcccacaatttgggatgttgggatgctgggctatcaggagtagtgattctcaaccaaatatcaaagcctttatgagcaagtacgacaggaactttatatgaaggaactagagagatacggttgcactgggctgtcagccaggctgctatgaaagaacacaaacattctaaccaaagggcatgaattcaatacagaaactctttctacatcactgtgaaagacgactgtcaagctggaatacctccagtgacagggtgctcttctgttgttaaaaaacttaagatataggaagtggaaatattcctccttatagcttccatttgttctttcccttcctgttttctgttttgtaaaacaatatagactcagtctacttcctttcacttgacaatactatggcattgaacagcacagttggtggatttttggtgatgatagacatggctcttggcacatgtggcccttaaggacttgatatgtggctaatgcgactgagaactaaattttaaattttactgacttaattttagttaagtttaaatagccacatatggctagtggctactgtacaggatggcacaagcagagggaatacatgatgagtcagaaagcttaagctcccctttggttctgtcatttgttagccttgtaactgggcagggtctccttggcttggtatgcagggcttctcatgagccactctgcacattgcgccagctttccttgaccactgtaatcactgtctctccagctgcttcagtggctgctgatccctgaaggcaccatcctcttccaggcctccgtgcctttgcacttgctgcttttccacctagaatgagtctggctttaagattgtactcagaggtcacttcctctgtgaagccttccttgatttctcttggccgaataagaccagcttcctcctttgggctctcatagggcactttatttattactttgttgtatcacataccacataattttagtattggtttaaaatccctgcaagggaggggggacgttatctaattaccagataataaggcaatgcttattaacatcagcatttaacacattagtttgaattaaaatactttttaaagtggtgtttttttttttttttaaagaagtggcattccgtttctgacttgagatagtcagctaaaatctctgaatctttttttttatatgaattgatgacagagttagttttctctcactctgttctcattcagtttaatttttgaatctagattcaggactctatgtttatatcaagtatattttatctccttgcttttgctccaatgtttatcctgcagagatccttttcaactgagaacaaagaactaacattcattgagcatctaccaaatttcaggctctacttcaaacaagtgtattatccacattttaaatatggggaagctgaagctaaagaagattaaatcacttgcccaaggtcaccaccggtgagcttgaacaagtggtccgaatccaaagtttaagtgatttctacaccgcactgtctatggactttgctgtttcatgagtgagctccccaccctaagtgctatgtcatctgcagatttataagcaaatacttaatgctttcatttgagtaattgataaaaaatatatttagaatcagggaccctctttctgcttatcatcagtgtattagtcagtgtgcgttgaccgttcagcttttctcaagtattctgaactgtgctttagcctactgacatttctgtattttgtctgtaaaaatattgtacgcgatattcttgtcacatgctttactgaaatcagtacacactttcatgactacttcatgtctattttaagcaggaggtagcatcttggtttctccaaagtccactttaggtatcattttcagagactcagacaatattttatttctttcttagacaataaaagtgttgtgtcctagatctcaggagttgaagggatattagatgtcatctagtccaatgcccagttgatgaaagcttcaccttagagttcaggatttaccagtctctgcatggaagctttagggtattagggggtcgttgttaaaaatgacctctggattcaaatctcagtatcacctctgtcactttatagctgtgtgcctcaggcaacctgcttacccttgcagtgccttggatttttcaaatgtaaaacagagatagtaatttgcttctggggtgtatcataggatttttgtgaaggtcagatgagataatacatgcaaagtgcttggaacaatgtttggcaaatagtaagctgtgaataaatcttggttattagtatatggttaatttcagatacataaacattaaacttctgcagctatgttttctctttccaacaatgctgtcctacttcctcctggctcttaccaagtttctaacctgagtgctgccagataatgtttacgtgaccttgcattggtttcatcacctccctgagcctcagtgtcttcagatgtgaggtggaggtcactttccctgctttgcctgccttataagactgttgtgaggttagcattggctaatgtgtatgaaagccctttgcaaacatattaggtattagtattagtgttaatgttgatagaatttataaatatataacacttattgaacatttactatgtgtcagaatactgtgctaagtgctgcccatgagttattgcattgattcttcatgacaatcctacagagataggcattcttgttttctgtctttcatagttagaaggattaaggtgtggagaggttaactcatttccctgagatcgcacagtaagagctggaggcctggatcagaactcgtgctcttaatcactgaagctaaatagtctttccataagactttttttcttccttctcaaagttattgggtttacacttttaaaaataaaatttaaaatatctacatcaaaacctgtttcctttatatgtttctaatgctgattttataccagtattgtacctaaggacatatttggatttacaatcagaaaaaatatcttcaggagcaataatgatgcagaattttcccagaaagcttttgataaaaacagataggatacttaaaatgatctataaccttaacagactcacttgattttgtctttgaacaaaaatggtagcaaaaaatttcagatggcttgatggatggcatgtagaaggatcccctttagatccttggcatctgggcagattttcttcctgggggttgccagcctcctggctaactacttcctatctgcttaggcttcttgggtatttagggcctctatgtttgttctatcagataagagagaaaagattggaattcattaactgtggaggaagcttctgaaagggttagggtgctgtggggggaaggggaaacctccattgcttgggactcttggaaatttgcctaatgagcttggtgaaggtcctctgctagggatattaggggcattttacctgtgggaaatgtttactggtgtggacgagaatggagaattaggatgcaccacttggcttccggaaaccagacagagcactcaaaagaaattaaggagtgggcctaaaaagttaaaggaactgcctctcctttctgctaactttggattgtttttgcatggaaatttgtatttgtgaaataactgagccatatggatgcacaaggatgcatgtgttcttctagtctgttgatatgaggagcagttgaagggtgtgggcttgtctggaggtggggtgagtaggtggatgtggtaacatgaggagggagcaggtctgaggaatatgggcctatgtcaatccgaggatctgggcattttggcaagagcaccctcccttctcatagagaggtatttatttatttttgagatcaccatctgccccaccacctccccccacctgaagttctatggataaggatgttacatctctgggtaacctctttccctggcgatgattaaagagtaacaaatgcccactcagaaagactgtacaggctgagaaagactgagctcatttctgtcacaaacatcagtagacaggctcaggagagcaaagcaaaggaatagattctaggaaattagaacttctaacagctttctatacttccactgtgaaaaaggctgggtgcagaacaacctgcataatcatatgccttaccatttctctttttatcttaccttcgtgtctttttatcatataattttaccaccattctataaggacctccctccaggcctggagagctttctgttcctcaatatgcatccctgagaatggatggaggaaactaacctttaatgaatgcctattgtatgacaggcactctacagtgtgctctagaggagtgtatcatttaatccaaccccgggtgaagtggatattgttctcattttatagatgattagcttaaggtcacagatagatgtggtctgactggtgccactggctgctctctttccattgtttcatgctgccttgggttagaccagaagaccagcaggtactcttccctaacagagtatctttttaggatgacactgtgaactacttgcatgcatctgcagcatcactgggtatgaggctaactcatgaaggagtgaaggatcagtagatggaagaagagcaactatctctttcccatcattatggtcatcatgaaatggacctgagacatcctggcctgggtcactggaatgcgagcttgagtcggaatctgagatctttgctattttgtctttcccccgccaaaactccactgctgcagttcctttatctgtctgcagagcgcgtttggtttggaaatgccagttcccctttcaatattagcatggaaagtccattttcttttttccggttctcagagaagtctaccctcagtcctttctgttctggggtacccatagtgtgagtcatagtgtggaggtggcagctttcatgaccttctcttgaaattttacatactgaatgcagctttttaaggaaatgagggttgggttatagagagactgcagaaagactcttatatcctgataaagactatagaagaggcttatagtaggtttgtggaaaagggcagcttttccacaatggttcacttccaggccaccattgtgaagattctagcttttctttaactctgttagagaagctgctagcgaatccaactggtcatggagctcctatgcttgacaatttagaagtatttccatggactctagaccctttcaagatgtccctgggtgtgccaggatttccatttttgaatgctattgtgggatctcctcattagtaatttcaccaaaaatggcttctctcagttgtaatcatgtatgctctttctttctcctccatttcccttcccatcatgttcctcattagcataacagaatactagaatattagatttatagagaataaaaagaaacttgaatcaaactcacacttatccataagaaaactgaaggccatagaggttaaatgatttgcctcaataagtggcagagcagagcctagaacccagggccgcgaccaagtgccagcatccttttgtcacattttctcttctttcctctgtaccctttctgtgctcaaccatcttctctctagtcccttctttctcttctggggcttcctcatccttagcaagtatatgtttttggtgtttggggcataggaggctggatataaggatcatgactaataagaaaggacttacgtaagaaaaaataggaatggataagagaaagatattcatagaggtgaagccaaccagcagagatccagtgagaattggtaacagtgactcagaaaaatggttaatattcttctttcccaaatatgttgctggagaactttgtgaaatgataatataaaactcaataggcaatggacttctacccagtgtaaaaccaagagcagatctcagcagatgggagaatagatggatgcttaggcaagcactcatctcagaatggttgctgggctcttcagtagccctaagaaaggcaaactatccagactctgccctgagaggtagctctttgagaacaattgagtactcctgggaaggaggaagcagctcaaataaaaagatctttagatccctttcttttagaattctctattggagctaagagaccagggaattttatttgattattctgataatagttttcccaagcttttcagggtgtagggctgagagtacagagaggtttctagccctggttctagaaaaatctcattcctttcctggtctcagcatctacatctgtaaaatgagtgtgttggaatagttactaagactctaaggtgcctttcagttcccactgtagagactctgggattctagtttccatcattgttatttcagctgattggaggacacgattaactttcttggtctccagcattcgaagcctggctgcacattagaataagcctgggaacttctagaaatgctgatacctagactgcagccaagacaaattaaatccaaatttctggagataggacccctgtattcttaattttgaaaagctttccaggtgattctatggtccagccatggctgagatccactgatcttctagaccgaggggagccagttacctgacttccttctgtttcttttgagtgtactttgattacgtcttggctgctccctctcagttttcttgcaggctatggtgaaatagcaggagccgcctgggtgtcttgaaatttagcctgagagaatggggtgattaattcttatgtgtcactgcattgacaaagccattcacctgtggctgcttccgacacacctccagctgcacaggtaacagccttctgtgatgagggggatggaccagacatcctgaatgcaggtctggctgaggaggccatttgaggctgaaggacagagtaaggctcacccaggaggcccttgagcaagtgactaagagttgttgaccttgcttcctacctggttggttcaccccttatgcatatgaaggttgatccagcatgactaccattgaatacagcagtcaccgccttaacatccttgacactcccctggggatgtggaactcacaataagtgctgtgctgaaactggcttgtcccagctcttgagtgtcctctctgtatgtctcttctagactccatgttcagtgatatcaagatggtagcttgaaattggccatggagagagtatttataccccagaaatttgcaaatgctacacattggggcttttcccccgaagttaaacatctattagcacaacacttagttttctacttaacaaaatagtccattcacttgtggaacagtggaagttcttctctttattgctccagatctgtcttcggatgggtactctgcacattgggtcttagtctttgcctccataataacttagaaaacatctgagccccttattacaagctagcccttcagatatttgaaagcagctgtgatgtatttctcaagtcttccctttccaagctgagtatccctagttctttcaacattatctcacgtggtttgcaggctcagtaggtgtctttgaatgccagggcacagttgcagagttttcagaggaaaacaaacattctcccacaggtgatctatggactctttcacaaaaggcttttcatttttcttatgctgtctcagttccatgatgctggtgttgatatgaagtggggtgtagtcttgggtggggttgctgattgcacctcatagtcatcttccctgaaatgcacgttgctgccagaactcttgatgggctccaattcatcagagtgtcatcaaaacacaaattctcgtttctgaaacaggtaattttcccactgctgttttgttttcttccagaggcttttaatgctccccttttcttttttcccttttctgtagcgttcaatcatttgtctgctgttcaccaaaactgtgtgttgaatgacagcgttttgagtccaggatccagtcacacgcaaaacaaatgaatttgttaagacttatccagctgtctgtaactgcaaggggcatggcagtgggaggagggagggagacagtactgtcttattttctcagaaccagcacttcccatcctttgggaatcagggcccagatgagtctggaactgacctcagtgttggttcaccaaagtagcaatcatgtgcacttcctttcagccactttatccagagggcagggtcctgggagtcagatgggagttctttggtctaaagtaatgagaatttggacttgccttcacagccagcattaaatgggtaatgcttaggatcttttgctttgagtaactgagtccactgacctccatgagagagcagcaggattgtattggcaaacaaaaggccttttggggagttctctgcctctttgttatgttctcaatattgctttatttgtctttcattcattaggtttttaggagtaggtgtgatggcatttccatcttcttgacagcaggagtggggaagagagagagagagagggattaagaaggagagaggtgtgtgtctgttcaggactgcctgtcagatggtgaatttgaacagaggcagctgttgtcatggcgatggcaggttgcatcccaccaccatggaaaccaaagttaaaaaactgatgttaaggctggaagtcacatgatacatttttgttttgttttgttttaaaaaaagaaaaggggtttggttttttagtctttttttttaagatgaggttgggtggtgagaaaaattgcacaaggaaagcaatgagatgatgacatgggacagtatggagtaggcagagccttctttcatgtttttctgcttgttgacagtgcatgtctcctgccgtggttagagaggggatgggaggggtatgcagggtggacttccaggtttgcagccagagttgtacactgctaactgtcacatggagaaacacaggggtttagccctcttgccctttggaggtgatgtgtggttcaccttctgttgatcagcccagaacagacccaggaaacctaaaagtatggactacccaaataggaagatagtccatatattgataaatttggaaggttaacatttattttcagagaattgaaaagttcatctatagctcctcagaatctccaggaatagttctgtctgtttattcccttttctgggctggtctcttttgggctgccatgtcctgccagggcagccataggagtgagtgcaaagaagtccagaaggagccctgggccaagactccttgcaccatagcttatctcttaacctgggccctctcacctgggcagggtggagcggcttgctgagaggcattagaaagccctcttggctctccatctttttacctcatactgacttctactttatgccatgatctggagaaaatgtgaaacatccctccaggaagggagctggactggccagggctgtttttgcttgcttgttctttttttgttttgttttgttttttgagacagagtctcaccctgtcccccaggctggagtgcagtggtatgatctcggctcaccacaacctccatctcctgggttcaagctattctcctgcctcagcctcctaagtagctgggattacaggtgcccaccaccatgtctggctaatttttgtattaattgcagagacagtgtttcaccatgttggccaggctggtcttgaactcttgacctcaagtgattcactcgcctcggcctcccaaagtgctgggattgcaggcgtgagccactgtgcctggccaggccaggcctgtttgaacagggctggtttgaattttccttttgtgtagacaggttaggaagcagagatttctgtaagaatgtctgcttctaggaaggtgaggaagaccatgagggatgcagacacactgttgaagtgatggtcataactattgctatgtctgggttttaggcacaaggtcttatgtcttcggcattactcgtccctccaggacagatgtatctttctcagtcggctcagacgagggtcatatgatctcaccagcatgatctcactgcatttccatcagggtctgtgggaactggagccagacttctgtgatggttcaacccctcctgttcttagccctggcctggggtgtgattaatatcccttctaatcactgggagagattgcatcagagccatcagcttcataaatcctcctctggggactggtgtttggatgcgctttccatattctcaggaggttctgggccaaatgtctttgctcttttcctggaggcccattaccataattttcttttaaatcctttattggagttggtctcctctgtgtcagtccatggctacagccagccagcccactcctgagggctggaggctgtaaccaccaacagatgctttccccaaagtattgagccacagtagatgctgaaagattgagttagtaggatactgaaagtaactgtatttgtgcaacactttacagttttcagagggagttcagattccggtatcattttaggcttcagtccttttgtatttcttgtttggttctgtgggaatggatggtcataacccttcattgactcttgagtactgtgttgggacagcttttgcagtcggaggcctggctctggtttcctttaccaagctacattttttccattgcattccaggtcttgaagaagattctgaagttacacggaaggcttggatagctgtatttcattcctgttcatatgtaaaatgtctatttggtgtcatgctaatagggaatcacagactagttaaggctctttctctgttactgtctttgagtcaaagtccacttattaggatgatatttatgtgcacatgaagaagaggtggaaagacatgcatgaaggtgtccatgccatcctctgaggctgttacatctcttggatttagacatccaaaaacatgagactgaagggagaaaaggagacaggtcttcctgtagggtctggggtgaggggtggaaatgggtaaaggaggctgaggaatgcctcccctcagactgtggactcttctatacccccccaggagtttccaggaagtgcctgagtgcccaccgactgctccccacaaaagcatattctgcattaggctgaagttgggagagtgcacagcattctatctgcctgcctgtcagagcatggccttcttagtgttcggatgtcataggctctgggaggagacagctaagtacagaggtcttcaggatgagccccctggtggtgatagagatgcatgtttgcctggggacacccaatatttactgcctgaggcctaagtccttcccaagcatgtacctacagatctgtacctgagaggtgatgatgaggaggcttttcaggctcaggcagatgaagagctcagctccaggccaggcccccagggctccggtgacagcagaaccagcatcaccacccttgccccagctttctgtgcttcaagaaggaaatgaacaaatggcaggtgtgcaggccacgtcgtgctgctcaaattagccatgttgctaaggaaacaagtcaaccattcaaaggaaggagcattgggtaaaggagataaatcaataagtgaacctatttttatcatttccctaatgattgtcttgaaactgctagactagaaagagagttggagcaacacaggtcctcattaatgggctcagagggaacgaggagtgaaggggtgtttgaggagattgccagtaaagtttatgaaatgaggcctctagtgagcagtgagctggtacaggagggaaggcaggaaggaagatgtcttttgcaagtttcaaagtggtttcatggtcatttcctcattttggccaggtcccttcattctcttgcatttaatcctctccgaagtctttttctgatttctctggccatcgcattcctcctcactctcaggttgggatgggtttttgtgttgatttgttcttttcaggatacatatagctttaattgattttgtagtgataaatgaacacatgctcatttgaacactcagaaaatggttagaggagtaaagaagaaagtgaaaataaccctgctaccgagagaagactcatcatccttccagcaagacagaattttttcttgttctctcccttctctttttttttgtttttgttttttttgagacggagtcttgctgtgttgcccaggctggaatgcagtcgcacgatctcagctcactgcaagctctgcctcccaggttcacgccattctcctgcctcagcctcctgagtagctgggactacaggtgcgtgccaccatgcctggctaacattttgtattttttttagtagagatggggtttcaccgtgttagccaggatgatcttgatctcctgacctcgtgatctgcccacctcggcttctgaaagtgctgggattacaggcgtgagccaccgcacctggccttctctttttttttttaaacatgaaagggatcttccatgtatgctggtttattttcttttttaaataggtcatgtgtgtctacagtggacagtataaaaagttcaaatgggtatacagtgtggagagtgtgggtaccttttgtaaggatacctctggctctagtttccctgtatgattcatttatcaattgaatattaatttattaataaaataacagttaccggggccccactgtgtgccaagtacagtggtgagtgaggcaggcaaggtcctgccctggggctcccagtccttactgccccatcatctccatttgttcaagatttcaaaacacaagcaatctggataccagggatagatattcttccctaaaatatgcacagtgtcaggcacagagtgtaatgagtgtcactgaattctagaacagagagtcagagtcctggacagacttccatcttgtccctgattgtggttgccatgaagggtgatggtctttgaggccgtggcgactcggagctccctttgacctttctaagtcatgtctttgtccagtctgccaggttgaggggcactagcttgactggtgggtgggtgttatttgccgtctaggctcttcactttggggatgtagcagagccattgctttggggtgtgaagttttgctgtcgggaagaaatgggagtggtgcctcggaggcagcctgcaagggtgggagtgagcaggagccatggctcaggccagagtgggtgagcaaagccctgtctttgtaatggctccttagtgaatgcctcatgttcattcttacctgcattgaacattgactaagctcctactatataccatgggctctgctaagcactgccagtagagacatgagcaaaactcctgctttcaagatatagtttcttgatttaaataggagaagaaataatacagtcacacaattcaaagagctgtggggcacggggagaaactttcactgacaaggtggcatttcagcttggtcttgatgtatgactggaaaggagaagaaacgccattgcatgtggtggcagaagcacctagatgtaaatgcctcttttttgtgctttcttcagaaagggaagtggaaaagagtttaaagaacagggctgtaagggagagtggctggggcctaggcagacttggatggtctcttctgctcacctcccctgagatttccctgccactatccattctttcacctagcccacagttacacagaatctccacattctcactgcaggttcttcattaccgcagccatgaattcatcctgaggtctagatgccctataaggctgaaagggacatccctctcaagggcatatatatctgaacaattttaaaaatgtaaagcaaaaaaaaaaatatttttaagccagaagattgctgctgtgaatgggcctcacatcagatagtgggaagaggatttggctggagaggaagtgagaatagggtcttcttagaacctgtgaattaccaaactcccacctttagattctagactttagggccttgggtagcaccagccatcaagacctcatgaattctcagccacccagatacctggccagtcactgggagtttgactcatcagcacctgggccaagagccattccgctgcctggagcatcttccggtggtgttggctacaccttcctgagctagcctgtgtccccacaaacctcacatatctgcccttggacattctggactagttgagcttaaaggtccttatagggagcaatatacttgggttaactggctaggaaaatgcaggtatgggtgtggaagcagggagctggggcagtggaggaactgccatggtccaaggggatattgtgagtggagagtcaggggcagtggaggagctgccatggtccaagtgggtattgtgagtggggaggcctcggaggcacatggctgccaggacctgtcttgcctgcaggctcagcactgagaacccatctactttgaagcctgtgcttatcactttcaggttttcaggggaagaagattcaaccccccaaaacaatcatagaccccacatagacccattagaatgcgagaggtctgcagcttgaacgagaaagtacttgtgcccagtcctaccttccagggcaggcactgggcttcttggatctgctgagcaggtgtctgaaattgcatgagacgtttccagctgtgaggagtgaccaggtgagccccacactgttgtgaacacttttgttaggaaccaggacaggggatgacatggaagaggccctggtttcactccagtcagatccatcatccctcctgccccagctcttggggactggcagacagacccccactttgtgtcaggctgcccaggtatgttcctgggaacaccgttcaaaagagatgctctgaaaaaaagagttacaaggtgaagcaagtttgggaaatgttgtgtgctgtcccaaacgccttgtgtgtgtgtgtgtgtgtgtgtgtgtgatggggtgtgtgcccactgtatgcaaaagtattaaaggccccaagaagtcctgctggggagaaacctgcttaactttgcccaacccaggctttctctcattggttgattgcaagttcctatagcaccagtatttcatggcctgcatcttaggaataccactctcaacgctctcaacttctgttgtcttttgtcagtgacttgtatgcgtgttgccagttctctttctggatccatcgcccaagcatgttttcaggaaagggtatggattccttggccaccattgctgctgggttcccatctttaatttgcaggatgagtctgggattccgggtgcctatgccaggcccagggcaacctaggctgttcagaaggcttatgggacactgggtccttgtgtggttcctggttgctctgcattttttcagaggtctgggttacagccatgatgggaggggaggagcactcctcctgcgatcagtgggcatgggtggcccttggcaggctgtatgttgggggccagtccttagaaggtggtcatgctagctgggtgggcgtctgtggtgtgtgtctgctggcatgtttggctctcaggggcttcacacccggagtgtttgaaggaagaggaatgcccatgggtgctgagggactttccatgtggggaggctcccctctgagtgggagggtttaagcaggcacagtggggtgtggaggcaatggacaggctctgaagtcccctgaggccaggtctgtttttagttccggtggctgaacctcagggcagcagaggcccgtggaatggtctctggggtctgtgtgctgtgtgagtgctagaggtgcgtgggaaggaacgatggtggtcagctgctggcgagtgagtgtgactctccagtgtgactcagagatgcatggtggtgggggaggagaaggcactgccaaatgaggattaagagaaggactaggggctcacacacagccagcatctcagccctgcagcccctgatgccagcaccaagaccagagcaactggtgagcagctcacatctcattgcacacactgccttgccctccccagagatgccctgggtgctaacttaacattgtgttattgccacaggtagcctggcaggatgggggcattgcagggatagctgtgatttgccctcctgaactccacgacagggttccaggccctgcaccctacacagcctgtctgggtatgtggggagataagaacagtccctttccttccctccactttgccagatctacggctcctctcttctgcctggattccagaatcttctggagcacaggttgctcagcaagaccagctgcagtagctaacttgtgtttgtcgtaacagtaatcacagaatgaaattccaacatgcagaatgacagcactgggagctggtgattccctctttctcttctgagagtccttcccacctccctcggagcatgtggcaaaaccttcctgcaggggtcatagtcctgtttttgaaaaggcacagggagcacctcacctgttttcaaaaacatctaacagaaaaaagcctgcattcattcattgtagtgtggttcttacaggactggactttgctgtccaggattccagactcgtgatcagtctctgtttcatatagatgcagacacttagaagaaaataaggtgggacaaagcaagcctctccttcccccagaagtacattgctgagtggaattttaaaatagaaggaagctcacatggagagaattgtttattttccagatgttcttctgttactcagtggtgcagagattctagaagagaggactccagttgtgagcccaggagagcaatggattgcagcagctggatctgtgcacaagcatcgttacccagttcagtggtttgaagactggggagaacaaggggtctgcgatggcattaattatgtttcttcctcctttcttcccccttctattttcagccttggttattggatttgttattgaattcactcagtagctggagtgtctgccatatgcccaactatattatgtattggctatatacgttccttttttggagaagatgctttgtgttcagagaccaggcacaaatgtttttggtttcacaaaaccaaaagtggatgctaaggaccatccactgtcttgcctgcctgcctgtttacaaataaaaatcatgcaaactgcacagacacaatgcgggttgatagagttgtgtgtttatgggcacggccatcttggaggctgtgtccctctctggtgaatttgttccttaactccgctttcccacgccatttgagtacatgatcctggccaccatcattgccaactgcatcgtcctggccctggagcagcatcttcctgaggatgacaagacccccatgtcccgaagactggtatgtgattcccctccttctcccctttgccccttttgtctttcttggtttcttctcctctgctttatcactctcccattcccttcctgcctgtgagttctgggaggagtttgctctttgctgggggacaagctaatgacagaccccatggggattcacacggaaaagaagagattacaaacactgtgtctgtgctgcgtggcagccagggaagaagaaagggcaggcacaggcccattttcttccctcctctttcctaagggacttctgatacgagaggaagaggtggggagtagaggggagaggatgaaggatgctcagtgcttgtgtgtatttgtggttatgaacttcccaatgcttacgtccttattctccttaaagaaatgagtcacacatctaacgtattccccctaaaaagagcagacaaactgcctaaaattcacgtgtgtacttgagatgatgaccttcaagcttctaacttatgtgaagagcagcaaactccttcagggcaaagccagggccatcagggaccttcctgggaaggaagtctagcccctgggtgtgaccctcacattgtccatttctacagctggctcccctgggtctcccttgccctgtgcactcctgagtcacagacagcctgcaagggtcccttagcacccttgcttcccacctacacatgggcaggcccagcacagacatccaggaagggccaggctgtgcttttgcctgtgtctcataaagcacagtcctcttctcactggtgcttctgctcctcatccccacaggagaagacagaaccttatttcattgggatcttttgctttgaagctgggatcaaaattgtggccctggggttcatcttccataagggctcttacctccgcaatggctggaatgtcatggacttcatcgtggtcctcagtgggtaagtccattttctctctctgtctgtgtgtgtgtatgaagggggttggtatcatgaggtggctgggggcagggaacctggggtggaaagacagcaatctgtagagtaggggcagaagaaaaagttcaaggctaagattccccagggtgctggaccataggtcagccacctcaagaggaggatgagtactgtgtggagatgcgtgtggtgttaggcagaggccatgggactctcagccaggtctggaagctgccacttctggttttccattctgtgcttggctcagtggctaaacacccacttctctggggagggtgacatttcccaatgagccttttcaccaaagcaagcagcttacccccgcctgggaggcacctccaagacgggccaaaagatgtagtcaaatgcagcttcttttgggcgttggagaagacctcagccatattttctgaactgatcattgagacttgtgttctgacaacagaagtttttatcatttgcagatttgttaatagtataaaatcgaatcatattaaaatgttggataaatcattctgtggaaattaatatagccatacgacattggggctgacccagtgtcacagcagcatatatgatggcagtacatttagttaaatatttgataaatcattcttttggaaatgaatatagtatgaggaagctgggttgacccagtgcccttggcagcaaatgtgttggccttgggaatggtgtgacgggcaggccttcctgggcttttgtggcttcctattggtctttgtgtcaggtggctcttggtacctgcaaagctgggcactgaggagtggtcctgtgtggatgtggcagcaagtgatgtggtctggaaattcccttacccaactgcttggcagacagggttcaaacccatgaagaaaagaagagagtgacttagaatggcagggaaggcgaaatattagctactactgtgattgaccaacaggaaaggagagaaaagaggaattgttttccagggaggagtcagaggaggggtgaaggtagataaagtcttagaaggaagggtaagggcttgggaatgattgcatctatttgttgtcatgtggaatagacaaaatactcttattttttaatctttacaccattgggattacatgaaagagaaaacactgaagatgtaatggactggaatatgtaaatggaagcacgtaagcagccagcccctcaatatgggaaatggataaatagactgggatgactattcatgtttaaaaatatctgttgccttacaaaaggattttctggaggttagttttctaaaagaaaattctactacattttaaatatgaattagtatatgaagatatagtttttacatagtattacagaactatattgggtaatgttgcaaatgtccctaaaataaataatatgtgctgtattagaagaggcctgtatgagaatctgaatcatttagaaatgttatgattctatctagaagaaaagtgttgtataagtcactacagaagaacaacaaaaaaagaaaagtattgtaatgtgtatataataagtttgtgtaaattcttggtcctgctcagctctatatgtggcagaatccatttgaaatttcttgtctagtccatttatttttgttttaaatgattatatgttcattaaagaaatatggaaaatacagaaaagtcaaaagaagaaaaaaaaattcactgattcagaaaaattcctgattgttttgtggtatttccttccaggccttcgatgctaagcaagctgtcttttaaatgcttgtaattttgctgctttcttcccaatatagtatgagcatattacatgttattgcatattttggtaaaaatctgtaatgactgatcagcagtttgttaagtagatgtacacatcttgcttctcatttttgcagttacttgacacttggattctttctgttttttggctctgataaataattattaaagatgctccaacgtacgtcttttggatatcacattttatgagacattttacaaggttgaagaagtacttctggaggagtatacggctgttctggtgtggggtctgggaactaatggctgagaggaggtagagaaactggtctgtttgactgcatgagagaagacttccagtagatgttaatctctctgcaaataagggttgctacatggttgttgaagaagcagattcatagggacccatagggttcttttgtcagcgaagccaagaagggcccctgggtccttgcctgcatgtccagggggtgttcaagagtcagtgcaggtgctgagcttggctgagtcagttgtcctctctgtgctctctttcccatccctcacatcttcccttcttagtggctcttcagatgtccctggctttgtgaattgccttcacaggcccctgatttccatatgaactcacaggactttgctcctgctcctcctccagacctgctgcttagccctcttctcagcatggaccgttccctttctcctcaattcatgggtgaatgtgctccaggcaaagagcttggtcctcttgagatccctgctgaggggctgagggttgcggttctatcccacaggaatgcatgatcatatttagtcttacagtcacatgatgctctcatctaccacattgtgtggctctaagatgcacgtttttcatgctggaacattgctgaaatcagcctgtgtcttacaataatggcatgatatagtttaattgacagcatgtttttctttcttagtgctacataaaattacggggcatcttacaattgttggggttgtagattcaatgacatgtgataccaaccagggaggcaggcaaagtggactttagagatgagtcatctggtactcaaagagggtaagttattcacccaagatcacacctgcctcttaatggcagatgcaggagtcagaattgtgccttttgatccagggctggtgttttgacccctgccctgtgcagcctccttaccaggccacctggtgtccccctttgtcttcctgacacctgcacccacagcagtccctgctgacagctcttccttcccacctcatctccaggtgtcacctcccattttcccctctgcacaggaggaatgacaggtgctggagcatgacacagtgcctcagggctgaggctgcacaacttctcagctctcggtgctgacaggagggaagtgggtgctgaggtgtcagtcagctggctcagtgtaagacctgctcttattgatctttgctgagagatgactagttgaggggcctgggctaccacattctgcctgtgacctctgacctcctaaactttagtgttctttggcctataagttgagggtgtgcatggtttagaaagcgcatttatgtacattgcttcatcttgtcctcataatgccatagaaaagaccttgctagcctcattttacagatgaagaaaccgaggatcagagagggcacatgaattgctagcaggcactagatccaggacttgagaccacatctcctggctccaagttccttctttcactgacttttccccatactggcagttacttcacaaccccaagggccccatggttctaaggctctgtggttgcaggttcctttagtccccgtgaggcagtgtgggatgagctcagggaggtatgatcaggcaaatgttcactctcaaaggtggggcttcacatgtgagttgaaggggacaggggcccaatgtgtccatcctgagacttctctctgtgggcttgggatgagactccctgctctgtggtaaagaaggcatgtcactttaactgtcagcatagcatggtttgatgtgtagagagtggatcagagttccagctgatttcttccttaaatggcttgtttgttcactcattcactcaccaattcattaattcagtgaaactagtattgtgttggtgaaggcagaaggcaatgctgggaccgagaaatgtggacgttattatattttcccacctgctaaaagacagtggaatttgccattcttttaacacattcttatcttacagaacttgggatctctcttgcattgggaacaactcaggcaatttttaaacacttgtcaggccacctggagaattccaaattagttgaagtcactattacacattagtcaagagtgagttataaaaatatagtacctggagcagatggacagatgagatgggaggatgagagtcaagggtactcctaaatcatgggtaacaacagggaaatgaaggcgaggactgtgtcttagatgcccactcatctctatatgcccagtgcctggcatatagttggtactcagtaaatgctgattgaattgaattgcttgcctatccccagattctcttgtctataggatacaaaaatgagtgctgggggaaggctggggctggggtaaagagggattgtctgttcccagccttcccccttggcctggctgagccaggcagtgtctatgtctctctcatctctatctacctctgccaggctgctcatattctggtcattctattaggaaaatgaaagctgggagctcaatttctaggccattaagcaatattgggcttccagtcacctgtggttatttaccaggttgtcagtgttatctcctgagaattgcttcctgggtgataagggcagagtcagcactgcatattgaagacctaacctcattgaagtggctgtggatggggtgggggttggaggggtggataaggagaaagcaggggtatcacatcacctagcgtttaccatataataaaaatggtcatttattgaaccatgtgccaaagaccacacacacacacacacacacacacacacacacacacacaatttctaatcctaaaaatgtaccaggagttgagaatcattaggcttgactattacccagtcccattttacagatgaagaagccaaggcacagacaatttaacttgtccaaatccaaatggttggtataaggtaaagtcagaatttgaacccaggccagtttgcctttagcacctgggcaccttccctaggccaagtgatgtcactgcctcagactcagcgacagcaccagctgttcctgtgctgctggagcaatttagtctcctttccctatttcccttgtgtctctttgggttcaggccaaatggagaaaagtgtgttatccctttccatctaggaagtctttgttttccattgtatgttaaagtattggtgacattacagagctagtcttgagtgttggtaatattgtctattttcctaagaaaacccccaaatcagctcaaaatatgctctttcctgagttttgtcagccttgcgtgggaggtgacctgcgttggctcttccctttactgcggagcacatggtgtagactctggggaggggcaggtgtgtctgtgcctggctcttcctccttcctctgccaaggtcatcaccccagggcctaggaggcccctcaagagctattgctgaatacccactgtgtgccaggtactgtgtttggtgtgggtggaatggggcctagtgtcttccatggtggtgggggctggagccacgcaacatgagaacgtgaaagggtgtccagcctggccctggggcactggggaaagcttcttgaaagaagtcacatttaaacaagtggaaaggatggacagatggaacttagctgggcagggaaggagaagagcccttctgggagaaagaatgctatgtacaaatgccctgtgggggtggcacatggagagaggcacacagacagaccacaggacacttctggaagcctggcaggtggcatggggagagacctgcagaggtcagcaggggccagtctaggccattctgagtagtctgtactttaaccagagggcagtggggagccacggaaggctttgagcagggggttcactatttcactgtttcactctgagtctgctctggatgtggcacaactcttttttcttttttaccctggaatcaactctgaggaaagccatggaaaaaagttggagccatctccacatccttagctgcagtttgggagaatgtgcagagccaagcagaaagaggggaggcagaggaaaagggagcaggggagaggagagccagggagtgctgcagtaaagctgggagctgccgtcctcatccccagcttctcgccagtggcacatgcagaacgatttagcctgaagcctgttggtaggaggatgctatctagagctaaatatatattgataggtatttttagagggttttctgtaaagaggctgccctaatacaagagtttcctgagcagctaaagatcgaggaaagcagagttttcctcagcactgtctctctgaggctgagaatgtgggggaagagttgtgaatgcagtcctcaggcccccagcccaatttgaatccctgtggtaatagtatgatatcagtgggtatttatatagcatcaccaggccagtgagcctggcgggacctcagagacctgtcttttacttgtccttactgttctgggcaggtgaaggatgcagatggggagcaagggcagaatgggtagagggaggagacatgagaacttgttatttaggagatggggaaaccgaggctgagtggagcaaggcaagggactcagagatacttagctgagctgctagatgaacagatatttatttagtgccttaatgctaggcactaaacctggcatcagcattattaatgctgatgttggggaggtctgcaagcctgtaagccttaccacttttcagttcttcctctcagcatcgttgctggctgctcctctgacagatctccacctcctccctggctttttgtgcatttctagctccacactggggagcacagctgccacttgcagcatctccttttatcagaacattatttctgttccaattgcatttccccccagatgggcaaatgatggaaaagataaggttagaatataggatttcgattccagggagaggtgggcaaaagacaaaatgtgaagcttaaaggtctcttcttagctctgtgctgctgataaatccagttacttcagggagactcctagtgagagtgccagttagtagttgatgggcagctgagttgggattgtgccttgggtgggagggaattttttctcatgtatgcactctgtcttttttctatattgagatgcaccattggttcactcaacagatatatattgaatatacactgtgttccagatgtaagacattggtgttgggatggtttctgtttcctgaaaggcttcttcttgccacccccacccattgacagaagctccatatggacagaactgagtggggcctgaattggctttgatatcaccaaagaggaggaaaagccagagggagtgaagaaagcttcgaaatccctgggtggtttggtttgggactttatttgtctcctggcattgcattcactcagggtgatacagggaaagaaattatggcaaggtgctttctaagtcagaccgttctcctgggcctggagctctcatttgaaggcagttaaactcgtgcattcttgtgcttgtgcatgagtgtatgtggaagagggaggtggggtgaaaatccccaggtatgttttcaaagcagaggtggatatggcataaatgcgaactctatagatttacaagaattgagaattaaaggaactgtttacatttccattctgtggttgaaatatgtctcctcctttgggtagagatttgtgcacttgtgtctatgttgtaaatgtagtccacagttaagtataaatgtgttggtgtgaaatgtgaaaatgcagcagcactatttaatgtatgtgtcactgaagtcaggaaatagcagatataatgagtgcagagtggttaccaaagggaaggggcaaggtggggcagagccgatgttgagaggaaaatgagggcatgctggtttaagaaagaacgtatgaagacaaggtaaggctaaggttactaaagctcaatcactgaattttagatctaggagaataataaatttgcctaactttcccttacttattatttttttcacagaagagaagactaaagtgcatgttgctaagtaacttgtccagggtcttttagatggggtgtggtgagctggggcttggatcctgtgtaattccaaatctaggactctgttgcagcgatgccttactacccctggcgatgagaatctgctgcttcttggttgtatttaggccatgaagctggaggtattaagaaataagattttctgttatttggctggaatatacatgtgcaacttacatggaaacagagtttaatctcatggactgaatgacctggcggctctgggttctggtcctgatcctgacatacattctctctgtcatactggtgatgatgtaacccatctcagcttggctttcctttatgaaacttcatttatgaagtgaaggtaaaacctgctgtagctacctccaccaggtttcatgacaagcaaataggatagtgatgatgttgataatgacagctcccatttaaccaggagctcatgtcttattttaaatgcagaaggcttcatattctatattggcacttgcacatattattttaaatatagaaatgtaaggcaatagtgatattatctccattttacagatgaggaaaccaaaacttaaagaggcaaagtcacttgctcaaggtcaaatagttactaaggggagagattggccctttaattctattatcaacaattctaaagcccttgctatatctagtgtacagcacagcctccactgccaaagtgttttgcaaaacaataaagcaaaataccaaatcagtgaacaataataccttccctccaggacagtgatattataaagataaatgttaaaatacacataaagcaccatgagtgccttgaaaaaaaccagcatataaaaattgaaagtactcaaaatactatggttctgtagacctcattaagaatggtcatttatctctataaaacttgcaaccacagaaacaaatttcactgaaacctattgcaaattttaaaactatggtaaatttaaaattttccattagttataattttgcctcaagagagaagtttactacatatcgcacataggatgtatcttatttcctatcagcagcatatctaattttatcaaaattagtcaaatcctgctacagtcattacccataagaacaacaaagaagttccaagagtaaaagttgaaacaaaggcctttattttaaatttttctaacaaggaaaatgttacattttctagatttccatttttttggtcttccctttctttgtcttctatcctccccacttctcacaaaacatacacaggccagaggggtcagcccctgtccgcccacatctggatgtgacccaggaaggctgacaatgccctctctcctccaggaagaatgtccaggcagagcccttgcacaaaggaggggctgaaaagaagcctgaggtctgacttcttccctcttgtctttcatttccttccttcttgactgccactcttctgtcagttgcctggaccttggtgacagaacatttaggaagggggatcagggccatggcttttctccctggcctccagcactggaacagtgactaggaggcagagtgacaagggtggctgcttcacatgtcagatgcattggaaacaatttacatcactgtgggggtccctgcatctcacctcctctccaccagccctctggggcccagctggccttggagagtccttacctagtccaggttggcatgactagccatgggagagctcaatctgaaatggaactgaaactgacctggtttggggtatctttgctgttgaatcttagtcaaaactctgggtgagggagagaaaaccagaaagaagcccactcagggctaagcatccctaatacccatatatgagctctgaactatggtgtgggggaaaatggacagagtcaggagaagacaggagggaaggaagtatagaggcagccggtattagttgagcacatcctgtgttcaaacattgtgctgactgctagggacgcagcactggatggagatatagcctctattcataccttgctgtccagcagagaagacagatatttactttaatttaatagtgtataacatgctgcataggagaagacttagggtgctaggataacttttcactgggaccctaacctaacttgagacctgaagactgagttatacttagctaggatgagacgagaagagggaaggggacaggatgaggagagttccaggcagagggtaggacagttgtgcagggctagaggtgggggaggccatggcaggtgtgagaaacaaaaagaaggctggaggggaccacagtgattgtaatctaagaggggttggaaagtaggcagggaccacatcattcacatcattcagggcctcgttggcatgtccaggcatgttcagtgggaggccattgaatggtttgaaacaggaaagtgaacagatttgcaggagaggcacgatgtttgcagagaagaagatagaacaagttgcccaaatgactccatgtctcctcagaattagggaaataggattaaagtcctcagtgtccctttcttccttcttgccccctccttccaacatcagccctcaactataattttgtttaacctattggagctgtaccaaaacccagtctacagaccttataatctagctgagcacatgttaaagatttgttaacctgcccagagtagagacatagtccctggccctctgagattatactctgagcatctcctactgattcaaataatgggtaagaattgatgagtgtgtgggcttttattttttatattcagcacagaaattattttaaaaatgctttgctgagaacattgctatatgattattatgatttttatttttctgatagaacaatggtcaaaagatcaagccaacccacatgcttgtttatgggatgtttctcttttccctgttcccaaagcccatgacacatcatgatgctgaatctggatcctaactgaactctggttaataaccactgtaaatataacattttgtgatttaggggcccttacatccttccagtggggagctcaaagtgctctgtgagttacattctacccactcatttggaagagggaaatagagaatcccagttccctttccaagtaagtgtcgtattctctgttctggagacaggtcacccagatggatccttcacatatggactctggtgatagagacgggaagggagtaaatgctcaccccggtcttttctcctgcccacttccatcccacatcccctcttcagatgagtgcagccagctctttaacgtgttagcttcttcctccctgctcttctgttgtccttttcttagtctccctaatccttccctgttttcattttacattctgttctgaaatacaagacttggggagtttgaggtagatgccacagagggtagtacgtggtgttgtggttgtggtgtgtatgagagactcattctgaccaagaccttcttagaactttgtctattagactctgacctccagtccttcttctccaataagcaaattcaagtttggggtgggatctccctactgggaatctgatcaggtcaaagtttgactagctagtactgcaaataaaggaggaggaacttccaatgatttccactccccccagctgtgactggtctgaactctaagcaacaagaagtcacctacaagcactggctgtttcctgaataaagtttccctcaaatatgtaacatagtatattttgtagtgtgtggatgctgttgtgatttataaaatataaatacatctaaaagtattgttgaatgagtagtattgttttcttttttaatttattcaatatagcatagtgattaagaatttgggcttcatagacaagcaaacctgaattcatatctttgctctactgttttctagtactgtggttgtgggcaagtgacccagcttctgttaagtctcaatgtctccatctgcatagaaaaaggaatggctctgggtaataacaattatttaaccatgttgttaaggggctatagtaattgaaataactcctccaagggatggggttggtcttgaatttgtgacattaaaaagagagcctcacacttgaaagaatgagaattgctagttcagtgtaactaacccattgatatgaaagaaggagatgaggcccagaactgcaatgtatgccccattttgcctgtggctaaagcctgattttagtcaagctggtcttcagtcttgtgtagaggtgatggggaaagtagaagtagaagttagatacaatgcttcactcgtgaacagaacagtctaattggagttcacgagatatatggcccgtgtttgatttttggtatttggtagtggaggtctgggagttgggagcaagcagctgtcatccttttgggaagccatgctgtccccagcaggtgacaccccaagtctctttgccagtgaggccccaccaccccacactagtatgagttaggttgctcatgcagagccatttctcaggcattattcctaactcttttccttttcataaagtgagagggcttatgctcatccctcaaccagactatgaaagagacactcacattcccaagtggtggttttatttttttatattttatgtttgtatgggaaattgtggataaagtgaaataattataaataaatggtatgtttccttttttaaaaaagagcaatctaattggaatagaatgtatgtgtggtcctaaggcagctgggaacaatgtgacccgtacagagcttgttccaggttggctggtccaggctataggagtctcatttttaaaatctaaaatacctctcttgcaagatttatgtactagattaagcagggctagatgctctaacaaataaccccccaaatttcaatgggttaacatagtaggttctctcttgctccttgaacaggccagtgtgtcctgaacagtgctcctggcttccctccacttggtgaggtagagacccaggctccttctatctggtagctctgctgtcctctatgatctcgtggtttatgtcccttcaagagaagtggaaagagagagtaagaataaggcatactccttaaatgtattggtatagaactgatacacattacttctagtcacatcccattgacaaggaacagccatgtggctcagcctagttgcaggtgagactgggagatctaatccctaattgggcagctgccttctagcaacaaccttgccctgtgggaaggagagcatcaattttggaggacagtaatgatctcttcattatctatgtgagtataaattgtcagatgcataggagatatataataaatgttttcttctaattattagtaacatccattgagtcaagaaatatttgctatgtgtgtacaaaacattttgctaagtattgaggctagaaagataaataataagatacctgcccccaaggaactttaagtctgatgtgtagatagtatatataggtagatgattttcatttgagcttgacaacatttgatcagaagaaaaaactgggaataaatgtgctctactctgtgcaatcagctttctatctgtccatctatcctcctttcattgaatgggtcccatgtgtaaggcctagcggtgagcagtaggagggacagcagtagagttaaatagggaagagatggaagatcactgggaatgtggtttcactttgccctaatgcagcagctgttgacacactacatgctggtgtaactagccattgaactgttgttgccacctctcttgatcaagctttgaagataagcatgagaaacaattagtgtatttcatattttttttatttttgttgtcatgcttatttttgtcctcttcaagatagcaaagcctaggggtagtcagccagctgaggctatttataaaatgtccatgttggcctggatatcactactggttaacatttgtcaaactctaaactctgtagtctagtaaaacagaggatcaggagccagtttcagagggaaaaccaacctttccatttactaatttcttttctatccttagcctgcacaaagaaggttgagaagtcagaattttagttatgaactgtgtacaactacaacaaatagagtcagtagtaaataaatggttgtcacgagtctttggagaaggatttattattgtggccatagattggagtggtccttgaggatgttaattatgttgctgcttgttgcagtttatgacatggcttctatgtggggtaattggatctaggggagctatccttttccatggaaaaaggccagtttggtctcaggtttatagccctaaggaaaggagtttcagaaagcagttgcccaaatttttcagcctccttgatatttccagtgcacaattctggaaaagggctccttaattcagaaattggcctttgttgcagggatgctaggtcaggaggcagggaggggaagaatggaaaggagagcagagattacctagttattcaggactgtggacctaattaatagctggtgttcagtgctaatcactgcattaaacatttcaaaggatttttaaaaaattcttggcaacatccctgtgaggtaggtactattataatcactactagatgaggaaaccagggcttaggtggttcagtaattcccccatatcatgctgctaatagttagttggtggggtcaggattccaatgaggaagcctgactccagagcttaggtttctgaccgtgatgctacactgccttcctaatttatgtatctagtggctgcatggtctgaatttttttttttttttttactcctgatgcatcttaattaacaaaagtgaaagggtgtatctgttggtctggatgtcaaaatccatccaagggaatataaaactcactacttggttttagttactggaaaaatggcttctattgaagggaattaagagaacaatagattattggtttttctatatcattttgatcttgaaatcaatttagaaatattgtccatttagcctgttaacaataggttagagttataacacaggacagcctggcaagatgcaaggaacaaaggctctggcatgacatagttctgtatttgaagtctgcttctggctttgtgacactgagcaagttatttaacctctcatcctcaatttccttactgggaaatgaaggatttagggtatttctgagtattttatgagactaaactggtatgatatatgttgagcatttgaaacagtgctctgcacatagtagattttcaacaatagtacctgctactattttatagtttattgatgaggaaagggaagcatataatgaacaaatatattctctgggttactctagcccccacaaaaaacttgccctagctgggatgaagttgttgtccttgtattttcaatctgttgctacttgtgctggattatgctagcttctagaacatactaaatcttgagttaatttcttagtccatttggacagctatatcaaaagtatcatagaccaggtggcttataaacaacagaaatttatttctcaacattctggagactgggaagtccatgatcaaagcagattcagtgcctggcaaaggcccctttcctggctgctggacagctgtctgtgtcctcacatggtagaaggggtgagggagctctctggtgtctcttttataaggacactaatcccatataagagcagagtcctcatgacctaataccttctaaaggctgaacctccaaatatcacattggggattaggtttcaacatatggattttggggatacacaaacattcagtctattacagtgggctttagagtcctggaatcacttcatctttgatctgtatttatagcttaatttatcttgatacaggtttcaaaatataattgaatagctacactcacttgataatattaaagtagggctatatctttaaggcacagtatcagctggctgtgaacaaaatgctggctgatatatatggtcttctttttctctctgtattcttttttgaattctcattccagttctggttttaaatgtaccttcagtaaatagatcctctttatttcccttctagttcattacttacttcccatgccttcctacttatataatcaaaatctcatgatagttctatgttgtttttgttgctttccaattacttatctgagtcttcctcttttgagagaatataacaccttaatatttattgtaataaatggtttgtttttattcttttcctttattttatttgctatttattagactttattactgtttcttcatttttcttcttacttctttctgtattgatcagcatcttttaaaccagttttttataattatctactggattatcaaactcttgtggtgaagaccattttttatctgtttcattttactccccatctttccacttctgatatggtttggttgtgtccctacccaaatctcaacttgttgtatctcccacaattcccacatgttgtgggaggggcccggggtggggggggcagtaattgaatcatgggggctggactttcccatgctattctcatgatagtgaataagtctcatgagatctgctgggtttatcaggggtttccacttttgcttcttcctcatttttctcttcctgctgccatgtaagaagtatgtttcacctcctgccattattctgaggcctccccagccaagtggaactggaagtctcattaaacctctttttgttcccagtttcaggtatgtttttatcagcagcatgaaaacaaactaatgcagtaaattggtaccaggagaggggtgttgctgaaaagatacctgaaaatgtggaagtgactttggaactggataacaggcagaggttggaacagtttggagggctcagaagaagaaaggaaaatgtgagaaagtttggaatctcttagagacttgttgaatggctttgacaaaaatgctgatagtgataggaacaataaggtccaggctgtggttgtctcaggtggagatgaggaacttgttgggaactggagcagaggtggctcttgttatgtttttgcaaagagactggtggcctattgcccctgccctagagatttgtggaactttgaacttgagagagatgatttagggtgtctggtggaggaaatttcttagcagcaaagcattcaaaaggtgagttgggtgctgttaaaagcattctattttaaaagggaaacagagcataaaagttcagaaaattggcaacctgacaatgcagtagagaagaaaaacccattttttgaggagaaattcatgctggctgcagaaatttgcataagtagcaaggagcctaatgttaatccccaagacgatggggaaaatatctccaggccatgtcagagaccttcatggcagcccctcccatcacaggcccagaggcccaggaggaaaaagtggttttgtgggctgggcccagggtccctgtgctgtatgcagtttagggacttggtgccctgtgtcccagctgttccagctgtggctgaaaggagccaatgtacagctcaggctgtggcttcagagggtggaagccccaagtcttggcagcttccacatggtgttgagtctgaggtgcacagaagtcaagaattgaggtttgggaacctccacctagatttcagaagttgtatggaaatgcctggattcccaggcagaagtttgctgcaggggcagggccctcatggagaacctctgctagggcagtgtggaagggaaatgtggggttggagcccccacatggagtccctacgggggcactgcctagtggaattttgagaagagggccactgtcctccagaccccagaatggtagatccattggcagcttgcactgtgcacctggaaaagccgcagacactcaacaccagcccatgaaagcagccaggaggaaggctgtacttcacaaagccacaggggtggggctgcccaagaccatgggaacctacctttggcattggcatgtcctggatgtgagatctggagtcaaaggagatcattttggagctttaaaatttgactgccccactggatttcggatttgcatgggccctgcaacacctttgttttggccaatttttcccatttggaatggctgtattcccccaatacctgtacctccattgtatctgggaagtaactagcttgattttgattttacaggctcataggtggaagggacttgccttgcctcagataagactttggactgtggacttttgggttaatgctgaaatgaactaagactttgggggactgttgggaaggcatcattagttttgaaatgtgaggacatgagatttggaggggccaggggtggaatgatatggtttggctgtgtccccacccaaatctcaacttcagttgtatctcccataattcccacatgttgtgggagggacccagggggaggtaactgaatcacgagggctagtctttgctgtggtattctcatgatagtgaataaatctcacaagatctgatgggtttatcggggtttccacttttgcttcttccttatttttctcttgccgccgccatgttaagaagtgcctttcacctcccatcatgattctgaggcctccccagccatgtggaactgtaagtctaattaaacctctttttgtttccagtttcaggtatgtctttatcagcagcatgaaaatgaactaatataacttttttgcaggcttataagcatccatatacatacagcactaaatttgatgctgagaatatagcagatttttaatacttatgtgtagctgacagtttgactgtgaaactcagttgattccagtgaaaaatggtgtgttgtagtggaaagcccacctagacccaaattagtagaatcctggtagtggtccttattggtggtatgactgcagcactagttgttttatcttcttgaatcttaatttaaaatgagatagcaatactagcttacagaaccatcgaagagactaaatggaatggcatatgtgaaaatgtctggtaactttattgttgctggtacctttacctgtctaccttcctcccatcccttctgctggccagtagcatgagtcatgaggggcaccatatgcagttatctatattcaggctatgggtgctgcagagaagagagcccattaaaatttgatggtgttcccaggagctgctgggctggagaggtaaaatggaagagaagagaaagaataagaaataagaatagtcagaaattttgcagcttttgaagaaggaaggcacaggcttatggtttatgatctgcttgtatgcatgcctgcctatgggttgtatttattcctgcctgagattacatcaaagtacatctacatctatatttcatattcatcctctataccatatattctcctaaggagaactcttgaatgtgaactgtgtggcagtggtgtttcctttgcagcttgcttgctttatgaatgattttgttgaaagaatttaaaagccttttccttcctttggagaaaccataacttatttggataaattgctccagaatgggattcccctgtcttttctgtttgtatcttttctgccttttaccaatccatgccatgatgttctgttgtgtgggaaccagtctaagacctggcttcctagggggatagcccccttcctctgtgcccacttagcacttatctgcattttccctccatcagcaggcatttgtgtcccctctgtgttattctcgtggccctcttgtttcttcactgagattgagggcgggggtcatgttctcctttccctgttctctagggtgacttgtgtatatattcttagacccacaatagatgcccaacaaatgcaagatgagtgagaggtgaaaagcagggttctgtgcaaacctgtccatggagctgggcagggcgggaggtatggaaatcatgagcccagcttacgccttatcgtccatgttcactcatactttgcccagggtgtgtttactgctcctgagcccaggtagcaggtgtaaaaatctaagctataaccaaaccttaggcccaggagcagtaagagtgtgggttctaagctcatagtccagctgtgggactgaggctgaaggtagaaaaattgccaggcatggtggctcacgcctgcaatcccagcactttgggaggccaaggcgggtccatcacctgaggtcaggagtttgagaccagcctggccaacatggtgaaaccccgtctctaccaaaaatacaaaaaattaccccggtgtgatggcacgtacctgtaatcccagctactcaggaggctgaggcagtagaatcacttgaacctgtgagacagaggttgcagtgagccgccattgcaccgttgcactccagcctgggcaacagagtgaaacttcatctcaaaaaaaagaaaagaaaagaaaagaaaactgggtgacatggagtggggtcctttgatcaggactctgaggaggctggtgtgtttctcccttcctgtttcagaggcagcccacatcatttagccaattaagttggaggactctattttctgtttgagtgtttgttgttttttgtttaaaataaatgatgtgttaatacagtcagttgtttgcatgacacagatttcttttcaatcagtctcttttcccctctccccactcttcctggacaattagcaaagtgtttggtctttggtttggatgaataattgattcagaagctttgtgaatgattcatggcccatatgctggggcagcatgatgtggtgtatgggtgtgtggcagcagcacctcattacaaaggtcaagcttctcccaagcttggtgcaggggctgtgcaggccacctccaggggcagagcacgttgcacctgatctttctctcatgttctctcaaagagagagtgttggagcttcttccagaaaagcaaggttctctatgggtgtatgacttccagaccagtgattctggtttgggttggatttgtcagtgaactgaagctttcccctttaagccaacacttcactctccccaagctgaatagctgatttgattttcaaagcatttgaggaaaggagatctcttgcctgtcttcctttacattacagtacttcaaaccttcccaagcaggggatacttttttctttggatcttctcctaaacactccctgctactacgctaattttatttccttgtctatctcctttactggagatggagaacacctggttaccattcgctttataggtctcccttgtctttgaagactattattacatacttgcttgcatgaggcaatgggactgttgcctagcttgtggaagagtggcattccctatctacaaaacctctcagtatttgagacttcttaatgtgtcctggtctttagaagctgagttaggaaaaataagttggttacattaagtcctgaaccaagttttttgtctcttaggcagtcagatcccacatttttaaatagggaatcgagacagagacaggatatgaataaaatccaagactctgatgaagatgtggcagtttggtgattgatcatttggggtttttttagtaagatcataaaaatattgcataaaaatttattttctagcataagttatgattatcatgtttaggtccctaatccatatggtgtttctttgcatctagtatgtgaggtatgactatacctatatgtttttccgtcacttcccaactccactgagtgaatactaacagtacaacttttgcccactgatttgtaatgtcacttctgtttgtataccaaattcccatatatatgtggtctgtttttaggctgtcttttctatcccattggcaatgattaatgactatatttttataaaactttttgataactgatagtgccaatcttcccctccatttgtctttaaaactggctaatcttagccattataatttcatatgaattagaactaacttgtcaaaatcttcaggttttgtttggaaatgcagtggatttattgactacttttggggaaaattaacattttcacaatgttgaatcttaccaatatttctccacttatttgggatatattttataccctattatagttttggagattttttccacttatgacttgcgcatctttgttataatttttcttctgtatcttgtaattttattactcttgtgaatgatttaatttttttatttctaatagaatgttgctaatgtataggaatgttagtttttattcgttgatgttatatccagcaatcgtgtaaaagtttgttagttaaaatcatgttggtagatttttttttagattatataggtagaaaactgtattaactacaaacaagtgttattgtatttgtttctttctaattcacctagtatatgtttctttttcttatcttattgccctaaacaggacttccaggaaaatgttgggtaatgacagtaatagaaggctgtcttattttgttccttatttaaagtttaacaatgaagacagatgttccttataatgttatggtgaatactctttataaaggaagtaaagaatgattgttaaactaatgtcaataatagctcaatattttcatctaattcataaactcaaaggttttggaagttcattctgtagaagattaaacattgacattattgtgggtgctattgaaaactgagttaaaagtttagtactagcaataagcttatttttggagtgataatatacatacaattttgatgaaacatgatgttattgtataaacaaagtttttactaaattaagaaacctatggaacagaaacatataggatgaattgtatggacaaagaattcattatcacagccacacaaagtatggtattccgcattttgaaataaagactatgtattgggtacagtatacactgcttgggtgacggctacactaaaatctcagaaatccccactaaagaatttatccatgtaaccaaaactacctgtacccccaaaactattgaaataaaaataaaaaataagaaaagaagtagtaggcaaatagaatgagtaaaaaagaaaaagtaacaagaaaatttagcaagttcatcaaaaagcaagaaagcagagaaaggaagcgattttaaagtgaggcaagcagaatgtgtgaaagtagaagtaagtcctgacttaatagcaattgaaacaaatgtaacagattaaacttattttttaaaagtcagaggccctgtgactttatttaattttttgatcttatgtttaaatgactaagctaagtaaaatgacactagaaaattgaaaatagaggaggtggcaaaaggtgttctagacaaatgccaaccaaaagtaagtgaacataacattaaaaaaattcaaggtgaaaatatcaaaggaaacaatagtgactatttcactgtgataaaaagaaaataattgaaggacatttaaaacttatgcaccgtcagaataaatgtctgttaaaaacgtaaaggtaactattaggtaaggagatttccaactggttttgaacaaaatgcaacaaaaatttaggggtcttcataaaaaagttcagtatcattttgggcacttaggttgatttacaaagcaggtcctcagaggcttaaacatttataaaatgtttcccctcccccatttgtctttaaaattggctaatcttaggcattagaggtcctgaactaagttttgaacaaggtaatgggcagcaaagagaaaaaatgtatgctgcaattctgactttataaaaattcaccaccaacatcatcacaaaacttttgtagttcagttactctgtgtatttgaaatttttgataaaactataatgtgtgtatataaatatatttttatgtatatatgtataaatgtaaattacatttctgccatatatacacacacatacatacatatgtaatacacccatacccatgcacatatagatgattacctttaaatttttaaccactctattgttgtcttttatcctttgtggctgatagtgcttccaatatcaacatgattatttctttttttttttttttcgagacagattctctctctgttgcccaggctggagtgcaacagtgcaatctcagttcactgcaacctctgcctcccgggttccagcgattttcctgcctcagcctcccaagtagctgggattacaggcatgcactatcaccccggctaatttttgtatttttagtagagatggggtttcaccatgttggccaggctggtcttaaactcctgacctcaggtggtccaccgaccttggcctcccaaagtgctgggattacaggcatgagccaccatgcctggccaacatgattatttctttacagataacttttgtttcctctttcattggaagcattagcattttttccttacttttggtgctgtaaaatttcactaatatgtgtcttatatgatggtttctatttatttttatttttatggcattttaagatttctatttttattcaatgctgggaagtacttttgaattgattcttttactttcaaattctctgcttctccacttcttaattttgcttctctccattttatctattctttatttgtagcacttgttttaaatgatgttggaatttcttccctctatttttaatcttttctttatatttttcatctttttcttactcttgtgttgatttctgggaacactgctcagttcagtttttcacatctcaaattcacctgtctattttgccactcaatctacttaatcattttaaaagttttcagttatcgaaatgttcaattgcaccatctctaggtaattttgtaaaatgcttgcaatattctcacacttttctctaagctgataattatatgtcttcattctcattgagtataagttctttgattgttgagtttgttctctctctctccgtggtattgaaattcctcaagtttttggtgattcttgattgtaatattatcttctttctaccatgtctgtttgtgcaaacttcttggaaggagaatacctatgaagctaatagtctggcaagggtatagaagtggtgagacctgctgctggatgggtcactttgatgaccagtcccctgggagagagcacttcctgttcctctcaggcatggaaaggcatgagagcactttcccatctttctcacccaactttcatgcccattgcccctgcttgtgggcagattttcctttttgctgcctggtctgagggataaggtgggttaaggaggagggttaaagtgagtgcttgatcttcctgctactgtattcaaaccatcaccctgttggtcacctggatcccatcagatcccagtggccaccctctgtaggtgggagcacttgtggtgacatgcctacatttagagtggtcatattctcttctgagggctgggggccgtggtttctttttcttttctttttttttttttttttttttgagatggagttttgctcttgttgcccaggctggagtgcagtggcacgatctcggctcactgcaccctccacctccaagattcaagtgattctcctgcctcagcttcccaagtaactgggattacaggcatgaaccaccacacctggctaattttgtgtttttagtagagacagggtttcaccttgttggccaggctggtcttgaactcctaacctcaggcgatccacccaccttggcctcccaaagtgctgggattacaggtgtgagccaccacacctggcctgtggtttctttttaaaaatcagattgtagctactttctgtccagaggggattcatcacaacatctagcctagtgagggtttgtttctcttttttctgtccagtgtggttactgtatgtatatagaaaatgatttctaggaatttggtggaaggggggagaggtcacagtgtgtgttcagtctacctgtctgagagagaagttgaggcaatattttcttctaacctctctgagtctcagttacttcacattcaaaatgaggtggtgatgatgatgaagcatgagggtggtagtggtgattctcagttaatatttgaaattggagtgtatgtcaggcactgttctaagtactttacctgtgcaaacacatctaatgcctcaacaaccctatgatgtctattctattactattgccattttatagatgaagaaacagaggtacagtgagattaaataatttacccagataaggggctacctactatgtaggattagtttgagaattattaagctaacacatgtaaagcacttagcatagtacctgaaatatattggaacaacaaaaatggcactaataaatatatactgagtgaatgaaaagtcaccaaatatttatattccatgcagtttgcagaagatcttgtagaagttagttggacagggtgccctgttctagtgttttctgtcttagtgtttttatgtaatataaaagctgtgtgtttctggccatttgattcttaccctaccagctcaatatttaaaatttttacatattgagttattggtgcttgaaaccattttaaatctttctgctttctcatatgatatgattgcaaataaattaggtaatgagttttaaaaaatcagttgtggttaatctttcaggttcagagaactgaaaaatatatctgctttaagggaacttacattctaatttccatacacatatatattacatgcatttttatacatgctgcatgagaaagatgtcctttatatggtggttctgtattgaataccagcatccagcacattgtctggcacagagcaggtgttcaataaagtactgctgattcaatggaatctttttcatgtgttatacgtaaatgtgcatgtatatgtaaattggaatgcaaatctgtgccttcctgggacccatagtctagtggaagagagtgacaagaagcaattgcaatacatcaccgcactaatgctctgttgaatgtattctgggagtatggaagaaggagaaggtgactgtgtttgggaaaaaaaaatcacagagaggtgatatttatttaagctggatgttgaaggtgggtaggagattgccaaggagaacatgggaaagggcattcagtcagggaaagtggaggaaagcaaactgactagcaaagtcctgagaatctacaaagtgaaaatctgttcagtgatatagtgttaatctgaaaaggcttctgttgaattttgaaaaagatcatgcagaagatgataagcatggtttcacaaaatgtaatataattctgcaattctttgcctaaaggctttcagtggtttgctgttttctgcagcagaatacaagatccctcctgacctgaccacatgcagcctgccctccagctatactggactacttgtggttccttgaattgtgtgctatttcatgcctccttccttttgaatgtgctcttttgcatgctgtaacaccaaccctgccatccctctggctggtatctattcagctaagtgactattccctgactgtgcttcctccccatttccttctattttccgttactcgttgactaggctcaccctaaacttcactcacccagttgacattagtatctcctccactacatagcttctcaccaagggcttgaaggcaggggttgtattgtattctatttgaactccttgtgtgcctggcacttagtagtcattcagcaaatattaccaaatgaacagataatgactgaacaagctaattaatgaattaatgaatgaatgaatggcagatatgaaagggggaagaattcaggaagacaggcaaaatatttcaaggatacctttaaggccaaatgaagaaatggaaggttgatccagccaatccttgtcacatgatcaccttcatgggaggaagaatatattattcccggtctgcttaccccttctctaatggtccttttaccactactaatgctctgtatgagcctctcaatccaggtgtcccgcaaggtctgagtcccactgaagcttttcttaagttgagtaaaagtaacctgaaaaaactgataagcatttttcttagtagaaatccttcctctgagcagtaacctctgaatattatgtataaaaccattacattacttaatggataagactcatgttaaaattcaccttgtctccacagaagatagacccagagtttagtctttgcttttagtggccacatgtaaaagtggtgtacagtggagctgtattacttattataggtcttgtgttaaaataggacaaaggtaaaattagaaaccaggatgccagatttcaggtccccagtcttacaacaaataaacatgcttcctatttaggtcctctttggtctctctcctccttatcatcaccatcagcagatgctcaatgaacacctcctatttgggtgtgacatcctgttgtgtgcttgtgatgcacagttagacccttcagattgtttataataagggagatggagaaccttcacaaaatcccccgatgtaaacgcatttcctagatcccttgtggaatttattgtaattctatacatgcacacaataaacatcagagggcttcgagtaggtgcctcatcatcaggaatgccctgtatcctcatctcccaaaccgtggcacagggctgattcccctgtgtttactaccctaatctctgtgctctatggcaacatggtgttttatatggcttttatatggtagtgtgtactccttgtgtgcctggcacttagtagttattcagcaatatttgataaatattgaacaaattaacaaatgaatgacacatatgaaagtgagagaattaggaaggcagatgatggggtttagaatatgctccccaaaatatgtcaccttggcgtactcaatgttttaagctaaaggaatttgaaaaacaacgtgtgcaggaaagactctctggtcttcccctgaaagagctcatagaacgctcatgtgagaggtgccctcccatccctggaggaaaggagcatcgtgatccctgaagacagagggacactgacagggatatgaacaaatggacctcgcaaagtctcccctagtttactgtacttagcccacaccattttgtcttattgtatttttccataattttccactcttcatcaaacctggtattaaaacagtcaggtataatcatttcttggagtcctcatttccttataaaggctcctgtgtcttataaaagttatacaggttaagcatccctaatccaaaaatccaaaatcaggaaatgctccaaaatctgtaacttcttgtaacgtggtattcaaatgctcattggagcatttcagattttggagttttggattagagatgctcaactggtgagtataacatgaatattcccaaatcaaagaaatccaaaacacctctgctcccatgcattttggataaaggatatttaacctgaattaaataaatctgtatgtttttcttttgttaatttgtcttttgttatagaaccacagctgagaacctggaagggtaaaaggaaaaggttttttcctccactacgcgggcaaaatattgcaaggatgttcttaaggtcctaaaaaatcttaagatttaacaggtttttaggcagaaatgttgtactttccatttagaaagaagttgaagctttatatccaacattatatatgtttaacataataacagttaaagatacacttaaaaaaagatggagagaattttcaaggaataggatttcaggagctagaggtactaggagttatgaatctccccattagataggtagacaatgaaaaaaaaaagggggaaggggatgatttgcagtttgatggtaacaggatcgttgagagcagcaaaacagaagtaaattgatgctcatctcccagattagttgagaacggcctaattagctaatgaacagttccagtcctatgttctgaaaggctctgtttctgggcaagccgcagtgcttagcagcagctgctaaaccatgtggacatgctaacaccaagcagaggagcacatgttatgttttgacctgcaaagactcgtctttttgagtcacacattcttcaaggagtattagagatcttgtttcttcgtataatagagaagtagcagtctcagtggcatgaactctggagccagactgcctgggttcaaatctcagctttgtcacttactaacacagtgatcactgctgcttggtctctatgtcctcatgtaggcccttgctccccaccattgtatcaggtttggtctgggtgaccaagagaacacggcagaagtgagggtgtggcttttgaggctaggtcctagcagacattgccatatcttccttgctctcttggatcacttgcttggtggggaagcaggttaccatatcatgaggacactcaaggagccctatggaaagtcacatgatcaggaactggagactcctgccaaagccatgagtaagccgtcctggaaacccagattagtcaagtgttcagataactgcaaaccccagctgacagcttgactccaactgtggttggtttcttgactgcaacctcatgagagatcttgagcaaaagatccccacaaaaacactctcagattccccacattgctaattactgttttaagccacgaagcttgcttttcagaagtgttaatagataattaaagcaaaaaactttgtaaagaactagtttaaaggatgttcttaacaacagacttgacttgatgaagaaatagtggctgatattgtttggctttgtgtctccacccaaatctcatcttgaattgtaatctccacagtccccacatgtcaagggggagatcaggtggaggtaattgaatcatgggggtggtttaccccatgctgttctcatgatagtgagtgagttctcacgagatctgatggttttataaggggctcttccccattggctcagcacttctccttcctgctgccttgtgaagaaagtgtcttacttcccctttgccatgattctaagtttcctgaggcctccccagccacgctgaactgtgagtcagttaaaactctttcccttataaattacccagtcccgagcagttctttatagcagtatgaaatcggactaatacagtggcatgccttttaatttcttgatttatggaatacctttaaagtaatgttacctaaagtaacttttgtggaacagtagtcctgcaagatgctccatatataaggggtttgatgtgtttattagtttgggaaatgctgcatactagatctccttcttggaaatacacgttgctcataagcatattaaagaatataaacaagtcttaaggattttttgtttgtttgcgtagtccattgtttcctaaactcatataaccaaggaatttttaaagtcaaatgtcacatattaaaatattagagaatactctgtaagaaatgttgtcttataacactgattctcagacttatgcctacatcagaatcgtctggaaagcttaaaacgagattgttgggccccactccctgtgtttctaattcagataacctggggtagggcttgaaaatttgcatttctaataagatccctgctgatgctgatgctgctgatgggtgcgtgtgtcgggaggggaccacactttgggaaccactgttcactagggtttcagtttcctgagtaagagcttaaagaatgaacatgcaaatggccaataagcacaggaactgatgttcatctgctatggactgaatgttcctgtccacaaattcatatgttgaaaccccagtccccaatgtaatgatatttggaggtagggtttgggggagctaattagttcataagggtacagcctttatgatgggaatagtgctttcagaacagccgtaagagagcttgcttcatctctctctgtcatgtgagaacacagtaagaagatggttctctgcagactgagaagagggtcctcgccaggaatctaactggccagcaccttgatcttggacatcccagcctccaaaactttgagaaataaatttctgttgttgaggccacccagtgtatggtattttttaaagcagctggaactgagcaaggcaacatcattagccattagggaaatgcaaataaaaaccacgataagataccacctcacacccattagggtggttacaataaaagagacagacaataacaaatattgagcaggaatatggagaaatttggatcctcacacattgctgttgagaatgtgaaatggcacagcctcttttaagctccttaaaatgttaaacatggaccatatgacccagctatttcacctctagaaattttaagaggcataacatatacccatacaaaaagttgtgcattaatgtccatagcagcatcattcacaatagacaaaaagtatcccaagtgtacatcagctgatgaatgggtagacaaaatgtggcatgtcagacaatggaatactactcgacaatgaaaagcaacaaagtactgatacttgctataatgtgggtggacctggaaaacataaagaagttcctcacaacaggctacatattttatgactccatttatattaaaaagttcagaatgagcaaatccataaagggcgtacgatagttgttacgaaaggctggtagaagtgaggtggggagttgactggtaatgggtttggagtttttttggagcgttgaaaatgtcctaaaattagatagtggtgatggttgcacaatcctgaatatactaaaaaaaaaaaccccactgaattgtacgctttagaagggtaaattatgtggttgtaaattataactcaataaagctgctataaaaatgcatatagcttctaaattaggatggcaacaaaagtacaaatatccaattgcagtatacgttttaactttattgtaacctataaggtgccagaggcatactacaaatggtggcagtggtgggttggtgcaagctgaaaatttagatgtagctggcgttttagcacccttctccccctccttcattcccgtgcagataataaatgtttattgttgttctattgtggccccaagtgagctgtggacatggtggggaagcagcaggctgaccccggagggtttgctaatcagagagagtgtaaaacctgtttcagaatctgtcatttacatggggcagcaaatgacagatagcaatttaaagggtcacctttcccagggtatggctgtttgttttggtcattgtggttggttgttttgcattttaagaatgtttggagccttaagctagcacagtggctctccaaacttcagcgtgcatcaaaatcttctgaggttcttgtttaaaatgaaaaatttggccctacccccagagggtaaggaatctgcctgtttagcaagcactcagatcattctgatgcaggtggctcatggaccacggtaaaaacatttcagctccaaaaaaaaaagtcttgctatgttgggggtgtacataaataagcatggggctgatctaaccaaccccaggacagtagttactcccagaaggaggggatgaaaacaggttgggtggagccttgcctgtgtctgaaatgtctaggttttttaaaacatgatttgaaagaaataacagaaaatattaacccctgttacatataataccatgtttgttgtatcttttgccttattttttgactatttgaaatgcagtatctcaaagtattttgtcatacttggcattttagatgttcgtccattccagggactcagtgcactgaggcagggaagacagtggtccagttggtgggctccctgtgtcctgcagggctgtggggggatggcagtgctcccagcttggaatccccccacactgaggtgggagatttcctcctcccacgtgagggtgtggtcttgactactcctggctccacacaggctgtcccttagggcagggggcaggagctcaagaagctggaggacagaatttctcccctgagaacaggaaagagaggaggcacgaggaaaccacagtctgtctgctttaccctgatggacttctgttcagggagtttgggtgaattccacatttggatcacaatagttgtcgcctgcctttcttttccctcatagctttcaagacccctttcatgtccctctgtctccaggaaagatgatttatttttttcttggcccaaggctcccccaggggccccaagtccaaacactttctttgctgttccttcaggagtgttctttctgtgatcccattatattgaaatatatgcagatggagcatcacgtgtgcctctagggggttggggaggagcctaaggaacctagagagccatcctgagatgtggggagagggttggggtgctgcaggagagcgggatgactggcctgtgttgacagacacgccgtggggaagcagaagctgccccgacagtcttgtaaatggagtgttcacctctagcagatgtaaggcatggtttggaaggggatgtgtgccaggtcgtcaagtttcacagcagtctcaggccagttgggaagcctggcagcgtgtgccatccctgagcaagagggaggctggaagagaggactgtggtctgaaagttaggagccctgggctcttgctagcttcttccttcttcgaacctctgccctgctgtgtgagagcaggtagtgcccttcctctgccttatggagtgatgagaaggaattagggcacttggaagatgctgatttctaatcctttagttgccaccaggcctcagcccccttgactttcttcctcaccccctcaattttcctgctgcccttgagctcttcataaaagtccctgctggggccctgccttctgttttctatctcaaattgtcccctttcccttcccagacctgttgtcctctatgttgaaagtttctaaagttatgtgagggactgtttggggctagggtggaagggggctcttagtagacaccaccactcacccattctgtgccaagcttggggccagctgctgcggtgataaacacaccctcttctctacacaaaaaagccgtgcagacagtgcacattcatcagctcctgttctgcctcttcatgacaactgtccacctctcaggacatgatgtgctctgaatatcagtgtcgggccatttcaaacccaggggatttggtgtctggtgttagcctggggtaagaagtagtgacccaggcactgggctcacccctttcctgcattctttatgcctgacagtttctcaagtcgtgcctgtccttttaaatcaagcgatctgttcttccctttgatgtcgtcctcctggccaccagcctacatcctcattacctgataacttagatgatttaaagcctcactggttggcttcttgccgtcattttctccccagcttcagtctgttaacggccatgaaaatctcactaaagcccttctacagcaaggcacatgcctaaatgggaacccaaaacatctccctctttcccattgccccctctgccctgttctctgtggcttttgaagccttcctcagcactgatgccacctgaactccagcagtgctcatgcctgcccccgactctggccaccgatgccaccttaactccagcagtgctgatgcttgcccctgactctggccaccgatgccaccctaactccagtggtgctcatgcctgtcgctttggatttctcacccctgttcatgatctgccctcctctggaatcctctatcctctcctctttcctgtgcatctttcaaagcctttcacgatgacacgggctggtgcatttgcattcagatcctctgttcactagaaatggaagggaccttggaggtccttgagtccagcttctttccagagtccccgcaaggggcagtaacttgccactgactacacactaggttattccaggaccagacctctcactcctagtccagcgctccttccaccacaccatgctgcccaaagatgtagaggaagcattctcgcccacagctgactgggatgttgtcatcaacagcggcggagatgcagtgggagtaaataacaatgtttgtggaggccttcttattcattgcatttgcgatgcaattagcactttattatagcttgttctcattcttattgtcagttccacacattgagccctttattttatcagaatataacactgcctcgtttgctaattacctcatacatagaagtaaaaactgtcttaaatatcttttgtagcccacagcatctcctgaagttctaggcatagaggagaacttactatctacttgttaattcactgggtttcaaggacaattccaggcaaggctcacatttgagccattagttgtgatgaagacctgtccactaacagcattgtcagctttgccttaattttctatctgaggcttcttagagcctcctggttagaggtaggtatactttcccctctgttcccataacactttttttttcttttttttctttttttttttttgagtcagggtctcattctgtcacccaggctggagtgcagtggtgcgatctcagctcaccgcaacctctgcctcccgggctcaagcgattctcctgcctcaacctcttgagtagctgggattacaggtgcgtgccactaccacccagctaatttttgtgtttttagtagatacggggtttcaccaggttggctaggctagtcttgaactcctgacctcaaatgatccacctgcgttggcctcccaaagtgctgggattacagatgtgagccaccgtgcccagcctccataacactttattagtatctttattgttgctcatgtcatatggataattatgaacagactcctgcctcctcctatgtttctggggacaataagaagtctttctttgtatggcccgtaggctgctttgtccacacaatgtcttgcacatggttgtgctcatacatggttgttgaattgaatattatgaataatgacagagttaacagtagcttaccctcatgtggtttatctacacagcccagggctttcttccacagtgtggccaaaccccagactgggactaaggccaggctaggagggtttgggatggtttccagatgggcaaagatagttttgtgtctcagaatgtgtctctaaccacatctcaaaaccaaatatgataaatgactttcgtcttatccatcatgtttagttggctaagcctcttcctctatcagcccagataatgaagagatgggatttttattgttttctctgtggcacagagaataaagcaagttcccaggtaacaaggcacagcagcatctttcaagccccgaaactgagatggtctgagaagagcaggcacgtctaggagaaacagaaaggaaaagccagccggaaaggggaatcattcttaatcgatcccaagcctctgagagctggaaggtctgactgcattttacaaataaaaaagtcaaagccccataaaggaaagtagcctaaagccacagggatggtgaaggagtggcgtcaggatgggcagaaagagctctggactcttgggctgctgctacaaccacctggtgtgggttttcttaacaccacagctccatcaggttcttaggaaaaatgtcacacaaccaggttgtcaaaagggctttgagggcattaagaaagggacagaagtggatggattagaatggacaggtagggtaccaaggggccagagtgagaatgaggaagaagggctgaagagagagggatcagtcgtatttgcttctgtttctgaatagtttccctttttggaaagagaagtaagagaatagaaggctaaaatcatgccacagactggcaggggtggttgggtgtagacacaacagctcaccttcaggctgctttcacattcattcatctctttcccttataatgatgatgctgcctccagtttttagaactttctggaaacttctgagaagtgactgtctaaagggggatgatgggagaaggggagttgtccatgggttcccatcgtgcttgctggagcaatgggtgttggcagatttcttcagaaggagtttgtcagcagtggggtggggctgggaagaaagccacagtgaggcaacaggtgcaggcatggagaccagagcaagcacagtgtccgtggagaacggcatgcatgtcacggcaaccactggagtgagcgtggagtggagcatggcggagagtgggggtgaacaggcaggcaggagctctaggtctgtgtactgcggtgacacttctggattctactgtgaagacaatagagggccattaagaggcttaaagtgagggggtggtagaatcctggctacatagacctcccagcactcagagccttggaatcttgccatggtggtacatgtgtgtgttgggggtaattagggaggaaggggtgaggctgagctaggatgactagttaggacaccatctttactgtctagaatatactgagggctgtgacctgggctgtgtcagtgggaccagaggaggggacagatacaaaaaatacttaggggtctttaaacttgggggatgagagggaagaatccaagatgaatcccaagtgtaggggagggtggcttttttcaccctggatgaggagcagtctggtatggagaggggatgagggtggctctggctttggcggttgggtgtgtcttttggactgggtgtggtgccctatagaaaggctggagcttgggacaggtctgtgtggacacctcgattcatcactgcatggttggtagttgaaaccatagacatgggtcagattgtcccagtgaaatggcagagaagagggcaaggacagactccaagaggccctgaatcaaatgggtatggaaaatatggagggcctgggatggaggctgagagggagctggcaggaggggtgggggcagattggttgagaccattagcagggaaatgagggagaaagagtttccagaagggaatggttaccaggttcaaatgtgagggaggaattcactgctggcatttgtttgagaagccctgacctttttctgttcccttgctagaaataaatgctttttttttttggtagcagacagtaatgtactggaatggaatcatgattgttccgtgtctcagaatccatatgtaaagtcccttgtcagatagcagggaaacagtcatctttgggcagtttgtactgagagggaggggaggccgagtgtaaaggatcggtgccttaattttagcaaggctctgagccccttggaaggcaagctttatttctacatagattgaaagtattattattattacatccttacgctgtatcagcgccaaacactggagtcctcaatactgtatttatttctctgggcttttggaggggtggggaagaaacgggacatttaggttgctaagtgattgtgcttgcttctaaaaataatgagattccccagtggctcgttctcctgtgttttgcttagagttagaggatgccaaggtcaagttatagatgacaggctgtgtctccaggtggtgtcagggcatcctgttggggaaggacaaggtaaactctccctctctggtcctcccacctgcatccccttagggcccactactttgggaaattgcaggaaaaactgggcctccccctgcttggattgaagagcctcgcctaggcagtcagcctcagtggttgccatggtgatggtgggtggttggtggggtggtgatgcagcgtttggcctgtgcagctgaggtcctcaatgcaggctgcttggagcccaggctgctgaagcttttgacagtttgtttaggattccagagggtcacttgctgcggtgttgaaatcttcagacagacccgccagctcagccagctgaaaccttcattgttgaatatgcatctcacaggccaaattttggcaggcgctcatgggattaggagctccacagcaaccttggtgggggaaggggtgtgcgaaaaagctctgtgcaggggagagtggctgggataatagactctgaggacaacagaaggccagaggcccttcagatcgtccagttcatcaacaccttcaacaacatccctgacagctggtcaccaagcttctgcttggactctccttgtgatggggagctcactaccgggcaaggcacaccactccattgttgaataggttttacattttctcctctctccctcacttctttcgttcctccctcattctctccatctttccttcccccctcctttccttgcatcctttcatttttttggcaaaattctggccccttctaatttgattcactgactcaagttatgccaagaaggaaagcagtgtaagctttcatcaaagtgacaaccacttgccacccaacaaaacattcatacttttctcagctacttctgacattatttcaagaccccttgttatttccccatcccctatatttctccatattgctcttaaaatataacacccagaatgaaccacagtactcgactggtctgaccaatgcagaggactttagggtgacacccatgtttgtgaacagtctgagatgattttgtagccccctcctcacacccttggctgatacgaaggctgtgattctctgtcgttcccagatcttttacatatgagcagctgatgctgggctctacatttgtacttttttgattttgtcatctaagctgttgagaaacacgttgaaatggacagaaatgatgatggaatgccgtggcaaaactctagaggcctccctgcaggtggaaattataatagtattcatagctttttttttctgtttttatatccaactatctacttgtctaaccaattaatcactgatctttttttttttccttagagtgttccattccattgtatggatgtgctacagtttgtttatttattcagcaatggaaggacatttgatgttttccagtttggggtgattatgaataaagctgctctaaacattttttaaaatcattatatatttattattttactttaagttctgggatacatgtgcagaacgtgcaggtttgttacataggtatacgtgtgccatggtggcttgctgcacctattgacccatcctctaaattccctcccctcgcccccaccccctaacaggcccctttgcagggacatggatattttggtgttatttctgaggtctctgttctgttccattggtctgtatatctgtttcgatacccagtaccatggtgtttcggttactgtagccttgtagtatagtttgaaatcaggtagcatgatgcctccagctttgttctttttgcttaggattgtcttggctatacagggtcttctttaattccatatgaaatttaaagtagtttttttctaattctgtgaagaatgtcaatggtatagcattgggaatagcattgaatctagaaattactttgggcagtatggccatttttacgatattgattcttcctatccatgaagatggaatgttttttccatttgttcgtgtactttcttatttccttgagcagtggtttgtagttctccttgaagaggtccttcacatcccttgttagctgtattcctaggtatcttattctttttgtagcgattgtgaattgggagttcattcatgattcggctctctgcttgtctattattggtgtataggaatgcttgtgatttttgcacattgattttgtattctgagactttactgaagttgcttatcagtttaaggagtttttgggctgcgatgatggggttttctaaatatacaattatgtcatctgcaaacagagacaacttggcttcctctcttcctatgtgaataccctttatttctttctcttgcctgattgccctggccagaacttccaatactatgttgaataggagtagtgagagagagcatccttgtctcgtgccagttttcaaagggaatgcttccagtttttgcccattcagtgtgatattggctatgggtttgacataaatagctcttattattttgagatgcgttccatcaatacctagtttattgagagtttttagcatgaagggatgtagaatttatcaaaggccttttctgcatctattgagataatcatgtggtttttgtcattggttctgtttttgtgatggattatgtttattcatttgcgtatgttgaaccagcctggcatcccagggataaagccgacttgatcgtggtggataagttttttgatatagtcactggtattttgaggtgattgctatcattatcatgatcttactaataagaaagcagagccacagagaggtaaaataagttgctcaaggtcacacaggctctaaatagcaaagtcagtatttgaatttagtgttttttgttgagctagggtttcactctgtcatgcaggctggagtgcagtggtgagatcacagcccactgcagccttgacctcctggactccagggatccaccccagcctccctagtagctgggaatacaggcacattccactatgcccagctaatttttttagttttatttcttgtatagatgaggttttgccatgttgcccaggctggtctcgaactcctgagctcaagtgatcctctcacctccgcttcccaaagtgcttgggattaaagatgtgagccactgcgcccagcctgaatttagttgttattcagtaatccatataatttgggaatgattgttcaaatggcacagactctcacaggggttcaatctaccattgtgtcagtgtagcagatgagatttttgtcaaggggcttgctgaaatccagggtaccatatctttagcattttcctagtctgtttgtccaataaccctgtttaaaaaaagaaacaagattagcttggatcggtttattccaagaaatctcatgctaattcctaataataagaaacaatgccaatagtgatactaatggtcctcacatttgctgagtcccagcctgtgccaggcactgagctaagcttgtcccatgcactgtttgatcatcctgctttctcgttgctcacacactgtgtactgacgtacggctgaattctcctgggattgacaatgagcttactggttatcactgtagagtcttctgtttggaatcaagacatttgctcaggttttaaggcctctgtttttatccccagtttctcacaagctgcttgtttggatgtcttatcagtgctggatctaagtgagcatttaatttggagctgcaggctgggttcaagtctggctctatgacagctttttatcaatgagaccaacagcaaatcactcaaccttgagctttggtcttctcctcttccaaatggagattataatccctatgcagagtatttccacagatgctgagatgctcatacaggagaatgtttgtgtaaaagtgcttctcagacttcagttgcagacacacttgagccatttttgttatttaaaatggttaagtgttcctactagtattatctcctatccaagtttcacttttaacagaatttatcctcccccttttagatttttaaaaaatattcataagacactcagaggtatgactgaatgttggtcactagacccagaaaggggtatacctaccagctcttgcccactgagttgtgcttgaggtggaagaaacagaattgcagactccaggaggaaaaggtatgcttctagaggtctttcatctagagcgaatctttcccaccttctcctaatcagcagaaatcattacaggaacaagacatatcgatcctggtcagagggcaccatatacatagagttctgttttcttctttttctttccaccctcccccagcctcagaaggctaatccagtgccacctgcgatttcttctgatgttactgtggaagggagggttacataaagagaataaccaggttttctcctgtggcacctgcagccccattttctcattgggaaaaccaaggtatgaaggaataggttaggacttaatggtgcataaactcagagccagcagtcattcttccatccctggtcttggcatttggaagatgagatccactatgttgtaagctctaaggggcaggaaatacaagatgatgtatttatgtaaatataatgtactatgttgtaatcatatgtgcatgcaggaatgaatgactgaataagtgaagggagaattcttttctacctgaactgtggctcctgctagtctgaaaggcatgcagcctttcttaagctttatgaagaggaaggctagaaagaagttcagaaaagcttcccccatctttattctttaaactctatataaaggcatgaaatgttctgagactgacgaaaacatgggcctagaccagcaaatgattttggaataacaaagatgagcctagttctctagctattgtcacctcctttgttgtgccagtggtggttaccatgtgtcctccttcactggaggatacagccaaagtgaaggatgctgcagtgtaaggatgcaggatgggttttctggcttcaaattcgttatagactagagtagcccagggcatcttcttactagatgtcttgcatcatggcagcaacacccctggtccctctggggtggatggggtgcagcacaccttggtgaggggtttacactaaatactgctgaccccaggacagcaatttctcatacatttttattccaaagtattcctgaaaggtacttttgcttcctcatgtttccacaacaaccccctctagagcaaggatataaataagaaagcaaaatttcaggctccctttacaatcacagtagctgttaactgctgaaagggactcagagaggggcccctatgggagggggaggcagagggtggagcaggccagcctgtctccctgggtagcacatccccaaagaatcctctgagcattgatctttgattgtgccccttccgtgctacccagcaggaccttctcccctaaagaagggtcactttgtattgaggatctccttcttatattgcatttgcttagagggtgcatggcctcagaccacattttggggctgatgggaagaagttggggcaggagggcactgtggtcataatgaggtcatggactgctaaagcttccagttctgaggggctcaggtttctcaacagagtgaagatcaaagtgtgttcagtgtggctgctgctgctgctacaaagaggtgtgaaatgtgggtttggaaagagaaccgaggataatttgctagtttatagcctttcctagagttcacacagaatttttagtactttctctccctcccttttttgtaactgtttcagagaaggtgtgagatcagcaggctgtgaacatcgtgcagtgtgggaaaggggagctgaggcatgggtctctgtctccttggccctgggagaagggattttggtgggagctgggggagtgtttgggtgtcatcttggggagcatgttggggagtgtgtgggatcaacattcccaccaccttcctccctgtcacctgggtgctggcttctggaaggctcagccctgcaggtccatagcaggactttcctggctgtgccgtacaaagtacctgacgatgagattgcttggaagggcatggggaggagccagtgacagatgtggtgggatccatagaaagggctgctgtggagcctctgcgtattactcaggagcacctactgagttttctgtacagcctttgttttgccctctggaaaatgccaccaggagctctaaccttactgtgatcaccctttgccattcagtgcctgcctccattccatctgacagctttagatatttgaacagtcctcttgctgacagctgtgtggagcaggagtgtcctgttcgcatgccaagtactcagactctgggaagacagagataatgaacttccttttcaccccagtgattgcctccgagttcagaactctgtgccctcgcatcaggctgtggctgagcctccaacttgctttgctcccttggcccagcatctctccccttcctgtctactttctcaaccactgctgggagaccttcctaaagcatagctttgctcatgttatccgctgggcagaaaccatccatgggtctcagtgctcatgagaggagggggcagagctggctcagcggcactctgtggggaaaggactcgggttatgttaagaaagtgagattgctgccaaaagggatcccaccctctgggcctgctgtgactgggattccaggccttgaataagattcagacagtcccatttttaaattcagctctggctagactgcctctgcagtgtttttgaaatgggtgctaccttagaagagcaaaaaggagtagtctcagatacaattgtccagaataactagggtttaatctaaagagtgagttaccaggaaatgagagaaggagtgaggacataggcctggagaagcgaataattccagaagcaagtgacatttgtcttggaacacttgaagggcagtcttgaagctacactaagagagggttactttgtgtagctccaagttcagggatgggctgtgctgccctcactgcaagagttcatatagatgctgggatgagcttcgcccaggaacactgtgttcctggagtttgggcttgattttctaagatcatatccaacttgaagtttatcagttcaccctttcctgccacatacatttatcgagtacctactacatgccaagcaccttagtttgtgttatactggaaaggcagcacaggctttgccctcagagaactcagtctagtagggaaaaacagataagaaaactgaattataagatagaagactgagggaaagggtggtttgggaaaccttcctgaagcaagtgcatgctgaacagtgttgaggaggagcagtttaaacctagccagggtgaggtgcatgcgagagccctgaaatgtgaaagctgggcacctgcaggaaaccaaaattagttcaggtgactggagggtggcaggcggaggcgtggcaagaggctggaagacaaggtggaagacagatcatgacattattctaaagtcagcatggaaggattggaggattttaaatgagaagctataagccagacttggattttagaaagatcactctagtaatggtctggagagaagaatacgggaggaaggggtagggaggcagagagaaaccagtaggtattcttgtgaaaaattatgaggacgttggcagtagggatagagaaatgaaactgttaatagagaaaaagctatggagttcctacaagacggtcttttgggaaagacagaagaggtgacatttaagttgagacctggaagatgagaataaaacagtcacgtgtagatgtgagaccaagagagctccaaattgaaggactagcgaagcccttgaaacagaattaagcctggagcattcaagaaacagagaaggctgttgtgcccagatcacagagatcagtggagacagcctgaatcttgcagggcctgggagaggtttgttcctgggaaaggtttgggctgttactgcaagtgtaatgagaagctagggagctataagcaaattggtctgacttacaccctagaaatttcactccactgtgtaaagaatggattacacagaatatgtgcaggctggaggccttgtagggagctgttggagagtggaaatgcccagcagggtaccaggtatgcaaggagagaggtctgtcctggagataaagactgggagtcatttgcatccaagtgatagttgggcacttcatttcagtaaggccttttagggagtgagtgtggattgaaaataaaagtggggaaaggcaagtatgaaactttaggaaatgtggcttttaaagggaagtggaggaagaggagtagccaaaggagaaaaggataactcagaaggaaagggaggaatttcaaggagagggtactaaannnnnnnnnnnnnnnnnnnnnnnnnnnnnnnnnnnnnnnnnnnnnnnnnnnnnnnnnnnnnnnnnnnnnnnnnnnnnnnnnnnnnnnnnnnnnnnnnnnggtcaccagcttttaggagacttcagtccacattggtattagaaagttttgattgtttaaaataaggatctctaatgattatggaagagctattttttttttctgtatttgttgacctttagtcatgtttgaagtttagcaatcagaacatgtactacagctcttaatttgaatgtaaactcaccatccaggcccacctagacagggtcacaaagagttgcttttgtgaagagctctcaatatttttgccaacttcagaaggttaggaagatactgcaaacaaccttgcttttttttttaagtttttttttttgtgtgtgattataaggaatatatttccattggaaaaaaaaatcaagaaaatacagataagcataaagataatacagataacttgtaattccactacctaaagacaatcactgttaccattttggtatatttccttctagtcttttttttccttttgaatgtattttacactgttgaattaatattttagataaaatattttccctttaaagttatactgcttttcctcttaagactatatgatgccttttccattgtattaaaagttctgtagaaataacatttaatagcatttaaaaggctgtgtaatattccattgagtgcaccatactttgctcaaccattcccctactgttaaaacactaaagactttctgtggaaaaccagtatggcagttcctcaaaaaattaaacataatatgattaaccatataaaccaaattgaaccataaaaattaaaccatatgattcagcaattccacttctgggtatgtacccaaaggaattgaaagcagggacttgaacagatttgtacacccatgttcacagcagcattattcacaataaccaaaaggtttcagaagcaacccaagtgttcactgatggaggaatggataaacaaaatgtggtctgaacatacaatggaacagtattcagccttagaaacgaaggtaggcctgacacatgctacagcatggatgaaccttggaaacatgatgccaagtgaaataagccaggcacaaaaggacaaatactatgtgattccactcatattaggtacttagagtggtcagattcacaggcagaaagcagaagatggttgccagggggctagcaggaggggagagttattgtttaatggtacagagtttcagttagggcagatgaaaaagttctggagatgagtggtagtgatggttgtacaacaataggaatgtacttaatgccgcagaactctacactaaaaatggtttaaaatggcaaatttcatgttatgtatagtttaccacaattaaaaatcttaatactgacatttttttgaagttgggtttattggggtataatttgcatttagcaaaatccattcttcttagatatacaactctgtgttttgacaaatgtatatagttggctaactactaccataatcaagatatagaatatttctatcaccccccaaattccttccagcctctttctagttaatcttttctcttcatcctcagcctctagtaactgctgattttttgttcttatagttttgccttttctagaatgtcataaatgggatgaggagtctacagcctttttggcttcttgcactttgcataatgcttttgagattcatccatgttgctgcatatatctgtagttcatttctctttatttctgcctagtattcagttgtatggatgatcacaatttgtttattcaccaatcgagggacatttcagttgttttcagtttggggcaattatgaatgtagctgtgataaataactattcattgctgggtcaaatggtaagtatatgtataactctgtaaggagctgccaaactgttttccaaaatgggtgtattattttgcattcccgtcagcaatatatgagagttacagttgctccacgttctaagcagcatttaatattatcaggctttttattgttttggtttggtttgtttttagccttctaataagtgtgtagtaataactattgtggttttaatttgcatttctctaatgattaataatgtcccatcttttcatgtgcttatttattctccttatctctcattgctgaagtgacctgttcacttcttttggccattttttaattaggttgcttgttttattatttagttgtagatgatttttaaattttttgctattatagataatgcttcaatgaacaacattgtatgtgaaaatattgccctcactttgggtctatacttataataatttcctaaagctactaaatcaaagagagtgaacatcttcaccatccttatatgcccatagtccaacagctcttcaaaaccattgcaccaattcactgtcctactggtggcagtttaataggcatgacaggccattgtgttgtcttaattggaatttgtttgattataatgctatggaactttttttcatatgattattaaacagtctgtgtttcttcttttgtgagtcatcatcccttgccttttttgatactggattgacatagaaatttgccatggctgtatctctacaggattagttctacagtatgtgatgctccatgccaggatcagcagtttacagtattttcataaaatcttaacttggtcttagcctcgtttctttcactttcggaggtcacgagttaatttgcgtagctggcaaggtaaaaataagagttgaagagaaagatttttgccctcaagttaaacttggacactgggtgtcagcacttctgtgagaggcagacatctctctgttgttcctaataaatagaaaaagtgttcttttaaattcctctctgagaaaatggccatgccacttagtttccctgttgtgagagtaacctcttgattcctctaacaactcagcattttatgtgttcacaatgaaagtacaattaaaatcacttacttcatgcttgcatagctctatcaaatagattcaggcagcaaacagttcctgtatataggcacaattcttttttaattattaaaattgcttatcttttattttattccaaatagatggtatgggatgtgatatgactcagaagtactagaatgaattttgacttaataactctaaaaataaaaagcattttgttttctctgacaaatagctctcgttcattttgatgctcgacagacagctgatattttataaaactttatgattgcctcttcatcaagcactgtaattgtaggtttgtcttctttgcaagtatggggaactgggtattttcttttaaatacttgtcatcctaggaggcggattgcctatgcctgtcatgcaaatcaacttttcaggcatcataggcagaactaggaaagtagaacaatggaaaaatatatatttttgtctaaaatttatggatctgtgacttgcctgaaagagttatttgagaaggtttttataaactcaaacagatcctttaaactagatatttcccagactgcccaaaaaagggccgctgtcccccaataccacacaacactatgagaaagtagaattttattgcttgggtttttcttttcctcatactttgaaagatctctttggccagctttccattcagtgttaacccacactcgtcagtgtttgatgtcatgagaagaggactctggcttgctcaaggatcatgagtgagtaaatttttcagtcttccagaaggggaaaaggaagcatcattttggtatcttagggattaagacacttgctaacatgatatcaagaaaaaagcttgcacactctccaattggtatactggctccatgccagttacatagttttgggtttttccttgtttttcatgtacaaggatacctcagagaatggttgtttggctccagaccactgcagtgaaacaaatatctcaagaaagtcacataaattctttggttttccagtgcatataagagttatgtttacactatagtgtaacttatacatatagtgtagtctattaagtgtgcagtagcattatgtgaaaaacaatgtacatctcttaaaaatactttattgctaagaaatgctcatgattatctaagcattcagtgagttgtaatctttttgctcctggtagatcttacctggatgttaatagctgctgactgattagggtgctggttgctaaagggtggagtggctgtggaaatttcttaaaataagacaagaacaaactttgctgtatccgttgactcttcctttcatgaaatatttttctgttgcttgtgatactggtttatagcatttgtctcacagtagaatttctttcaaaattggagtcaattctctcaaactctgctgctgctttatcaactaatttcatgtaatattataaatcctttgttgtcattttaacaatgttcacagcatcttcatcaggagtagattttacctcaagaaactactttctttgcttattcataagaagcagttcttactgtgaaagttttatgagattgcagcaattcagtcacatcttcaggatccatttctgattctagttctcttgctattcttaccacatcttcagttacttcctccactgaagttttcaactcctcaaagtcatacataagagttggaatcaacttcttccaaattcttgtttatgttggtcttttgacctcttcctatgaatcatgaatgttcttaatggcatgtagaatggtgagtcctttccagaaggttccaattgactgtgaccagatccatcagaggaatcatgatctatggcagctgtagtcttctgagatgttatttcttaaatagtatgacttgaaagtcgaaattacttcttgatccatggactgcagagtggatgttgtgttagcaggtatgaaaaccacattaatctttgtttccatcagtgctcttggtacactgtcaatgagctgtaatattttgaaaggaatctttttttttttttctgagcaggtctcaacagtgggcttaaaatattcaggaaaccatgctgtaaagagatgtgctgtcacataggctttgctgttccatttatagagcacaggcagagtagatttagcataatttttaagggccctaggatttttggaatggtcagtgagcattggtgtcaccttaagtcactaactgcatttacccataacaagagagtcagcctgtcttttgaggctcttataagtctggccacaccagttttaccatctttcactttggtttcttatctagatggtattatctatatggaataggcaagtgggttattgtgagtgacagaaacctaacttggactagtttgagcaaggaggtacttttcagggaaatgatgtttcacaaaactgccacgctgcaggcagaattagaaaataggccttgggaattgcagaaatagggctccaggtccaccagaattatttcctcttttcattccctcttggccctgtaagattggctttatttttctctctcactgtagccagttttcttctggaagagaaaacatggatagtgacagctcttgagccttttagcttatggcttcagctgcttcagaagagatcaaccaaactctattggtcctaactccaaacatccagggaaggaacttcctgcccctgatcctgttaactgtggccagtagtgccatgtaagagcactgaaatttttggaaagaccttagggatgaagtattgttgtcagaggaagaggagggactggtagtaaaaacaataggtgtacattctttgtgggcagtgctggattatatagctaatcatggggcttggatactggagttcattagtgcatcttgtaacaaggccacttttgggggtgtggctcccacatggataattagctggatcctggtcttcagctgtgtcctgctctatccctgactagccatctcacaactgcttgttcctggtcctgggggggtacctgcggagagaaagtgtgtgggtggtagatcaacagaaatccctcgccactgctagaaaaacaactcaaagaacatgtatttatgtagatgatttcttataatgtgggatttccctctccagcaattttcctttgccaactctctgaagcacagttttggtaacattcatatgatgctgcaatcataggataccataaagctctgcagagaggcaactctggttgtcctagagaatgcatttgtcaaatatatgtgcctttgggatatattactagctattagccattatctttcgtagcttttgaaagcactccaaatttggaatctaaatttctgggtttgagtctcagcttgatcacgtattatctcagtgacctggagctagctagtttctctctctgaaccttaattctcaaacttataaaattgggatagtggtacctgtatggaacagggctatataaactgtgaaacaacaataagaaatgtttctttttctttttgttatcacctgggcctgaatgacagagtttttctccatctcttggcatttctcctagctgtgtctgagtgaataatcagggactttctcagaaaagagaaggaaatgcaggaccattggtaggaacttgacctttgtttctatcatactgaggttaagcaaactctttatttctgtattcttcgtctggcatcctttggggaacctcttcttgaggttaaggtgagatgaaggcttcctttggagacacgttcaggccaagcttcatgctctgaggagttgtttcaggaagaaagagagaggagctatgtgtatgttctcccagtgtgaatagggactaatgtgaaacatatgccattgcctttaatcaggctattaagcatttctcagttttgatggaacctctatctgagaggttcacctatagcagtggttctcaactaggggtgatttttgcttcccagaggacatttgacaatgtctggagatgttgttggttgtcattgctgggtgaggtgggagggggttggcaggaggggttgccacaggtatctagtggttagaggccagagatgctgctaaatacactactaccatgcataaggcagctccccaccaccaattgtctgtccccaaacatcaatacaacatcttcttcttagtgtggtggttttgattgttgagctttcttttggtggagaaggagaaaggatttttaggccatgatttttattctcatcaaaaggcatatattgagaccacttcatacccgctaggatttttctgaaatttaattatgaatgccattttaaattccagaaggggttgccttacttttgttaaatacagtactctttattccctcctagaaatggcacagatctctcttggagagggcaaggtgactctactccccttctcatcctcttaagaaatatcatggcttcttatctgttatatattgtctgtggtcttagaagaaagtctgtgctccagtttggccataaattaactcagagccatatgtattgagcaatataccccaccaagctgtaaaacaaatgaacaaatggaaaacaacaaaagaaactccaaaccaaccaaccaatcagaaacaggtcactgccccatgacagttttgaagtgtgtgtgaaagaggagaaagagctttaagactgtccattctggagggcagcaagatgttgttgcttcaggtagcataagagggaacagattctcttctacaatgccatgtttgtggttcttggaaaagcacagcaaaacctttcaaggcaaactgtttcatcattctgggataacaccaagaagctgcatggtgctattaaagcagccattcatgttggtctgccttgtcttctgtagaggtgggttttttaaactgtggatcagctcctttggagggtcatgaaatgcatttagttgattaaaaccttaagtaaggaagaattgaagagaaaacatgagtacatcacacaaataaagagtactgttttatgaaacattatgtaattttatgtatgtgtgtatatatatatacacacatatatatacacacacacacatctggcttgtgatgtaaaatacattgcttaatgtaggctatgatcaaaaaggcttgaaaatcaccactttatatgcttttacctttgttctagaacataggtcaattgaagcccaaagtgtattttctgttctaactcaggggcctgagtttcattacctgcttacctgctcattcctaaaccagtcactacccaggacagtggatgatttgcttatacgaatctacattcacccacaggggagtctggagagctgcctggcctccccagcatgcatgttgtcagggaaggctgctgcagagaaggcagccagcacagccgccccaggaatggcctgtggggatagagaaagtagcattagtttaggtacagagaccaaggtaaacacccagttatggcaactggggctggggcttggggagaaggtaaaagaccaatagttaatcaggaaaattcttttgagcttagagtagcagtgtggttaacctggtgttccattgccaaatttaagcctggagttctttgaacactgccaggcttggtccaaaacattaatacagcctataaaattttccttctgtgacatttcccagtctctccagatctgttcattcattcattcattcatttatttttgagacagagtctttctctgctgcccagactggagtgcagtggcatgatcgtgattcactgcagcctctatctcctggggttgtgattctcccacctcagcctcccaagtagcagggactacagacacatgccaccatgcccagcttatttttatttattttcatagagattcgtagagataggttcttgtcatgttgtccacgctggccttgaagtcctgggcccaagcaattcctccaacttggcctccattaagtgctgggattacaggcgtgagccactgtgcctggccctcttcggactccttactgtctactctcccctgattcattaggtttcagccacaccagccttgtttcagtttttcagatatgctggtttcttttgtgcctcaagactttctgtgcaggcctttttctgcatctgggatgttcttcccacattgtttcctctgacctactccagcttcactttttagctcatctgccacttccacagtgaagcttccttccctgacctttcgcttatcataattgagacctatttaatgtatgtctctttcattaagtatcgcaaggacagccatgatcaccatcttctctactgtaatgccagggcctgctgcatggcatatggtcagaagtatctcgattgtagagtaagtcttgggctctgggatggagctaagcctgatggcatcaaggggccccggcagagtaggtggggaggaagaggcagcttgcagccatctgggctgggcttgacatcttttacacctttcccagcctcgtcctcttccctcagatatatttccttggtcaagttgattttctttggcttatctctatgtgaacagtttaatacacagggactttttaaaaaataaaatgaagtaaagtctccagaaattgattcccaaatcaaatcacacttcagtaatttaaaagaaatagagagcaaaacatcatgtgtaattcagtagatttttgatagatcataattacttacacatgtggctacaccccctttaatttggatatccaattattaggtgtcatgggcccagtcacagctccgtggatgcgtctgtggatgagtccaactaatctgcaattggaaatgtattaacacccacttctccttgagcgaagggcatttctagagcattactgttgcatattgttccagaaggagccatagtgtgtggaaatgggaaagatggtttctgccatcagggagctggttttgaactgagttacgaggatctaactcattaatgatcagacccatgttctaagatataagaactgtatgtaattgggagttaaacatagagcagctctctggatgttgagaggaagggagattggtgtgagctacagaagcatagcaccatcagggcaggtgttggctcacagagttagagccaggaggggtctgagaggtccgtttatctgatcatttcattttatagataaggaaactgatatattatttctcttcttcctctgtaacacctaattattttctatgagccaaactgtagtagactttttttttttttaaagttcttcctcattcagcttccccagtggcaccagttttcccttttgggaagatcttattgtgtgttcctcggggggagtcttgctcaccttggaagtggtaggggatttgggtgcagggggacttaaccttgaccacacgcttcttctgactttactcttaagctgatgatgcaacaacagcaagacagttgatgtttataatcataccaatagccacagtggcctaagaatcagatttcccagaatctctgacctttgccaagtgtattagtttcctatagcttctgtaacaaatgaccacaaatttggtggcttaaagcaacacgtgtattttcttacagttctggaagtcagaagtctaaaatcactttcactaggctaaaatccagggttgtgcttcccatctctcctccccagaggctttagttcgtttctttgcctctcccagcttctagagctacattcttgtgttctttggcccttgggcccttcctctatcttcagagtcagatgcagaataacttgcttctgtccttacattgccttctctctctctagtcaatcttctgcctttttcttgtaagggcacctgtgattgtgcctcgagtccacctggataatccaggttattctttccaccaccagatccttaatcccatctgcaaagtcccttttgccataacaggtaacgttcacagatttctcaattaggacctggatatccctgccccaacaaggtttctgctttcctcttttcccagcctggtcttccaatatcccctcaattctgtgagttcctggtatcttctcagtatacctttttggagggagggagctgatgggtctgcagtttaagacagttgaaatctgtttctgttgtttatgaccaggaacctccatggtaaatcagtgctatgtgcagaactttacaagcattatttttttttaatccttgttttaactttcttaggaaggcactatctcctttttccaggtaagaaaactgtagctcagagtggcaatttcaaaaagcctgacagctagtataggtgatggaactgggatttgaaactagccagtgtgactgaagagcgtgtgccttatccctttctcagaatcctagttcaactagcttttggtcttagaccttttccaaggaggaagtagaatgtcatctgggccctgaggtctgaatcaaattgtttaggcaggggagagaaggcaaaggagaagcattccaggtaggagagaggctggagactaagaagtgaatccaagagatttaaaggaagggacatgacaggtaaagtggaatgacagataaaggaaccaaccacgtatggaatgcttttgaatggacacagcaactcatttatgtcaactacccatgggaatgatattctgactcaactttgtgttggaaattcagcttgtattaggtcccttgctgcctcctcatggcctcctcatcacatgggctggttaaacatctaacatcctttgctagtgttagccttttctcacagatgctgatgaacagcctgtctttcaaaaacttaacaaggttctttgttggtatcgatatgggtaatttctggagcttgggagacatcctggacctaatggtgtaagatctctggcttgtgtctcctttcagaagagaaattggaaatttttttctagggctgggacaatgactaagaagggagctctttatctggtgttttctggttactacttaagtgtaactgatagatttagcaaatgaaaatataagacatccagttaaatttgaattttaggtttcagataaacaatgaatattccatgcattgtacaaacattgcactaaaaattatttatctgaaattcaaacttaactgggtgtcctgcattttggctggcaaccctgaacctatgaccactgtttcagggtattttcaggcatagacttgtacagtgaatgtgcctgtgaaaagatattatagacctggattgacaaggaggctaggaaagaaccccaagttcaaagggaatgcaaggttggagaattctttgggcgactaacttggggagagatgatttggttctcattgcccagagcattgcctctgtcttctgttctgctgtgccactgtgctatggccacaatgagaaagacttgtgctgcatcatcaggattgtatcaatctccattctcttcctatttgctgacacctaaaagtaaaaacattcaaggtagggttgagccatgatctctaacaggaaatagttattgaacttgactgtgtgcagaacatgatacctgtgctggtggtggtcagagggctgagtgtactctccaactgtcctctgttgtgggggcaaagtgggcattaagcacccccctgtatacagagctttccaccgggctgtgtgcctatagtgacaaaacaaatggaaaacacgcttgtgctcttgaggagcacagatatatgcctcttgggacagcagagagcttaggcttttattaactcaaaattggagttattctcagtggccccactctgattttgtggtgtgtgtgtctctccatgtgtgtatatagaaatattgcagcaatcatcacctgccattaagctacttttgtacatagtaattaggagaggtgcatggagtctggtcctgagagtgagatatggcaagtgatctgtggcgcttggtaatttgtggccttagaatgaagggaagaatgctcacttgcctgtttggggatgaaaactaaaaaatcttgatattttttagcaacacactggactaaggaacagtggaccctcccagcactgggcaaacattacacagcgtaatggcagggtggggaaaggactggatttgacatcagaagagaactgactttaactcctgatcttaccatttattagcaatttaattttttctgagctttggcttgctcttttatgagatggagacaatagcaatatgaggaaaattttgaagatttaatgacataccacttgaaaatgctaactgacagcaagcaccttgtatttgtcactgcggtgtttcccattctcatagcactttgtaactaactctgttataatgcttcatggtgtgttataattatttcttttatgtgtctgtctacttccactagactgagaatcaagggccattttcaactctttacttttccagtagcctcctgattaagccctggtacttacaaggcccatagttttgctgagctgtgtgtacttcaatacttaagctttgctaggaggcaagtctttaacttctgagtttccattctttcctctgtctctctagctctcttactgagaactgggaagatcccacgggacaggatctgtccagtcctcagtaagagtctttcaagaatattaccatctcaacaccagtcagaatggtgattattaaaaagtcaaggaaaaacagatggtagagaaataggaatgcttttacactgttggtgggaatgtaaattagttcaaccactgtggaagacaatgtggtgattcctcaaggacctagaaccagaaataccatttgacccagcaatcccattactgggcatatacccaaaggaatataaatcattctgttatcaagatacatacacatgtatgttcattgcagcactatttgcaaaagcaaagatgtggaatcaacccaaatgcccatcaatgatagactggataaagaagatgtggtacatatacaccatggaatactatgcaaccataaaaaggaatgagatcatgtcctttgtagggacatggatggaactggaagccattatcctcagcaaactaacacagaaacagaaaaccaaacactgcatgttctcactcataagtgggagctgaatgatgagaacacatggacacagggaggggaacaacacacactggggcctctcacgggtaagtgtggggagaggggaagggagagcatcaggagaaataactaatacgtgccgggcttaatacctaggtcacgggttgataggtgcagcaaaccaccatggcacacatttacctatgtaacaaacctgcacattctgcacatgtaactcagaatttaaaatttttaaaaaagaatattagaagatcctcattagactctaaatgcttgagtatagattcccagtattctcctgtgtactcaaacacatgtatgtttgaatagtatcccagcttgctaccctattctcagtaagttctaggatttccttgatgttctctccttttgacctctgcttcaacaaatttattaatttaatcagtgcaattcaagttcaattcatcaagcctttattgagtgcctcttacttgccagtcactgggctaggttttgggggtagagatgagtaaaatggtgcctccattagaagtgtttcagatttagtgggagagacagatgagaaaacagaatttctctaggatgtggttagggcagtgatggaggtggacacgttatgggagcacagaatagggctattttcctttattgtctttttcctctaagaattccattgttgaccaggtatggtggctcacacctgtaatcccagcactttgggaggccgaggcaggcggatcatgaggtcaggagttcgagaccagcctggacagcatggtgaaaccctgtctctactaaaaatacaaaaatcagccaggtttggtggcatatgcctgtaatcccagctactcgggaggctgaggcaagagaatcgcttgaactcaggaagcggaggttgcagtgagctgagatcgtgccattgcactccagcctggatgacagagcaagactctgtctcaaaaaaaaaaaaagaatcccattgtccctgcttactttctaacaggtgaacggggagccggctgtcattcctgcctcaaggagtattggaactgtgggagttaggaagctgccagtggccaatgtgcatcaattaaagacccagttggtagccctcctgcactggaggacagaaaagaacacttggaggcccaggacagcacaaggccacaggctgcatggccctggctgcagtgtggttgggagaatttggggagcaggtagtttcagccaaagactaacttggtgacatgcgcatacctcatggctggctctgtgagacccctgcaacaaatgccacctttttccttccctttttcaagttagctttgcttttgttctctttcccatttctctgacatttgcttctccccccagttcttatttatttcctttgttgtttatatccctacattttcttttactgctcactcttctatcatcttattcttctttccctctaccatttttcccctctacatttgagccttctttgccttttaattttatctttctgcctctatcaccatgttctgaaacataactgttaaactcagggttggagaggaaattttcatttccaacagggctttttatgatatgaaaagagtgtctcatgtgtatctgagtatcctaggaaacagaagtctaatttctaactcatattctgcatactgtgtttgaaagacatcatcatgaaaggagagtctcccacctgggcagcacaggagactgtgctgtgcaccttacctttattacaagaaccagccaaacaatgattccttcttttttgtggttctctatctccacacctatccttgaagtttctctttatctcgctctttctctttttctatttctgtcatatttttcagttctattttctatgttgcttctcgttcttttttctctttagtccttccctacttattagaaattatatgaccccctccttaatgtctttccttggccttggaagatagagtcaaaaggagtgtggaagactccactgccccaagtccccccgtttctgacgacggcatggaagtgtgactcaggagagatggggaagattcagaaaccttgtctagctcttgagattctttatgagtaggatttctttctgcttcttatttttaggtagtatgaacgtagactcagagaatcttaaagttgacaggaatctctattggttgtttaaataacctttaccccatgtaggatccctctttacttcctaatgatgctctacaggtagctcccggatacttggagttttgggaagggtgccagcacatgaagccgtccgcttggctgttggcagcactaattgtgtcagttaccgcttgcgattctgttgtcctggtctgtatgatttgtacctaatgattgtatatctgcttccgagggccatagggcatgcactttccatacagttctttttctgagattgaagacacgtcaaatagtgaaggaagttcaggtaccttctttaatacttgaactatttcagagaggttccatcagaaataaacaaaacaagccatttttgccaccctttgactatagaggaacccagttttctgaatgcctcatttcctgatggttctgagtagctgagattgttctggagggattatgggtgagaaacttcctttcattcttcacagaaagaagaataaaatgagcaagttttaaattaagattttattaatattagtaagctttgcattagccacaatgtctgtgtgtacattatagtttatagaacactcttaatattaaataccatgtcattttatttttataactagaccacgatacccccttattttagagatgacagaagtggggttcatagaggttgagagacttgtgttgagttaccccattctcaacagagtgagtcagacttaaactcagttcttctgctcttaatcttctgctatgtctttcataaatacatatatgtccttgtctctccaaagtccctgcaatgtcatgagattataggaaataagttgtctccttggtgtacacaatctaatagaattatggatttgtatgtgtgtgtatttctggatttggctgtggaacatggaaaaataggaagaaatccaattagggtcaaagagtggtttgtgcaattataaaaatactgatactatgtgaagaccattgaaattcttctccagttgcaagcatcagcataattgatttgtttggtaaaaattctgtcaaggtagagatgagtgagttacttttttactgcagttaatccagagaaatttcctgaaggagatagacaggggaacctaagaaaattttgaaataaaaaaatacaagggcctggtgggttggaaagaggggaaggagttgaaacagggcagagaggagaaaggggacaagtgttggggacaggaatgggacagatgttgtggcccttgtgttttgcttgggatttggaactagggttctggtatgatgataagttttccttctttgcaaagtaaaacccagatggctaaatttaattccacttggagccactggtgattcacccaagctcaggtgcacccacatacagctggcgtcagcgctgtgtgctttccaggctgagcttgcctcagccccgcttcctgcatggaacaagaggggaaaaccagactggtaaccttgacccttctgtgtctctgtctgcagcatcctggccactgcaggaacccacttcaatactcacgtggacctgaggaccctccgggctgtgcgtgtcctgcggcctttgaagctcgtgtcagggatacctagtgagcatctgccattctttctgctctgctaagaactttcttcatgtgtcctcagctggatccaggtctaagggaatttgggataaacaaacaatattcctcctgggaggaagcctcagtggtaataaatagtggagatggagcaatctggtgtaacattttactttacatttaactttttgcaaatataaaagataatagaaaatctttacagaaaatgtggaaagtaaacaacaaaaaagaaaagtgctctttatcttatcactcagaaatcacttttgttaaaatttcaatatttttcatttttcccctgtgcattttaatataattgaaatcgttatgtagattgtagttttatatcctgaaataagtattttattttcctaaccttaaaaattcttggctgagtgcagtggctcacacctgtaatcctagcacttgggaggctgaggtgggtggattgcttgagttcaggaagagtttgagaccagtctgggcaacatggtgaaaccccatctccacaaaaaatagaaaaaagtaaaaaaaatgtagctgagcatggcagctcactcctgtagtcccagctactcaggaagctgaggtgggaggatcacttgggcctgggaggccaaggctgcagtgagccaagatcacgccactgcactccagccttggcgacagaccgacactctgtctcaaaacaaaaaaattcttatatgtgttatgatttatttagccatttttatgttttatgttgctggatggcataaaaaataaaaataggctatttccagtttttctccaactataaatgtgctgcaacaaacacctttttacttaaatctttattcaaatctctgactgttttcttggctagaatcctagaaatgcaatgtgtgggtcaaaggatatggcattttctgaatagtgcttgtactaattgtgcttccccaacagagactgagaactgggtctgagatagagtgaatgggaagatgaactttatcccagctcttgaaggatttacagcctagcagagctgggcctaatttcctttaggaaaggagcacattctaataaatttaatctatcagaggcagacggcagcatggatgaaaccaatgagggaatgaaactaatcctcccctatcagatggtgctgagggacagctgcattggtcattctctgtccttccttctaggcctgcagattgtgttgaagtccatcatgaaggccatggtacctcttctgcagattggccttctgctcttctttgccatcctgatgtttgctatcattggtttggagttctacagtggcaagttacatcgagcatgcttcatgaacaattcaggtagggtcgttcttttctgtcttctccttttcccttctcccctctgttaactggggtaatttcagggcacttggaggctcattggaaaagtatgtcctattctgaccctggaattagaatcagaagcttctagtcagcagccttttgaggcacagtcaaccaagactagatatcctcacttgacattaatattgcaaagcaaatatgtagttggaagatttcaaatagatggtcttggctcccctatcccatggtcaagggccatgggaatgaacttgaaaagccatctgtctgagccaggcatagtggcacccacctgtagttccagctactccctggaggcttaggcaagaggattgttgaagcccaggagtttgaggccagcctggacaactagtgtctctctgtccctatctctctgtctacaaaaaaaaaaagtgcaacctctctgaatatctgaatcaatacccctttactctttgtacagcagcctctgactgaataaataagtactttttgtatagtggcctctctggcccacaggctggtgagatctaggagtccagagtcagagttgggtccctccggatctgtggagacattttcccttcatgatccttctcaccatcttctcgctctctgttttgacccacacgtggtatggaagaactgagggagctctgagcttggtttgcaagtgtgcttgggagattgttagggtacacaaccccaaattctcatatctttgtatttcatttgttcttttcaagttgagttgagtatcctaggaggaaaggagatgggaggcaggctgaagaattccaaataagtaccatgctttttatgaaaagaaccttaaaagaacactttccaccttggatttctattttttatttttatcttttattcaaaaccaggaatccacgctggaaaaacaaggagttaaacccccctaaaaggaccatagtttataactgtccccaagaaacccaggaagaactcagggctcatcctggagtctgaagccagaaaacctcactttgccttttcctcaaagtgtgccgtgtgattcagtcctcttaattcctgtggtacttcaggtgagggtagaggatgaagcttgcagagagcaggggactatgtggaggagaggctccatttttcaggagactgggaaacattggattgaacacatgatatgtgagctgggaggtgcagagaggccagggaggagagggagcctgagacaaaaaagggcaggcctctttccgtgggggaatggaattgcttgcctatggcttcctggggtcatttccagctcatgcgaaacaccatgtgatttatctcctaccctccaaatgtgtctgcaggtattctagaaggatttgacccccctcacccatgtggtgtgcagggctgcccagctggttatgaatgcaaggactggatcggccccaatgatgggatcacccagtttgataacatcctttttgctgtgctgactgtcttccagtgcatcaccatggaagggtggaccactgtgctgtacaatgtgagtagagctggtggggacctggaaggaggagggaagaaccctggatggaggcttctgtggttgtttggcctggctagtccggggacagggagggctatggatataggtgtattgggatgggaggtgaagactcaactgggataagccttagcagttcataaccctcttttgtctggcctgttgctacgtacaagtacacagcttcttaatacgattaggaaattacatcctatgttggataggtgaacaaattagttaagtcagatcaacttaatagttacagaatatgttggttggacgtggcggtagggtatagtgaagggtactaatgtatgatactggctgcccagtagaattagctggaagccttaaaaaattttatcaccccctcaggatctgggagaatttactaaaaaagaacaaaaagaaaagaaaaaaaaattataccaactgagctccatcccacaccaattaagtaggaatatttaggggtgaaggtcattttagaaaagtcattgacttttctaaaaagcttcctatctgattctcgtatgtagccactgtcaagaactactgcattacacacacataaaaagcatgcttaattgtgagattcaccaggggtgcttgttgaaaattcagattcacagaccccttctctggagattctaattttgtgtagctttgtatagctagtgagctgtgcttttttcaagtgccctggtgattcacatgatcagacatgttgagaaggttctgagttggtctagctgcctgtcagggatgttggggattcctgcatggggacagaaggtagggtgatcatgaagtctcttccatcttccagagtctaattttaataagttatcaaaggcttggtgcagactctatgctcaaaaatgagagtgacttgaggtatgtggtttgatgtacatggatcctaggtgggtaaagcagtttgggcaggtgcttttgaaggactgtacccttacctgcattcagccagcccaccccaaaacagtaactttggaatgatcatgcctcttatgcacgctcccaccgtctgcctttaccttaaggtgccgtctgtttccttcagttcttctctagatctttttagcctgattctatctgtataaaacttattaggtggaacataaggtggcttatacaaagcaccctttagaaagagctttggatataatttacactggagggaaaggaaatgctgtgtctcagaagaaactcgacgagactataatgcccaaagagcaaggattgtgtaaggcctgtaaaaggaagtacttagtagaggtccattgctaacctggatccattcccacataggatgagcaaggcaggactgaagctttgcagaaaagagtcactggctattatgctaaagctctaaagggcagtgaagaagtcccaaggaccagcttacacccagcaagcccagggatgaagtgtgacccagaaagccctggaggacactctgcagttctcaccagctgtgggaggcagcaggaaggaggggagggaggcaaggttgatgagtgcagtcactcctcatttgagatgtaaaggttgtcttgaggccatgccactcaaattagccaggcacctctaggaattgcagcactggccctgcagtggctggtgtcacatggagggctttgagagtgatgcatttcaattatatgtgtagactcacctaagtgatgtgataaatgcattgaaagcctgaaaggagaagtgttgcatttgaggatacaggcgtgattgttggtcctctttagccaagattcagatggtactgagaggagaaggagcacagctgaagaaccactcattttttctttattagtttctttgttcattccttcattctttctgtgtttattaactgagcatctattacatgccaagcactgtcctaggcactagggaaatagggagaaaaaagtgccatgattcctgctatcatagtgctctcttcaaatccctctctccccagttacctgtcaaccacaggtttagaagttacacacaggcagagattttgctcctctctctagttttgctcactaaggagggaaggagggaggggaggagatcaagttgcagatactttgaaaccttttattgcatgggtgtccagggcccacagactcacatactctgacttccagcctgtcagtcattgaacttgagtttactgaaggcctcctgctattctgatggctggatttagggctagggggactgttacccaaagactgtctacctgtttggactgtctgctacctgtttggactgttcctcacacacacacacacacacacacacacacacacacacacacacttatacacactggttgcgtaccatgaagttaactatgaatgactagtcagcttagtattataaatacatgtatacatatatatgtgtgtgtttctgcatatagaaaaatgactcactaagcatcaccacaaccaccaccaataagatacaaatataaatataactgtattgattttcctttctaccactcctcattctgggaaggcccagttcacccagctgctggatttgttcatgaagagcactaagagagggggatcccctatttcccagccctatgcaccttctattcagtggtgcaacgaacatgtaagatttattgttgttagttacatccaaaccagtaggagaatcttcaggtttacccagtaggaagaagctctcaagcatgtgggctcagtttaacctttttatatgcaatgtaaatgcttccctcatgtttgcctcccttttctgtagcacagactcttcctagatgcctccctatgaccttgtgttgctctgccaatgattactattaacttcatttgcttgtggcttttctcattataatgaattgtaagggggagggttcccattgtcaaggcaacctggagtcacctgtgcttcatttagtctctatccaaatgtcaactgcttggtcaaactccaactatattcttggcttccctccctcctctggtggaaggaatgcaaaactgtcgacagttctggctattgctacctgtttgcactgtctgtcccaaaggtctcctcgacttgcaaactctcttctttacttatttctcgtaacctgataagtatgtcttccacagtacaatgtgttctccttctgatcaatgctcttcattcaacaaatgttactgtggctcgctaaccctcttcacctgggctggaggtggctgagagaagtgactttcttctgattctgatctgagtcttatttctctttgtcattatagttttatgttatctgctgattcagttagctcttttattgtatcaggactaattcccagattgcagaggttcccagtccctgtctgcagttactcacatctttgctcctgaagtctagtatgtttcatttgtatttctgtagttggagttatttctcttcttacttactgttgataaactcatgtagaggcagaaatttcttggaggtgtactgtttctgcagctttgcaggtatgctttccgcatctgttgtgactacttaagatgctccaagctgctatggtggaaggggttttatggacttcattggcttttggcaagaagaggcaactgaaagtctggatgctttctgagagtcttcccaactcctcagaaatcttttggtctataaacaatgactgtggctgtcttttaagttgccttttcacagctgcatatagtcaggatttattaaatggttaacagctattcactttctgtctcattgagattttgctttatgttcctctatgagcatggtgaggcataacatccatctcgcagttgatgaaaaactaccattctctttatgaagttcctctcattttgtggtatctacagagaatgctttgggttctgagatccatgagactagggaatgtggcttccatctttgcttcagtcttttcctaccacctcctccacattatagtagaactactcaaaactaatttgacaaataggtggcaggagtctatgattatcttatggtgctagagtgataagatgaaccaactgacctaggatcaggtgtatagttcctaaaatttgtagacactgtaattgtgactggtattgtagatactgtaagtgttactgtaattgtaattggtatccaggatcactcatgctctggaataaactggtccccccccctgcctcaaacaaccccatctggactgccctgttcttatgtccttgcatgagtctgggatcctgtaatataggtgatgcttggaattggatactagtatctgttcatctgttacttatccatagagggattggtaagtggatcttggaagttactttctttttcccatgacggctgggaggtgaggtgtatgtgcttagtgaggagctatgataacttctttttaattggcagaacaccttgcttgtcaggcttttcatggagaggagagagtagagggagagggaaactatttcctgaactcatagtaaaggcttttcccctctgtttacattcatacataagtatagattcattcactaactcattcattcaccaaataatttttaagtggctactatgtgccaaatactgttctagatgttggtgatacagtagagagtaaaacataggaaagtcccggccctcatggaacttatattctagtgggaaaatgcatatagaacataaggaaaacatatggtatatcagatagtgatagatgctgtggagaaaaaaaatgtggggaaaaagagaacttggttgcaattttaaatggagatgtcaggaggaccacattgagaagatggcattcgaacaaagacttgaagtgggtgggtgagggagtgggccatgtggttatctgggggaagagtctcctgagtcccagatagctgggccagcaagtgcagagatcctgagatggggacgggctgggtgtatttgaagaacagcaaagagcacagtgggttgaactgcagtgagtgaggcggaaagtaggagatggaatagtcagtcagatcatgtggagccctgaaggccattatacagactctggtttttactctgagtgagatgggaaagcaatggagggttttgaggaaaggagtgacatgacctgacttgtgtttgaaaaaggatcactccacctcctttggtagagcaaaagtagaaacagggattcaaatcaaggttatagcaaggatataaaaaaaatgatagaggcttgggccagggaggtagcagcggaggaggtgaaaagtggttggattctgcatatatttttaagtagagctcatgggattcttcgatggattgaatatgagtttgggagaaagcagcaagaagagtggagttgccattaactaagctggggaagaacacaggtaaagtatgttgggaggaagaggagaattgagtttggatgtgttaaatttgccatgctcatttgatacagtagtatagggaagggggtgaataaatgagttcatggtagaaggcttggctggagaaataaatttgggagttttcagtgtatagatggtaaagtattgagactggccaaaaccaccaaggaagtgaatatagacagggaagagaggagattccaggactgagttctgatgttaaggtgaagaggaaaacggttatcagcaaagaagactgagaaggagcagtagggaggtgagaggaaaattagaaacctggtgtcctggggccaagtgaagagcgcgctgcagagggataaagtagaggatgatcaagtcagttctctgaagaagtgtttttcctatcatatgattattcagttaaaaaaggttattactagagtatcttgcaaataatttcttggtcatttgtataaattcatccacagattctcttgaattcacattcatatttactctttcaaaaactcttatctatatgctttgctcatttgaatcaaatgcttcagatgggtcaaggaaggtgagggctaagaaccactgaatgccaggagcagtttgagtggagtaggaaggatttcagagagcaatggaaacagcgtggaagaaataccacttacatgctgatgggaatgatccatttgagataaaaattattgttgatgaaggagagggaggagaattggtggagtgatttccttgaacaggtgtgtgtgtgtggtgtgggggaggtctagaccacagatgtagggattggcttagataggagctctaatcatccattcatagtactaggagtagaggaagaacaagtggctgcaaaggctggtacgtgggtagatgtggtgttggaatcttgtagaaattctcttcctattgcttctattttctcaatgaaagaggaagtaaggtcatcagcagagggtggaaggaggaaaatgttgaaagtttgagaaggtataacatagttttccagaagactgagggagtaagtggagtaggaaatgcattgggttgctgggcagctttatggactcacttggagttagttgtgatgaagttcaagtgagaccagtgagcctggtgtgttttcctctggtcacattcagccactgaatatgggaagtaggtggagatttggcttttatgagaatagttttgccagttgagcacaataaaatgagagaagatcaagagagtgactataacatagccatggaatttgagctggataaagagcaaagaggtggcggagaaaccgtgaaaagggaggagagaacgtggattatagaccgtttttaaaatgtgactcttagggccgggcgcggtggctcactcctgtaatcccagcactttgggaggccgaggcgggcggatcactaggtcaggagatcgagaccatcctggctaacacggtgaaaccccgtctctactaaaaatataaaaaaatagccgggcgcagtggcgggcgcctgtagtcccagctactcaggaggctgaggcaggagaatggtgtgaacccgggaggtggagcttgcagtgagccgagatagcgccactgcagtccggcctgggtgaaagagcgagactccgtctcaagaaaaaaagaaagaaagaaagaaagaaatgtactcttgaatctgctggacaaattcagtctgtggagtaagttgagaaacctgtctcactgcatagaagtagggagtgggttttgaaaccaaatgttctgatttctaatttgatgctcgcactgcccccagtggaaggagagtgagtgtgtgcatgtgccgcacatgtgcagagtaagctgtgactctgggcgccggcgcaccgctgggccctctgtggcaccactcccagggtgtctggtcctgtttcagctcaattcagaatgtgaacttggggaacatttggggactgaaacccaccaggcccgcccacctacctcactagcattgtactctgtcatcttggtttcctcctcagagtgtctgtctctttttttaaacacacttaacgttgcagcttatgatgctgactttggcagcctgttctgttaatacttgtcctctctaaaccctacagtgccttcttcttggcccctgtctgctgggctgggagcctgtggtccacagccttctccccaccgctccctccctgggaagaaaccggcgttttctttctttctcacacttaactattttcccatccatagcagtctccaccctgaagttattcctactcattgcatttctgtcttggtttgtcaaaccaggatgccatcatgtttgggatttattccaaatgtgctaagtgtgcctcctgatctggtgcctgaatttcacaccacgaaccaggccagtctcctagtcttttgtctgtgcatagccattaggctggctcagggctcctttcctttttgtttcatttactctaatatgcggtttaatttctaatccatggccaaaggcctcaggtgcctgatgtgtcacgcagctttgggctatgatcttcctgttctcaggcaacaccaggccttaggactgaggggcagaaattagctggaggtggtgcgttggtgactcaatggctgtttcaggtacttttcactctggaatccaaatgctgacagaatctcagccaggtggggatggcacagtgccagtatatggcacactaggaaagccaagaagtctttattcactgttcctcaattcattattcactcgaagacttatgagcaatttttttcatgcccttcagagtgtggtccatcttggaatcatccaggggtaattattgtaattgcagattcccgggccctgccccagatctggtgggccagcatctctagaggtaggaggaaggaatctgtattttcagcaagctcccatgtgattctgaggccacgctgaagtttgagaaccactgttctacatcaatgtaattgccaggcagtaagagggtgacatggcacataaatgggagagtactgaagaaaaaggcacacttctgccttcaggctgcaagcctactatgtgaatttccatgaggtcatgcgttattcaatgtttgcctaacataaagtgattgacacacagtgggctctcaggaagtagttaatttatggacttaggtcaagaaggggcaataagtcaggtgcatgggtacatacatatacttgtaacaatagggcaaactaaatatagcgaataattgggagatatacaagcagagatctctgggaggattgaggagagagtggataatttaaagtgaactgctgagcctggcttggtggctcacacctgtagtcccagctacctggaaggctgaggcaggaggatctcttgagtccaggagttcaaggctgcagtgtgctatgattgacctatgaatcataggtcagcctgggcaacatagtgagactccatctctaaaaagaaaataaaataaagtgagcttctggacagcccatgtagaaatgtgaaagctggtgaactcaaggggagcccatgatactggattgtagcctgttggacaaagatgtcagagctcttgataacacatcaaaggcatcatttacccactgggtgcttagatgctactttatatttttaccttcctttagggacaaggctcagaaactgacttgaaagttagtttgcccaacccttttggtgggagggaagggttggatgtactaactttcccttaaccatcctctccttagctggtcctcattccatgcctgttgaaaacaatatgcgtagatttacagacctttgcctgcctccagttccctatgttgcagttagatgtcagctgtttggccacagcgaagcttcagctgcagctttccctgttgattgacatgtgtgccctcaattacacctcagttccctcccaaagagagggaaggattgaacaggatcttttctcctttaaggtgccaggtactaggggccccatttacacttctggagagctcttttaaaagggattcctgagaacctccactcttcactgccttccaccttgagccccattgtctgtccacaagaggaaacaggattttgtgcactgatgaggcagcagagtagtggagtcaattacaaaaaaaaaaaaaaaatatatatatatatatatattgtatttgactgatgagtacagctttggtttatcatctgcactggaatatctttgatgttttgggaaatcacaacactcaaatcagataaagaagccacagtgacaggaccaatgccagaggacctgggatatcttctgacttttgtcccctcagcttctcctagtgccccttttcttgagaagcagtgacccaaggcggggcccttccttgcagtgtgcagtcttcctcaccccaggagctggtgggtgggtcacagcacctgtgatagtcagagaggaccacttgaatttctgttctcctgagggtgccttgcaggtgctcccacccctccctcccactctccccactcaccatccccaagccatggccttcactccgaacccaggacttgtcagctggtatctgtggatgggctttgatggcatccataaattttgttgcaagttttgtttttaaaatatatcttttaactaccacattttcttgaatctaagatgccattgattatatactctatcaaaaattgaataattctgttattaaatttaagcattattaaatgttgggggaaaagctactgctttctatgcattatgtattcatatattctgagttacaaaaccttccactgtaaagaaaggtatattgtagaattgaggaaatagaaaatgaaggaataaaactgattttaaaagccacatgtaatccatgtgttatacaaattttcacacttgaagaccacccacagtcacactggcttaattcttttctttgtggagaccttggagtcaatctccctttgctatctctgcatttatttgagctttgtgtaaatgtggtattgattagaaagcttctagttctgtgttagtctttttaaaagaatcaggccccagcttgtttgcttttataaagtgatgtaagtgatcacactattacctttctgtatgattcaagattttctcaatactgtgaaactaaaataaaatacaaaaataagctggatgccaaagctgattcaagactgcaatagtcatctataaccctggtttcaaatttttatcttccagaaaacaacctcatgttttgagtgatattgaataaatgttctttattatgaatatatttatattaaatatatacaatatatttatgccagaagatgtctcatttttgtaagttttatgcatggatgttctgataaaagttttatttgaaaaaagtgatttctgatgccaaaggtactataacatagtggttaggaatcctggtcttactttactatctatgtgactttggcaacttacttaatctctgtgcctttatttttctatcagtaatgtgaggataattatggtacccacctcactgagttgtagtaagaagtaaggtaacatggataaagcctttgacacatgtctggcacatagcactcatgtgagaaattattagttaaaaagttttgaaaaccatctaggatagacaaagcatcttcttccattggcccactgtataaacctgctcctctcagactggtccttcctgtctctcagtctagccactttacactttccatttgcatcattgccaaccttgagtgtacactcttggaattacctccaaaactctgatgtcgccttctccacagagccttctctgactatccctgagaaattcaaaagagaggagatgcttccctgagccttctcccccagacctaaatgttattagcactccttcccagattctcctgtatcattcatcgtcttctaggtgtttacatcccttttccttattaaatgttctgtctcctggcatcaaccccagtcccctagacatggctaagtattcggtaaatatccactgatggattgatttcacagagtggctgtcggaacccaccaaagatgccatggcttccagactgccaggctgtcgggagatgcagcacaggttctgctctcagagtgagctgctgtccgcagggactatggctgctgcagcctctgcttgtcctgcctcactacagctcagctccctcctccagtgaccggtggggggtggggggtggggaaacaatgaaaagtaggggaaaggtaatttatttcagtgtttacagagggtttgcgtgtaattagcagtttatttctgtgacacagctggcctcctcagcttggaacctgactttgaaatgctcttaaagagacccatacctaggcaatctgaggggtgctggggacttgggaagagagtgaagaaaaatgtcatgccctgtctttggtgatgatgcttgaccaaggacagccactaaagtgaagactcccttgttccttctttccccaactctcccatgcatgcacacacacacacacaaacacacttttgtttcttgagtcatattctgttagtgaatccaccttcgacttagaccttttacaaggtacattttttttaaccttttgttcacatcaaagcttgggctttgatatcttcactggggataggggaacagtcacttgatcccctcctgccataagccccatgattgcaggcaaaacactgttctcctctttgtaagtattgaatagatgaataaataaatgtgcatcagtcttttcatcagtaatatgggggtaatgctgcctgctgtttctaccttgaaagttttatagcaattacatgagaaaaagtatacgaaagtgctttgaaaaagacgttcagccctcactatatgagtgtactatttttatgactttttgctgctgtgagctgtggacttacaaactcaattttgctaagttagcagtttttttgtgcttatgcagagtgggtgtctggttgcttcgggagcatgtaagacaaattatcctaacatattttctgtctcttagcatcagtttgctgtgtttgttctgtgttgtgagcgtgctcaggtcctgtgatcttggttagaaatacagtatttatattttgtacatattgaaaaacatacctatatttggtgcaaaagtggcactttaatagttcttgctaacttgcataaactgtgaataactggtgaaacctatgttgcagttgcttccaaattcaaacatgtttcagaactttttttctttttgaggtggagtcttgctctgtcgcccaggctggagtgcagtggcatgatctcggttcactgcaacctcctccgctcgggttcaagcgattcttctgcctcagccttctgagtagctgggactacaggcacccaccaccacacccagctaatttttgtatttttagtagagacggggtttcaccatattggccaggctggtttcgaactcctgacctcgtgatccccccgcctcagcctcccaaagtgctgggattacaggtgtgagctaccatgcctggccaaggacatcttaacctttgcaagtgttagggtagacctgacattcatctgtggcagtgttcctgaatgagctggggctgagcccatgagagagtctataccagaatagcataatggaaaaataatggcaatgtagtttttcatgaaactaaatttgttcaacttgaaactggatttaaacattgaaaatgttagtgtcctttcctggcaaaataaaaagttaagaacatcattgcgagcatagatatttttgtctttgttttgtgaaaattttgtgatctgtgaaggctaaaaatctatgctgatatatattttatctatgtaatagatataataggtaaatatattaatataattatataatttacttgcaaatgcataatattgctattagcaggttgagttttcttttccattctagtgatactgagatttttatattaattttaagagaaactggtagtcatttatgtaacctgtcattgaagaatgagtattttagaaaaccacataggctggtatagtgaatgccatttctaagaataaagtagtatcaggcattgggttatattcagaagacctgtatttgggccaagtgtttcacctaggctggagtgcagtggcgtgatcttggcttactgcaacctccacctcccaggttcaagtgattcttgtgccttagcctcctgagtagctaggatcacaggcccctgctaccatgccagactaatttttgtattttaatagagacggggtttcgccatgttggccagactggtcttgaactcctgactgcaagtgatccacctgccatggcctcccaaagtgctgggattacagacatgagccaccgcacctggctgcaagttttgtttcttatccattcttcctgactctgccatggtattaggcaagtcacgtgacctcagtgagactcattttcaacttctattaattaggaacaccaattcagtacttagtgcatacaatggctgtaagaattaaagaaaaatgtatgtgtgagagtgctttgtgcatcaagatgtgccttacgaatttaaggtattataaaaatcctttaaagttatgaacattcatgttaggaagatttctattactgagatttacaatacaggtttttcacgtatcatttttaaacatgttttgacagatacagtcaatggtatccctcagaagaaaggtagaacgtatattcaaaatattgttaggatatttctctttcctttgtgctcaaagcatcctgatatcatgaccttttcaagtgttttcttgatatgaaacaaagctgccactgcctgagtagtttgtataaaaacatcagatttctaggtgaagcagaaaagaaagggagtgtggagcttgattccttccccaggggtctctatgatgccatccttgaatgaatgatcaaggcgtgtcccccactgcctctgaaggtacttctcgtggctgccaccagctgccttaacaatttggaaggaaaggcaggcccaaagggcagcaggcacatgcacacccaggtgatcacacctccctcgtcccctgcacacatttaagctcttggcagcacatgttccccaggcacaggcggggctggcgtagtcagcaaggctgccacatctctgtcacaagcttccctttctcctagtgttttcagcaggcctgtatctctccaccatcctccccttcccgggtctcccactctcctctctctgtgacaggttctttttccttggcagattgcactggaatggtgtgacagtccctcagggatcatgccacctgcccaagctggggaggaatagcagagaggcatccgtggctggccaggtcaccaagataacactccccacaggcgagggtatccagggctcctgggactgcagattccattgcctcattgagccaggagccttggtctacgctgtaggacctcagtccacccaggaacactaaacttgcctgcctgccacttggcgctactataggcagctgtacctatcagcacaccatgcctgggaaggtgaccacagagagtaattgccagtgtttagtctgtgtgtgcatgtgggtgacagagcgaaaaggaaggtatggacctctcttttatatccaggttatttattgcatttgtcttacgacttccatttagagctaaataaactgcaaagtaggttatttaaactggatcttgggtgctttagcaagtggagaagtgggcggtgaggagggagaaagatgggagattgggccggggagattgagagaaagaggccaaaagaaacacaacgtggcttattttcctccccttggtagtggaaggcatggtgtgctgtggctcacagacagagatcccctttgctgggggatcttgaagagctttctgtctcaggcttttgggaagcagcctcctgtggacatatcttgcttttacaatttataaataaaaaactaaggcacagcctaggagtgcagattgcacaaagcctacagttacctaccgcacctggaagggtagctccccacttctttgcctgcttgtcacggtcacgtgccccctccacctgcgtcggacttgtgcagcctaatagagggcaggtgtacaaggaagaacgtcgttggggcattttatcgtcaccctgtccaaatgaggtttcagggagtctcatctccagagagtagtcttccacccaccatgtacgtgtgtgtgtgtgtgtgtgtgtgtgtgtgtgtgtgtgtgtacacacacatatttaagctcagatgccctgcaggcccagggagctctttgccaagagactcttggtccatccagatcactcgtgaattctcttttgtacagacttgataaagggtgtttcttgagtaccagaagtactgtagtactgtacataattcataacacgaagcaagataaagtagaaagaacaagaaaagataataactggggaattaaaagtttccaacattgttagaagctgggagagtgagtcagcagtacatatgtccttagggagagctttgcacagggctggttttggggtaggggcctaggtgtccaaaaaaggaggaaggagatgctcaggaggagcagaaatagggatgtggaggagaaggggctgagggcagggagaatgggtgcagattgcaagtgggggtgaattctagctctgccctgcctcctcccctccctttgaaggaaagagatatcatggggccttaatcatctccttatctctcattcctttcctggtttaattaaatttctgttctaatttggaagagcttgcatgttctcgactgctgtggcaaccaatctcttttatgagacccaccctggcactcagaggagtttatcacctccatgggacttggaccctctgtagcttttgccatcatggtcagttctgtagtgagcagaggtggatttgagaggagaaaggggctcccttattattgtcaaagtcatcttgtttacaatggcttcagtctgccccttcctcttcttcaccagggagtgaagcctcttctatccatgtatattttttgtgtttcgcattgtgttacctctcctctcccaggacaaaacacacttcgttgggatctctttgaatgttaaataataccgaaaatacagatgaaagacaggaaacgtggataaacgtaccatcagcattcctcttacacctactgtgtgcccaggcacagtgctgggcactctacacgtgtgactgcctcgaaggtgatggatcggtcctcatttgataaatgaggcactgtattagtccgttttcatgctgctataaagacatacctgagactgggcaatttacaaatggaagaggtttaatttgacttacagttccacatggctggggaggcctcacaatcatggcggaaggcatggaggagcaagtcacattttatgcagatggcagcaggcaaaataagagcttgtacagaaaaactcccattttttaagtaatcagatcttgtgagactcattcactgtcacgagaacagcccaggaaagacctgcccccataattcaatcacctcccaccggcttcctcccacgacacgtgggaactgtgggagttacaattcaagatgagatttgggtggggacacagccaaactatatcaggcgcttaaggcttacagaggttaaaggatcctcccaaggtcatacagctgttaaggtagaaagcccaactggaaccttgtcttgtgagctagaaaagcccaggctgtccccactactccctgttagaggaggacgtgagaggagatggatgaatgatttcggcaattcacttcaacttaacggacataccaaacattggagtgccgaccgattaccagggcccgtgttaggcattggatggtggaagagcttttgctcctgccctcagggagacaagacatgcttgtgttcagtggatgccttgaggaagtgttatggtccctttgagcattatggacccattgctgtggggtataaaggcagtggcggtgttctctctgaggtagccaagaaaggcttcatagagaaaccttgtagacatagaatttcaccagggggagaaggagatcaggacctgggcagaagcgtggtggaggtatgacatttgtgtgccgtgttgaggaagtggccacaataaaggagttggggtggaaaatgcctggagatgagactggggaagagattgggggtgagtgataaaggactgagtgtccattaatgactacagagttccttctatcagggaaatcatctcattacttgaaattatcaatgacttatctgtacatctttttgtctgacactgtccttgttcagtgcccccagggctcaaatgtgggaattagtctaatgaactagagttcatccctttcatgcctcctttggtcttttactgtggcccacatagccctgataatctgtccctggactgctcttctgtcttacttcacgcccttgcctcctccattgactgtgttcccttcaccatgactgctagccgtctaggctctttcctgcttcctggctgtggccacactgtttctgccatttttttttttttaaatttctaaattttgttttaagttcaggggtatatgtgcaggatgtgcatgcaggtttgttacataggtaaacgtatgccatggtgatttgctacacagttcatcccatcacccagataccaagcccagcatccactagctattcttcctgagcctctcccccctccccactcttgccctccgataggccccagtgtgtgttgttcccccctcccatgtgtccatgtgttctcatcatttagctcccacttataagtgagaacatggggcatttggttttccgttcttgtgttagtttgctaaggataacagcctccagctccatccatgtctctgcaaaggacatgatctcattcctttttatggctgcagagtattccatggtgtatatgtaccacatttgctttatccagtctatcattgacgggcatttaggttgattccatgtctttgtattcttcatctggccaatgcctactgatccctcaagcttcatcttaattgttacttccttagagagcactctcctaatcctaatataaattgagtgcttttggtataattttttaaatcacaatcttatttccttcatagcacttatcacctcttgtgtgtgtatttgtgtgaccatttattaagtttctgctctgttaactacactgtaaactctgtaggtgcagggatgtctattatttcatgactattgccagaaccttgcatatcgtgtggcatgtagtaggtgcttagtaaaaaatctggtgatttactggatggatggagtaataaattagtgaatgatataggatcaagctatcagcagggaatattcttatgctcagtgaaaacacaaagcctatgttaaatgaggcaaatttgttggtatttccaattgcatttttttaattcaacaaatatttgttgagcaccgattatagctaggcattgtgctaggagtcagggatatagtgaagaacaagcaaaatcagtccacctggaattcgtattatagtgtgatgatatctattaaacaatttaaaaaataagtgtatactgtcaggtagtgatgagtcatatgaagacaaagcaaaggaaggggcagagagtgttgcagggaggcagtatgcttcagatgaggtggtctgggaaggaggtggtatctgagcagaaatctgcagaagtgggagggaaagccctgggatatctgtggaagagcattccagatggagagccagcaagtgcagggacccaaagtggttgcttggcaggttcagggagtgtccaacaggccagggaggcttgagcactctgaggggcaagaggtcagagagagggtcagggccagatcaggttgggcctcgttgactgtgattaggagtttggattttactccgagtgtgatgggaagtctttgaggtgctttgaacagatgaggtagaagatctgatatatgctgaaagatcactctacctgctgtatggagaactggccatggcagggcaagagtggaggcgggcagctggcagtggtggtgcagcctggaatggctctgctggtggggctgagcagtgattagattgggatgtgttttgaaggtggagctggcaggacttgttaatgggttgaatgtggggtaggagagatgggaagatcaaggagggctcttcagctacattaatctgttaatagcggtgccatctaccaagataggggagccgagagaaggggcaggatggttgagcaaggtcaagagttgagctggaggcatgttaaattggagtggcctaattgatgtctatgagatagcccagttcgagatgtcataagaagtaagtagctggacatctgagtctggagctgggtcagagcaagagatatacacttgagaaacattaatttattaatggtgttttgaatcatgagatggactgatgtcccttagtcttgaagaaggcatagacagagaagaggaccaacgacttagctctgagaaactacaacttaatgtctattagcactgcagtaggtctattactaaggccctgagaacttgatcatcttctcttggggctatttcttctggaattgagcccaaatttagtgttgttgctccttttaggaagttattatgacaggggctactttgccataggggatgaaaataggaattcccactaccaccccatgggctagctgaaggtgcagggcaggtagagattcgggtgtggagggagctcttcagtctgagtctgttctgttttggttcattttccttttgtctgctgttcttctcctgtgaaaattgttttccctcaagctgatgtttttaaagcttaatttttatttctgtaactgtactccttttcattctacaaacctttattgagggcctgccatgtgctagacactgctcagaactgctaagtgctgggatgctccctttccaaacacacggctcctccccgtgattcttttcctgctcaaagccatctgctctctcccacctggtcctcattttattgatggctattacatcatctacctgtccatcatttttcatacctcttatatcattattagatgttctagctaccaagtcttggaaccagtcttcccattttgtcttacaccccacatttaactcatcagtagctcctttggctctatattcaacatttatccagaatctgcctaccaatcctgacctccagcgctgcaccctggtctaagccaccaccatctcttgcctgagttagtgcagtctctccctgattgcatcattaccccacttcagaacatccttatgatcctggcagtgtaaatcagaccatgtccccgctctgcacagaaccctccagtagctcctcttcccttgctgagtaaaagccagagcccttgcaagggtctacagggccctccatgatctgctcttccactcccttctgcttcttgccttaatctgctccagcacagtagccctcttgctgcagatgacatgttgggcatgcttctgccttggatggaaccttgctaacatgggtcttgctggaacattcttcccagttatcagggtgggctcactctttcccgtcctctggtctttactcggtgagttctttcctgaccatcgtatttaaaatcaaacctcctccttcccagtactctcttaactccctttcagatgtatttctctccagagagcttatcactagcgaccacagtatatactttgcctgtttattttgtctattggctaagtgatcccactagagtacaagcttcatgagggcaggacttttgtctcacacactgctgcaaacagttgatgctcaggttagtacctggcagaaggtaagtacagattgagttacttctcattggaaatgcttgggacaagaagtgtttcagatttaggattttttcagattttggaatatttgtatatattttgtatggnnnnnnnnnnnnnnnnnnnnnnnnnnnnnnnnnnnnnnnnnnnnnnnnnnnnnnnnnnnnnnnnnnnnnnnnnnnnnnnnnnnnnnnnnnnnnnnnnnnnnnnnnnnnnnnnnnnnnnnnnnnnnnnnnnnnnnnnnnnnnnnnnnnnnnnnnnnnnnnnnnnnnnnnnnnnnnnnnnnnnnnnnnnctcaacctgtatttaataaatatttgctgaatgaataaatgacagaacatgagttcatgggatgggagggtggtcaatgcactgtatttgttctagttactgttactctcatagtctttgcactaggccctttggtgacaagtgggctgcatttgtgagatggttggatgccattagggacctaagctgtgttctcagaatagcattgccacactagaagccagttggccttagcaagttgaaccatttgctgggatgtccttagtattattaggcaaactgatcatccaaggtttagggttagatgaatccacaaaagagctcattgaggttgtattaataaaaacaaccattcattgagtccacaagatccatacttacgcatgaaaattactctaggatctcttgctgggggataggtgggggatcagaattgccaagggtgtcctcatgaggaggcctccatccagcctcaacaagccttaaacacctcattcaggtgccgtagcaagccttaaacacctctgggtagggtttgaatctgtaaatgaatcagaggtaaatgaatcttaaaacctactggccttaagaattggaaggccccttgcttatatccttggggatatttactgtggtgaaaggatgagggtaaggaatgatagcaaacattcacagagcacatattatatgccaggcgctgttctaagagcgctctgtggatataaacccagttaattttcccaatagccctttgaggtagaaagattatattcccattttacagttgagaaaaccaaggctgcctgtctgcagggtctttgctcttgttgattatgttacaaccatctcaaaagaagtgttgttctagggccatttaggatgatacactgatgtttaatacacttatgtgttacattttgatgtgtggtattgttgtggggagtagctagctgtgtgtggaaacggacttttcatgaggcatgcatgtgtgaacactgtaattagtatttccaagagagaaaagcaaccccctcccccgcccccgccaacaccccaacactgcacctacccggagactttgctcgtgacacatttttttttccccataggagagaatgttaaagtagggccatctcttagatgaaagtcctagaggctttgggacatatgaagactggtcagatgctattgagcatttctcacctttgatcctctgttctgaggaattcttgatagcctaggactaatctatagttctcagaggggccagttgtcttgttgcctcctgttctcgcctccgcctgcctgtctccctggctctgagtctctggtgatatgtactggctcaccgtcaggtgttgggggatggggaggcggctgtgcagctgccgccgagctgctcacttggtaggagaagtgtgccactaagtgaaaatgaggcttggcgactgccctgtgacccactgccctctgtaccttgcccttccctgtgggtggcagagctagacagccattctcatcctggaaacgctggttttaagggagaggccagtcttcttgtgtttgctgcacccatcctgacttggaaggaaggtctttggtgactccatgaatggcacccaggggtccagtcttcaagttccattgctttctctggcctgtggctcatgactaattccaccccaaccttgtctcagactggggtcccactcaccaccagggcgtgagcttttggggaaccctccctgcttgtcagcccttcttttggaggagtaaccaggacccccagaccccacttttagatatccgggttcaatataacacatagaactttcccctcttcttctgggcaagcttgagatggtgtttttcatgaaaagggccagctgagggatcgtttcagagaagcccaggttggctacactttccttaggatgagactgggacatggaaagtgggaggagaaggagcagttgggtttggcccttgcaggcagtattttcctctggactaggagatcctctgcacagtgccaggcctcacactgcatgtaattaggcttctaatgccattttctattgacaagggcaagctgctgccaagtcacttgagatgaaattgggtcacctgtcacaattcctgtgggactgaggtagaactgtgcttactacacactttgccctattttaacctctgactggatctgatcccatatcttagctggaggaggagatgagggaggagcgggggcctctcagagccactctgatcctcatagggtgggaacttggcccggggatgccttgcttaacctagcggggagtttcttaacagaggtcagagtgaatcttttatccctttctaagtccaatttgtaggacatggggaagacagtgaccccaaattcccagtgtgggagacatgagagaggcctcatttgtcactctgagtcaggaggaggaacgggcagttatttgtcttctctcagaaagccacgctgtctagttgatagctcttctctgagaatggaaataaggagagctgtccagagattgagtgagggaggagagggagagaaaagaaagtgcttttgagtgtgtgcatgcatgctcatacattcacgtgcttaacttaggaggcaatttcggaggaaacagagagaaagaaattagaacaagcaggaagagttccaagatgggggagaaaggggcataacatggacaaaagcctgcctaaagaagcagtgaatggaccacatgcaattggggagacagaagcagaagaaaaaggggagggtggggtgggggagaaagcaggtgggggctgggaagttctgcctatgtgcattgtcttccaggtgcttttgtaagcctgagccatgcccaaggcagcactggcagctcaagctcaggccaaacacacacgagaagagtatcgtattgtgtttccttttcttcgtgtttttgaaacaggaataaaaactaccaaaagagaaacacaggaaaaaaaaatagaaagggaaaaaaatctattcaaggaggcatgaagatttaatcaacacccagtgttcttagcaggtcgggagcaagcacaaatcgtattgtctatgcagctatttctgacaccccccagcagccctcagagcaacctctgccactgcccagagtctgggaggcagttcctgggttccagtgtcctgggctattttgggtgggaagaattgctgagccagtcaagggaatggggtacagggtgtgtcatcttcttgaggagcttctcagcatatagagatttccggctttacatggtaggtatttgtccagatggagattttggcattgacatttatcctaatgtgctggatataaacttgggggtaattcgggaatttaaaactcagccatgttaccttcagtacagtatatggatcaatctcttctgctttatctctcagtggcattcaacacggttgctttctctctctttaaaattcatgactttggtgccattacaccgtcctgtttccatccgtctttctggttgcttcttctcctttggggctctcatttattctcactccctctccttctaggagatctttttgaagtctcttgactatacaccaatgagttgaatttctatttccagcccagaactctcttctgagctccagactcatatctaatcagctactgttagcaccgttctaaatacctgagactaccaagccttcaactgagggcttgatccctctgttgttctctttcccacctgcctgtcctagtaaaacagctctaccacctacggagttgcccaagccaaaaacctcacattgtccttctttttccctactccttcaccctcttgttttctgtctgccatcaaacagcaggtcgtatggatgctacctccaaaatatatccccggctgcgcccagtcctccctccccattacatctaccctgacctggccaccatcttctttgcccctgatgactgcagcagcctcttgactgtctttccagctttcttccttatttctcttcaatccattctctactccatggccagaaggatttttaaacaatgcaaatgtcctatgtcacttccctttttataaaaccctttactggattcatttgaaatacagacccaaagctaacatgatccataagacgagtggcctctgccagcctttccagccttgcccttgttttacccatgctggcttgtgtcagaatcagcccccaacccgactccatcaacctcagaacctttggacatgctgtcctgcatgcatgagggtttcttccttcggcggcccctcccatttgggctaattcctacttattgtttccatctcagtgtaaaggacatatcctctggaaaatccactctgatcattgaccctaaacaaagtcagtccctctcagaaatcacactcatgaccctttcaatttttctttggaatacttaccaccattgtaacactccagttgtttttggaatgtttaataccattctacctactaaacctaagctccatgagagcagggccatgtctgtcctgttcactgtggtgtctccaggatatggcaccctggatggtccatcgtagaggttgaataaatgagtgaatctatctcgaacacttttgtgcctagggctttgattcaagcacaaggtgagagtggagcagggtgggatgttctaaaagacagaataaagaattcttgtccttaaggcccctcctacctagtcctgttctgttttgtgttatgattatcagctatgtgtatataaactttcaccaaataaagattgttgctttttgaggattacgtcttaaattttgttgtcacactcactaggtttcatttccttggatgttttatagacatgtatgtacctttcagtccctgtctaggtggatgcaccttcctccccttcccactggtctgtatccttgcgatcccagcgtgtgcggtagcctgaactgcttgagttatgacagcctaagagctgggcgttcctggccatggctcttattctctagaagcttcagcctttctgcaaaatgcgaatgagattattaatggtaataataccttgtctatctttcagggttgttgtgaggaaaagatgagttcatttatgtcaaatactttgaaaactacaaagctccatgagagtgttggaattaagtaaggatgctggggagtgacgagagatgagcaattgctcttaactacagagaagaaagtttcctgcaggaggtggagattaggaatgaggctggaaagatggtgtttcaggcagcatcctggcaggaaatggaaggcaacttcagctgggttttgaagagggtttagtaatggtaccatttcagggatgtggacaggaatatgggactgagaagccatacttagaccctggggattagctattgtgggatgtcatttctagtcctgggcctgaaggagcaaggtgaggaaatgaggttgttagagcctggtgaggaaggaagaggggctgcctgaccgtgaccacagagggacctcaacctgcctgaattgccacactgatgcttctggtgccacctcttagaaactagagggctagggagctgggtgatgcagtttgtagggcctcacatctcagggcacagagaagggtggaaagtaggtgagggaggggcaggtaagtggagaataaccagtgtggatgggtattatttgggaagacagggaggagcgaggaacgatgaggatatccaggtaaggatagtgatgggagaaaaagcagaaaggctggagaatacctatggagcagttgaagaaattagtgggaaataggatttaagaagttggcaggaatgaccaaaccatgattgtcaggcttggaagactgggctttatcctgcagacaaggggggctacagcagttgtttccacagaggagatccattatgaaaagtgtctggagaaatggtttgggcagaggtatgtgagtagagggaggcaaggaatgaccagaacactgttgtgaccaccggtgagaatggagagcgctgggtgaacacaagaaccattgggaatggatgagactgaatgcaagggcatgtctacaggagaccccagggcacagagaagccccaagcctggcatttctgagcaggattgctttgctcgatgccaccttctccctctcctctattctagtcatgtgccagggctttgtgacccgtgcttttctgttcttttccttgggacatctctgctactgtcactgctgcctcttcccttatttctgaaggtttcttccacatttctccttattgattgtatattattactgcaactcatgaatgaccgtcagaggtttctgagcctacagggctggggcaggggtgtctcctgaccatttcaatcttctgccacagcctggaccacacagacagctttagcatcagaagagatggccacacccagagctgggcccccagtatccacaaaggaaagttcagcttaggaagaagaaatggggagagaacatttttcttccttagcacctgaatgaatgctttgcccagcagggctacctcccgccagtctctacctttgttgtaatgccaattcttatttaatgtctgccaaacacaaaaggtccatcaggatcacgtggaaagaaagtgaaatgctggcggtgccccctgggtgtaggcctgaaataagatgaacaggaaataaaacataactgcagggaaggcgggccctagacaaagaatggcagtgggcttgcttgttcctcctctttgctcccttcctttcaagcctcttgctttgagagggagaggcttgtgtgtgttttgtatgggttggtagtgtgagaaggaagtcaagatgtttgggaaggatgaattttgagggaggatgttaaacagaagaacagccaagtatggggaaggattgggaataatggccctaaatgtggcagagtagaaagagaaggaaaagaacagagtgaaaaggcacaccggtttcagtgtggcagaaggagctcaaacacagggtggggagttgatgagggctttgcttggctatttgtgtgcaagttatgagaaaattgctaataaaccaatgcaaatcatcatttattcatgtcattaagcactatgtttagctccttcgtgcattatcttattctcacagcagttgtgtgagctagaactctattttctatgatttgcctagatttgtagatgactaaactaaggctgaacatgagtaacttgcccatacagctgacaagcagtacgctggatctgaaactcaagtgggcaaaaccaggatggtcaagggagtgttccttctggacatagctcctaggcattaactcccagcatattggctggagttagagaagtattgccaggacagagcacatctccatcttcctctgtctccccatcccatgtcttgttatccagttttgtggcccctggacaccaacacagtattcattggatggtgaagaacggtgggaaaagcctggtccatttggtgtgcacaaagcatcttcctgacctcttactgtaaaagccatgacagtttgctccctatgttgtacaagagaaaggataaaagccttttgcctccagtgttacagagagagtctgtagactgggcatacttcctgaaggcaagtcttttcacagtccctgcacataagtaccaattagataatttttccagccatttcctcattcccatcccaataataaaccaataatctaaacatactaaggttgagaacgctcctcccaaatatcttgggtaattggatgatctacagaacgtatatgaggacttgttgggtgatgcccaagtgctatgtctttgtctgcagcactttctactttgcgtggtctataaaagacagctacagaatacagtgtggtctgtctttggctttgaagttggacatgctgaatattattaattattccttgcaatacagcaaaaagttctgatccaaacattgtttcttatgcttaagtttgttgaaaaatttgaaatcaggccttgtgaatttgatcatctaaggtcttatttgcagagacatgtacttactcaggtagtaatgtcaatagagatgtcctgaggctcaagaaatccctgtttgcattgtggtgagctcctcagccacattggagcatcttgggtggttccaatgaggacttttgaggaccagctcagccccatgcacaacagcatgcagttttgctctaatataaataaaaacaatggaagtagctatttttattggacttttactattataatatgtgctaggcactatgtagagggcttaagttcattatttccaactcttacaactttgcaatctaacattactacaatttttttttcttaagatggggaaacagaagagttaataactcaccaaagtcacagctcagtccatgatcttagcctctaccagttctgaaagacatgcctcctgctgtgtagtagttccaacagggcatggttctgatactaatccatttccatgattatgaacaagcaaggccttggcaaaattgtgagatagtaaggcatgccttctagctgccagcccttttgtcctttcccttagaacctttcgtaaaattctccacccccatcaccaccatcaacacacttctacctctcactgtctccactagcaaattcttttccccattgattccttcattcatttcgtcaactgatctttattgcatgctgactatgtgctaggtaccatggtgggcactgctctaaggaaagattctaatttcagttacttccatttttgcttgatttttaagtcagtgtttttttttttttctcagaagcaattcattctgagtgcttacctctaatcagagaatgaaaaaccttgtcaattatcaaaagaatgtgagacattagcaggcagatggtgggttttgggcaggtgcacctctactgtcaagacagttgccattcttcctcaaggataagatagacctgaggtacacagaagtgagttcatgcatgatgtggatctacctccagaggccctatcccactagataatttgtagattcaataggggaagggtgcttcctgacttagaaagcagatctcagcctctgaccctatccttgcactgtggctgagttatgtttactgccatagttactatagtgtatttaaagctataatattgaaagaccctatggttggcagatttcttcttgggcaacaggcttatgttacagttcttagataaagaccacttgtatatgatcattctagtatgcaaccaactctctgtgatcatctctgatgaaattctagttgagaataaacttttcccttgatacatacagaaggcaaaaaagatattctctaaaaaaacacgcaagagaagatttccatctgaaggccaatgcaccaatgcacctaagagcagagactgtcaagtcaccctacagagtcttcctgtcccaggagaaaacacgacacttgagattaccatacccaaaaaaggatgaccctctcatggcctggccacctatggaagcaagggaaagagcaccagaggaaagaataggtaggacccatcccaacatctgtagggaagagggagctccgtccaagggctggactttcaggtctctctggaggggagcaggctgaaccatgctactgcagcctaatgccactgactatctcagtcacgtgatgcactctccttgctctgatccatcttccaatcacaaattgacttcccaggaggcttgcctgtgagagggtgatgggtttacctgagctcatgtgggccctggtctttgcaaggttttatttttcattggaatgctcaggtgtagtgagttcgacctgagaaacaatcaactgtcagggctgatcaatcaggtttgtgagcaactgacattgagggctggactctggagtagatagagtttactcaggaaagcctctcactagaggcttcctgggagaatgctgtctggcctgtaggcaatagtccttgatgccattccttttccagtttggtgatacttgactctgagttttctttaaggcagctgggacagttccatggagggtagactcatgcacagagatatcatattcataacggctctttgctatacagctactgcaatctacaatcccacacaagataccccctccttcagtttttgagtacacatataactgtcaggttgactgaataagtttgcctatcctgaggtcataaagacagtctcctgttttattttctagaagttttattggtttatttttcacatttagtttccaatccacctggaattgatttttatgtgtgttgtgagcaggagttaagatttatttttttatgtggacatccaattgacctagcactatttattacaagtttttattttctctgttactgtctgtcacctttatcataaccatatcctgaccacgtgtgtatgagtttgcttccggactctgttctattccattgtatctctttgtatcaaataccacacagtttcttaataactgtagctttataataaaagtcatgtggtgatgtaatttttctaaatttgttctctattttcaggtttgtcttggttattttgttttcttctcagcatttatgtatacatttagcctttaaaaaacatgagggctaggagtgctgaccacctcctgggcaaaaatccacatataacttttgagaccccccaaacttaactactaatagcctactatgggctggaagcgttactgataacgtaagctgtccattaatacatattttatataatatatgtgttatatactgtattcttaagatagctagagaaaagaaaatcataaggaagagaacatatttactatgattaagcctaagtggatcatcataaaagtcttcattctcttcattttcacattgagtaggctgaggaggaggaggttcttgttgtccaggccttcttattgtacaaccaaaagactggcagctggtgtttatcttttcccttcaaggcttgggggttagcaactttatgggtactttatcaggaaggtcctgatcataaacctaactgcatttgcacaaaacagtagagttagcctattccttccagccttaaatcctggtgctcacttctctcccttactaataaatgtcctttgtggcatatttttttcccaaaatagggcactttgtctgcattaaaaccacttaaggtagacatctttcctcctcgatgatgttttttcactggtgcctgggaactcctctgctgcctcttggttggtagcagctgcttctcctgttagcttgacatttttttaagccaaatatctttctaaaattatcaaaccatcctttgctggcattaaagtctccagctttagataattcacattccttttcctttgtcatataatgacttcaatttttttcaaatcaaattagtctataggtatgccttgcttatagcaatcctgcacccatgtaaaagctgcatttttaatatgagataaaaagatatttcacaaaaagtataatgtttttgtacctgctgacgtagctgctacaactacttcgcaattttcttttcttttcttttttttcttttttacaatgatccacatgttggattcatttgtcttgaaatagcaggtagccacagctgtaggcctcaatttatggcaaatatcaagcaatttaactttttcttatactgtcatgacctttctctacttcttgggaacacttccagcatcactagtagtgacatttcttatgggccccatgatgttattcaaggtttacagtattgctctaaacacagtgaaaactatgcaagaaccatgagagatcactttttactacagcatgcaatttactggagacaattgctcactcagagatgattattgtcacatggtgtttgaagcagatacttgcaacacttgagctcattgcaatagcaacaggaggtggctacaaaaatataggcagtagtacagttacacatgcagttaattttatgcagttatgctttatactgcatctctacatttgtttacatttctcttaactaaatggtatcatgtacagtctgtaaatgtgtggataagttttgatacattttaactttttataatctgtatattttatggtagtaaatgatatagattaatatctacatatattttgtgcattcatgacatacctaactttgatatttctaggttacacagttctgtaagttttttcaaattgttgcaaacgtccaaattttttttccaatatatttattgaaaataatctgcatataagtggacccatgcagttcaaacatgtgttgttcaaggatcagttgtatgtactttagaattatcctgtcaatttttactaaaaaaactcttgctagggttttgattgggactgcattgaatctatagaatattggggagaattgacatctttataataatattgagttttctcattcatgcaggtaatatagtcatccattcattatatactttttctcattaaagttttatactattttgtgtagaggtctgatatatcttttattttattctattttttgagatggagtctcactctgtcacccaggctggagtgcagtggtgcgatctcggctcactgcaacctctgcctcccgggttcgagcaattctctgtctcagcctctggagtagctgggattacaggcacctgccaccacgcctggctaatttttgtatttttagtcgagatgtggtttcaccatcttggccaggctggtcttgaactcctgagctcatgatctgctcgcctcggcctcctaaagtgctgggattacaggtgtgagccaccatgcctggctgatatatcttttattaaactcattttgatgctatcataattggcattatttttaaagttctgttttctagtttttgttgccagtatataaatatacacattaatttagccatattcagctatcttgataaattcacttaccaattttagtagtgtatctgaagattcttttggattttctatatatataatcctgtcatctgtgaataatggtagtttaatttttcattttcaattcttattccctttttatttctcttatcttattatactggctaggaccttgttataaattaaatagaagtggcaataatggaattcttatctcattcacagtctcaatggaaaagtttcactgttttctcattaaacatgatctttgctgtaggttttttatagacaccctttttaggactaagaaagtttccttctattcctaatttgttaggtgtttttaataaacacaagttgaactttactaaattttttttctgcagctattgcactgatcatgattttcctcctatattcttttaatatagtgaatcacattgatttttcattgcaaccttggagtgacatcacctttgttgtgatatgttttttctatatcattgggtttgattttttacgattgcattatctgttttcacaatagaaactggcctataatttgcttttcttgcaatgctcttgtgaagttttgatattaaggttaggtttccttaatgaaacaagctagatatgctgtctttttctactctttggaagattttgtaagattgaagtattttcttccttagagttcacccatggagatatctgggcttggaggttttttgtttgtttgtttgttttgttttgttttttttgttttttattgtggtttctaccaagttgtaatttaacacagtggagaatcaatctgttatttaccatgttgaaagaataggctggggacagtggctcactcctataatcccagcactttgggagcccaaggtgggtggatcatgaggtcgagattgagaccatcctggccaacatggtgaaaccccatctctactaaaaaaattacgaaaattagctgggtgtggtggtgcacacccgtagtcccagctactcgggaggctgaggcaggagaattgcctgaactggggaggcagaggttgcagtgagctgagatcgcaccactgctctccagcctggtgacagagcaagactccatctcaaaaaaacaaaacaaaacaaacaaacaaaaaaaaaggaggtggggggaatcatggaatcaatgcagaaaaaaatttaatgaggttcaaactttctttgttttgtcttttttatgtctcttataagttacagatttaatttctttgaaagagaaccattaagcttttctacttcttgtgtcaattactgtaagttattttttgaagtaatttatccattgcattcttattttcaaatttagttgcataaagctcataatgtctccttattatcttttaaaacattcataggatctgtagtgatgtccttttttcattcctgatggtgataatctctgctttctccctcttatttatttatatctattagtcttgctagaagtttatcaaattcattagtcttctcaaagaaccaatttttggttttgttgatttttctggattgtaaatttatttttgtttttatttatgttctttatttccttctaaatttgaggggtttaatatgctgttctgtttcaaacttttccatgcatatctttatatttaaggtgtatttcttatgagcagcattttttttttttcctagtgggagttgttagtgtgtgttttgctcatcatggtattttgtacctggaatagtagctggaacatcctaagtcttccgccagaaaatattgaatgaacgagagaatgagcactgaggtctttgtcaagggtggaaggtgggacagagatcatcaggaatctgagtttgtcctgcaacaagtgaatcggtgcaactcccttgaggacttttgttctctgtgtattccctatctgacgatgatttagccagtcttcatgcttatctgtttcatgccaatccccctatcaagaacttctgctttccttcttcccacctccatcactcacaattatagcagtgaggggtgccacaagcttaagtatatagcatgttctttgccaacattcccaacaacccctccttttcaatgttctctcacagaaagattgcctcccacacctctcttcattacaaaagagcccaaatgactcctggtattttaaggggcgcaaagttatgacagtgacagagcgatgtggtattagcaaaatgactccgttggatgtgccattagggctttgcatgtcatctgggtgactgctgttttgtccacatttagctgggtgagccccagagctgaaggagtttattttcggtgtaggaagaaaagctttttggatttgcctgtcggttccttttatttttttcaaagactccaaagttgatatggctttttccccctgccttgcttcagaggcccaaagatgtagacaatgagtctctgcatgacatttaattcgcctacggtgctgttttgaatgttacagatgaaccaactatgaattggctgtatgtctgtatttatatgaatatgtgagacaaggggactagatgaactagagagaagcattcttgggaagaataagaagacaccagcgaagagatggtggtgggcatggcagatgagagtcacagtggtagaggggacttcaagagatcatctgggctgggcgtggtgactcatgcctataatcccagcactttgggaggccaaggcaggtggatcacttgaggtcaggagtgtgagaccagcctggccaacatggtgaaagcttgtctctactaaaaaatacaaaattagctgggcatggtggtgcatgcctgtaatcctggtcactcgggaggctgaggcaggagaattgcttgaacctgggaggtggaggtttcagtgagccaagatcgtgccactgcactccagcctgggtgacagagcaagactccatctcaaaaagaaagaaaaaagaaaccatctggttgagtcctttgtccttcagtagatgaagtgtcctcatccatattttatagacaatacaattgaaatccagagatgtttcattatttgaagaagaagttggaatctgattctgctagcctgtgaatttcaaaggtcaaagactatattgacgttgatcactgttgtattcccagcacctaattcagtgagtagtacagggtaggtgctcaataaatatttgctgagtaaacaccaaatatatacctacagctgctgaaaattcatttatgttacactttaagttgttctccagagcatctggttaatctggctctaaagtactacaaaaattatcagtttttaaattcatagatacatgataacaagtaaaataaatggatttcagtttattagatgagggttcattcatataacaaatttttgttgagtatcaatattatatacaaagcactggtctaaatactggggatacatcagggaacaaaacaatccaaatccctgccctcatggaacttacattgtttacagtgtaaaaataaaacagataaatcatatacatagtgcattagatggtgatacagtacaaggggacggggtcggttttggtaggagggcctgatggtgtacttttatatggggtagttaggaaaggcctcacagagaagttgacttttgaataaagacctgaagaaagctagggattaagccatatggacatctggggaacaagcattttgagaaagaacagcaagtgtgaaggccctgaggaaggagggtgtctagagaggtcagggaggagctaggagaaccatatggatggagcttatcaactaggggagccaggtcaggtagaatcctgtaggtcatgatgagactttgactttaacttggggtgagttaggaagcctttggagagcttcaaagaggtcagtgacatgattcagcttacatttgaatagggtcaccctagctgctttgttgggaatggactgaaagggggcaaagatggaagtaaggagaccagttaggaggcaattgcaataatatgagtgagagatgatggtggcttagcccagagggtagcagtatgaatggtgaggaggagtgaaattctggataggttttgaaggaaggaaaggctgatggatttattgatgaacctgacatgggatatgcgagacaaagggggagggtcatgattatttgaaggcttttggcttgagcagctggtaggatggcattgtaattaactaagctgtggagaatggtgagaagagcaggtctgtgttttattggggaggggggaaggatcaggaactcaggtttaaacgtgaagttggaggtggctactagacatccatagaggatcttttgtaggcaggtagaaaaatgacttgaattcagagaagtttgtggtgaaaaaatacatatatatctgcattattgtagtatatagtttttaagaccatgagaattaggtgtgaataaagctgatgtcatgagttttattagtatatggccaagatagggttttctattatattctgggggtcaactgattagcttcagggctactaatccaagatagccatgtagagcaagtatgtgttaactctacaggtgagctggtgagggaagggggtggatcagcttaagccagcctcactgccaggaaagcagccttgggtgttgagtcagctctgctatcatcctttctgtgaaggggaagacatcctgattgctattatagatatgaagataaactcacctggataatgtcatttcaccatgtaggcactcctcatccacatgttgagacatgggcatacacgtgcaattgaattcatttcttgtttttcttgtgatacattcacctcaaggtgagacttaggtagagttgaccaatgggctggagatcatgtgctgaggaaaccctgagaacacagctgctctcaacttgtcataaggtgtttctttccaaggagccccaaatggattgtgctatactcatggcattatggttggtaatggaggtgcaaagaagtagaagacttggagagttcccttaaggaacttatctggtggacttacatgaaaattcaaatagtaatgcaagatggaaggtgccagacaacagaggcatgaaatagttcatatgagtcatgagaaattctgagtgaaatcctaggtgccataaagtcaggaaaggctcattcacataggagattgggcttgagctgacctttgaggagtgggaagacttaaataagtaaagaggaagagggcttcctagtgtggttgtgcaggttgtacataaacaactctaaacagcaccataaatgtcacaatccatgtgtatggccccaagatggaaagacactccaggagggaaaaaaagcatggaaaaaaacaaggagatagagttacataatacatggaaagtttatttggctgatgctagtcaaatatccatctacttatttaggaaatatttatcgtctggcatcattgagatcacactgaacagagtggaagattcatttaggaaagcagtgacaaaaatgtgtgggctgttgctattcaatgtgaggccttgaatgtcaaaccaaggacttaggactttgccccatgggcaatcaggaggtatagaaggttttggatgagaggttgatgttttaaaaatagtgttctagaaggatatcttggcaacaatgtgccagatggcttgggttatggggtgacttgtggtggggaagtgaaggaaaaccataaaccaggaaaagagtggagagtgttaaaggtaattcagtatgggttaacagaaagacatggagtcattttcaaacatacagagtcgactgtacattcaccaattaggtgcttggtaaatgcttactatgtccgtggttctctaatacatgtaaaagggagacagaaaaaaattcaacagtaataatcccaggtatatctgtgaatataaaacacatatccacattgcaagtcagcctgtcaataagggaggacagaacatagataagcagaatgagatatagtgaataaatttaataactgccaactagttagcatttatggagctccttaatggcttaaagcatgactgtatcacatgagttttttttactacaaccctatgaaattagtgttatcagccatctttcaatttcaatgaggaaaccaagatgccgagagactgagtgacctattgtgctacctagccttgcactgtgccaagctcagtatctctacaatacataggtaggggaacctctagttactgagccagctttgtcagctgtggcgagggtcatacctgatgcagccatgagtgcatcccttcctcaaggggcatacaagaccctgccgagctaagacatccagtatggggtctttgtcactgccaagaatgcccctggccataataactgtccttgagtagcaagaatagcagagtccctactccctgctcctggatgagttaggtcaacagggactccaccaactctccatggcactggtccatcagagctgcctcatgcctatttccatgcctaggttatgctgtaggaagcattggcatatccaaggctagatctttcatttccttcccctgcgagtcttctgtaattgcttggaactctgggaagtccagcttttggcttagtagagggctgttctttcactgagtcagggccctttcatgatggaacctcttctgattatgaaggtaatgttagagtagttggtgggtatatttgctagggctgccataacaaaacaccacagactactggcttaaacagaaatttactttctcatagttctggaggctgggagtcctagagccaaggtgttggcaggtttgttttgtcctgagcctctctccttggcttgcagatggcccccttcttgctgtgtcctcccatgttctttttctgtgtgcatgcatcttttgtgtacaagtttacttttcttgtaataataccagtaaggttggattagggcccaccctattgacctgatttttaaaccacatcacctctttaaaaggccctgtctccaaatatagtgggagttatggccttggggtgaattttggtgggagacacaattccgatcataatcctggggaagctcttcccactccacatttcattgtcctgttgtccttgctctcctaattctacttcccttccctcaccttttctggaagtctatttgagcctggatccagaagatgcaagggagagatctgaagtgttgcttaaaaaaaccgcgacagcccacttatgcttaggagctttttctgggcacctttcagcagcaacacaccctcacagttggacttcctgtggtgaaggaaattttctaatttcttttattaggctaattaggaaaagaaaaacaatcattttttctcaaatcagatactataactgggacacaatgattattaatcatcatcagctgcaattgaagtccatttggtcattcaacaaacattccccaaccccattcccacctttccaattatgcaacccctcagttaaaatcgccatctccagaaggctctccctaactaatttggcccacaatggtaaaccccttttcaaaatttgtgtaacatttgacatctgtattacttatttggtatgtattatagtgtaccttaaaatctttaatgtacacatatacataacaaaataagttccttaaggacaaaagaccacactttatataatttttgtttgctggaatttaacagagagtaggcacagaaaaagttctcaaatgtttgctgaatgattaaatgattaaataatttgaggatgggtattttttgggcccataaatttagaaattactgttaaataacattatatagatttcgtagattacaaattttgaaaaaattgaacagcaataaaatacattttaaattcaaacaacatatggacataccttggagatattgcaggtttgatttcagaccactgcaataaagtgaatgacaataaagtaaatcacacaaatttttgtttcccagtgcatataaaagttatgtttacactatattgtagtctattaagtgtgcaataacatcgtgtcaaaaaaacatatctacataccttaaataagaaatatattgctaacaatcatctgagccttcagaaagtcttaatctttagctagtggagggtcttgcctcaatgttgatggctgttgactgatctgagtagtggttgctgaaggttgggatgactgtggcagtgtcttaaaacgtcttagtgtgtttttcttgctataaaagaatacctgaggctggatattttataaagaaaagctttttatttgccatacagttctgcaatctatacaagaagcatggcattggcgtctgcctctggtgagggcgtcaagctgctcccactcatggtggaaggcgaaggggagcctgccacatggtgagagcaggaagcaagagagtggggagggaggtaccaggctcttaaaaattctagacagaactaatagagcaagaatggagaactcatcatcattaggatggcaccaggcatcaagctattcatgggagatccactcccatgacccagacacctcccattaggccccaccttcaaccctagagatccaatttcaacatgagatttggagggtcaaatttccaaactatagcaataagagaagaatgatgcttgctgcagccattgactctttcgtgaaagatttctctatagcatgtaatgctgtttggtagcattttaccaacagtagaactttttttgaaactgaagtcaatcctctcaaaccctgctgctcttctatcaactaagtttatgtaattttctaaattttttgttgtcatttcaacaacattcacagcatctttacaggagtagatttcatctcaaaaagtaaaaagcaactcctcatcaatgaaaattttatcatgagattgcagcaattcagtcacatcttcaggctttatttctatttttagttctcttgctgttttcaccccatctgcagttacttcctccactgaagtcttgaaccccctcaaagtcattcatgagggttggagtcaactttgttcaaatgtctgttaatattgatatttttaccacttcccatgaatcatgaatgttcttaatggcatctagaatggtgaatcctattcagaaagttttctgtttactttgcctagatccattagaggaatcactatggcagctatagccttatgaagtacatttcttaagtaataagacttgaaagttgaaattgctccttaatccatgggctacagaatggatgctgtgttatcaggcatgaaaacaacattaatttccttgtgcatgttcatgagagctcttggatgaccaagtgcattatcagtattttgaaaggaatctttttttttttttttttttgagaagcagatctcaacagtgggcttaaaatattaaggaaaccatgctgtaaacagatgttctgtcatccaggctttgttgtttcatttatagagcacaagcagagtagatttaacataactcctaagggccctaggatttttggaatggccaatgaacattggctttaacttaaagtcaccagttgcattaacctcctaacaagagagttagcctgttctttgagtctttgaagccaaacgtcgtcttctctacttacaattttctcgtctctagttatgaaagtcctagatggcagcttcttgcaatatgaagctgtttcatctacattgaaaatctgttgtttagtgtacccgtctttatcaattatcttaatcttctggaaaccttgctgtaacttctgtatctgcacttgctacttcaccttgcactttcatgtatggaaacggcttctttccttcaacctcgtggaccaagctctgctagtttccaacttctgcagctttctcacctttattagccttcacagaattgaggagacttaggttcttgctctggattaggctttggcttaaagggatgttgtgactggtttgatcttccatccagaccactcagacgttctctgtatcagcaaaaggttatttagctttcttattcatgtgttcactggagttgcacttttaatttccttcgacaactttttcttgcactcacaatttggccatttggtgtaagaggcttagtttttagtctatctcagccttcgccatgccttcctcactaagcttaatcatttctagcttttgatttaaagtcagagaagtgtgactcttcctttcacttgaacacttagaggccattttagggttattaactggcccaatttcaatattgttgtgtctcaggggatagggaggccaaaaaagagggacagaaatgggggaatgaatggcaggtcaatggtgcagtcataacacacaacatttatcaattaagcataccaacttacataaacatgacttatggtaccccacaacaattataatagtaacgtcaaagattgctgatcacaaatcaccatgacagatataataataatgaaaaattttgaaatattgcaagaattatcaaaatgtgacacagaaacacgaagcgagcatgtgctgttggaaaaatagcatccatagtcttattagactcagggttgtaaaaaatgcaacatttgtgaagtgcagtaaagtacaataaaacgaagtgcagtaaagtacagtaaaatgaggtatgcctgtagaactaatctcgtgtcttagatgtgtgaaaaaaagaaaagaacactaaagccaggttagagagttctgctttctgctgtgcctttcatggacttttgaaccttgggaagttactcagcctctctcagggcctttcaccatttacaaggtgaggccatggactctcagatgacaactagatttaccttgcatgcagttttcagtgtatggacatggtttactggagaaagattctgagaccatgtccaaacccatctatgaaaagtacctggaattgttagtcatgtcagcaaatgcagaggaggaagtataggtagtgtaagtatagacgttctctgaggtccctccgagcagtaaagctctatgaatttatgattcactttctctttcatgaagagaaagcacttcagaaacttatggggctctgtagtcatcaccaagaacatttgctttcattgtactgttaagtaggagtgctcatcagcagagattctggtcaaccaaatgctgggttagtgtagagtatgctacttgatctaaattcaggaaaacatgcccagggcgtaggacttccatactacacaaattttcttaattgcattggtgtaaaatgtgcaattaaaagggtaatgagagtggttatctctaggtaatgattgtgggtaatttttgttttcccgtttatgcttttctgtacttctaaatgttcatatataacttttatagttagaagaaacaaatcctataaaaaagaatgatagatactctagcaagatgaaagaacaaggaagaatttcaaaattcagttcatttcagtgaacatttatccatttcattcaataaatatttatttaccacttacaatgttacaggtactgcaggggttaccagtaactgattcaagaaggagagctgttcacagagcaagatgtttcacagaagggaaagctattgaactaggtcttataggaagagttatcaattgacagaatatgaaaatggggcatcttgggaagaggaaatggtacctgtatctggaaaatgtaatgcattatcaaaggaccgtgaatgtttctgagagggatcctccttaggagtggggggagataaggctcggtaaatggatgaggcccagactgttgtgtcatggtgtctaactagtgggcaaagtagagccactgcagggttctaagcagaggaaggccaccatgagaacagtgtgttgggaacactgatgttggcttcaggagggtcagagggaattcactgggcagcacagtggttcagggtaagggaatgctgtataagcaccaggcttcttcccaggtgttcttaattattacaaattaggaagattaaggtttaaattgtgtcactaacatgcttattcagtgggtgaggctacaggttgctaaacttgttagaattgtgatacaataatctcattgttttagtgtcatgtcttttccacccacctctgctttctctttctaaccgtctcccaccccatgttattggcatttagttcatattcattttagtattaaagtgaagtaattatttctgtattgtgaaattggcatttgagatcattggaaatattctttaatgctgtaagctagagttttaaaaaataggattagttaagtcatattttttaaaagcgaaaaaaattacccagaagctattgaagatgatgagataatgagatgaagaagttgagatggactgtgtgtctcttgagtcaatgtcgataacctttggaacctgtcctaagtgagaacctcgattgccctactgcaaatgcacgtgttcagctgctgattcaggactgatcactgggggtgcctcagaactttccattttcttagattcgtcagcaaactcacactcagggaccttatgagaccaagtcagagtaaatgtccagggtttacagagtggatacagtggctctgtttctcaagaaggactctgtataattaaattatcattcttctattaaaaaattgaaattctttctcccaggagctcattgccagtgccttctctgtagtcttatagtcaattcaaaaatatatcacttctggaagatgtgagcttgaagtgtgaatgctatcacatgaatcttctttttatcatagaaaaggcttttaggtggggtgttgatgtcaagattaactcagagaaaattggctgcagttagggctgaatgatagtgatcattccaaaactcattaggagtctaaaaagtgaatatttagactttgaccaaaacccatttgtcctagagtgaaatatggtagcgagagaaagacagccctgcaaccccgaagtgtaggcgggcctttctttaggaaccaggcatgttcttgaaatcttgtgtgtcaatcagctttttgtaaatggaatccttttttctccttcattaactttccctgtaatttcagcagtgtttaacattcattactgattgatcttgagttggcagttaactgctaacattcagatttggattttagtgcttctttcttgattttcttgcctttttttctttgctcactttctttcagcaactacttaaggagtaaatactatgtctcaggcccagtgatagggactgggaatataagtaagaatgacaggtaaacaattaccgtaggaaatggtaaatgcaaatcctaggagtacagagaagctgtggtagcacggagtccctctgtctggggagggcttcccagggcaggggttactgaaggatctgaagatgtgaggaggtgcttgcttgggtgatgcccatccaaggaagaccaggatcagaggcaggtttgggattaactaactggaaggactttggtgttgaggagtttcagtctcaggacaagcagtgaagcagctgatgatctttgcttagccttctacatggagtgagttgtggggaaaagttgtttgcaacatgtatttctctaatggccagggaggggttatttcactattatttctctccaacttttctatcaaatacacttgtggagtttctgtagtgtgaattgtcttacttcaatctgtaagttcaatctatattcatgaagtaggagggcacccctaaataagattgagagggaaaaaacatgaatattttcagttttagtgggaactctcatatttgacttagtaacattaaaaatgattatatataaattacaaattttttatggtaaaggacaccataagtaatgtcaacaaatgattaatacactgagaaaaatgacacgtaaaaaaaattctaatataagtatatataaagagcctctataaatttataagaaaaagacaacatatagaaatatggacaaaggaagagagtaagcgattcaaaggaaaggcaaaccatatggccaataaacacctgaaatgatgctaaaactcagaaaaatgcaaattaaagcaataaatcggaccaattctttatccatcagattggctaacatgagtaggaagattagtggaatgttgcctacctgtggttctgtgcatctgtgtgggtctactttaatgagtttagatctaggtgcttgtcctggaggcacattcacagtgtgttttttaaataagaaaagcaagttacagagtaatgtgtatagtatgatcccattcaaaaaaatagcaaaatgctatgtgtaagtttgaatgtgcatgaagataggtgggaagaaaacacatcgggccataagcacttaccacagcaggatgggaatggggggagggtgggggcaagtaactttttctatatacatctttgtatgcagttgtatacatattgcctttgtaatttaatgtacaaagacaaaataagtacctagaaattaagaacagattagtacactttttctgctactgtcttgccatagtgttgttcaaaccagctagaaaacaattctgtggtgccaggtgagatgaactctccacctcttcctgagggctttgtcttcatgcatgggacaaagcagtgtaattaacatgcccccccaccccgccttaaaacctaatattcattcatctcttactttggttattatttaaaaagaaaacatttgtcaattacttcacactgacaagcaccatcccactgagggggcaggcaggaggtccatctcaccacccagctgtattgcaacaacgccctctccatctgggaatacggcccaggcactcctctggaatcctgaacacactccaggcacctctcttcttactgaacaccacctatgcttggagcaccatgtgagaggacacctctggtatcaggcagcttcagatgtattcagagagattgaaaactgcaaggattcaaggcataacaaatgatacacagacaagaaaaaaagacatttagagtgggggatagggcctgaaggcttgaatggtcctacaagactttctcaaaagtcgtcaccctgggacctgaaacattagagctctttccagagtaagtctattctcggccagaggtctccaacagaggctgtccatgtgtactggtttcaagttctgcttacctcccaagtgttgttttttctgaccctgacctaattcctcccaggccaggctggccagcaccttcttaaattgctctcaggcagctggaaggcctggctggcaggagccctgggtttttcaccctcagccccagggctctttgaaggcctactctccaagaacaaacaaacctggcctgacgctgcatagctgcagaataggggagctttctcggcctggtgcccagggtggccgagctgccagccaggtgcatgatcctcagttaattaggtaactataggtagtcctgcagcccaggctgtgtgctgattagtctgggctgttgttggagacctctgagaatagacttactctggaaagagctctgatgtttcaggtccagggtgatgacttttgagaaagtcttgtaggaccattcaaaccttcaggctctatccccctctctaaatgtcttttttcttgcctgtatacatctgctatgccttgaatccttgcagttttcagtctctctgaatatatcttaagttgcctgataccagaggtgtcctctcacagtgtgctcccccagcatcgtgctctgagcataggtggtgttcagcaagaagaaaggtgcctggagtgtgtttaggattccagaggagtgcctgggccgtattcccagaaggagagggcgttgttgcagtatggctgggtggtgagataggcctcctgcctgccccctcagtgggatggtgcttgtcagtgtgaagtaaaccctggagcacctgagggaggaagaggaggagatagatcttcagcttccagggattagactgaaagctcaactggcaaaatgcccattttattccctcattgcaagctgaaagtagagagctgaggaaccccgggcttgaccacttttttgcattgacagatcctttgtgggagacacatgatccacatgggcattcctagatccctttgaagactccataagcccagggagatcagatttacctcaggtttcaagtagatctcaagatcccactggaactcagattttcaggggagttcagaattagggcacgaagtgcaggagatggtatcaacagcaacaaatctgtctgatattctaaaagagttcatcccagtgtagccccaaagacttcagactgaaccagattcaccttgaattgaataagctgatgcaatattggcagctacacattcttcatatgacacctcttttctcaacttctcttcaccctgtagtctccacagagatattcctgagggatagcaagagtggggagctaacctgtttctttgcactgaatgagcaatgcttgtgcctttcctcttttcttgtatctgtacatttccagaggagccagtttatagagggtatagagtaacccaagaatacaggtttgggagtaagggagctggcttttattccaagtgctgccactggctctctgtgtcatcctggtcaaggcatggggtgggagcaggtgttgaaaggagcctgctgctggggattggctggcccccaaggagcttatgcccctcttgctaggatgctggggatcaggtcagtaacacctgtatttacagatgtgggctttgttacatatttaatatttaatttaaaaagaattaatgacagtcatagcccatatataacccacttcctgatgtgatttgtttggcccagttttacaaagttgtcctgtcagaggaatttcatttataaagttccttattgctgagcctctgtgtgttccagttatgagtcacatgtgtcaacaccgtggaaatgaaatttgtaccccctggacccatgcagattgatttgattctgggctaaatggaaatagaacctgtacaagtcaaatgtttctggagcatctgccatctacagggcacttggaggaaacataaagacattcaagacacaatccgtgtattcaaagaatgcacagtccagccaacaatgttttaaagcttccagtagtttcctaaaaaataccatagtctttttgagtttggagaatattattactgttgtcaattactttttattagcaccctgtatgatataggtactatcttaggttggtttccctggaagtcagctctgcaaaagagaattgcaagcagaacgtctttcgaagtgtgctttgggaagatacacctgaggatgcaaaaaagccaaagttcaacagaggaaaggctgactcgcaccaccagaactggatgtcccttcagaggtgtctctaatcgaggcaaggggcagtttccaaggaagggtgcagcagctggggaataagagtgtctgccctgaaagcagaacctgagtataatatcatggtatccactccaggcattcaaattcattcttatcaccatagctaatacttaccgaatgctttctgcttgccatagcttgagcgagtgttttagctgcactgtttccgattcatgcaatgtagagatgaggcagttaaggggcagagaagtgaactgcacaatgaataccatggtaggcagagaggtggagaggggaattattaataactgtcagactacacttttttatttttttgagatggaatcttgctctgtcacccaggctggagtgcagtgccaccatctcagctcactgcaacctccacctcccaggttgaagcgattctcatgctttagcctcctgagtagctgggaatataggcgcctgccaccacgcccggctcagttttgtatttttggtagagacagggtttcaccaagttggccatactggttttgaaatcctgacctcaagtaatctgcctgccttggcctcccaaagtgttgggattacaggcatgagtcattgtgcctggcctcaaactgtacttcacatgtaattttcaaagcgctatcccatgataggaattatcattcccattgtacaaattgagaaactaaagcatggagaggttaagggatttacccgatgtcacagaacaaagaagaaagaggtaaggccagggttttcctattagcctatgatgtctcacagagataacctgtccaggtagatacccagttttggctggagaaggcatcacagaccttgggtaattgatggcccaccagtttgcacccctttccattaatgtggaccgatcatgccctttgttgtgggtcagtgagcgtggtctttgaagttaggcagatgtgggtttgaattctagctctcattttatgacttacgtgtcagttcacacctctaagctcactttgctcttctttaaaatgggggtgataatgatgacttcattgggtcattatgaggattaaaagaaatcaggtatgagaaatctctcagcacattctcccctccctggcaaaagggttcaaggctgcacaaagattatctaagggcagatactctgaacatagccatagtttattgattcagcgttttgtcatttgcttccctctctcaagaggcaagagagaaagcgagactgtcttccatgcagtttgctcagaattctaacactagcctgttagtctaatcataacacatttcttcttggaaacaaacatagcaacagcaattatatcttacttttaatgtctaattggctgtaaacttgcttttactaagttatttccatcgaacatgtagagcattgtgcagtttgcttatcttgatgtcctcctcttgcagtccccatcttggctttattcgggaggccaattatgtgtatgctagccttgtgggtgccctagaaactccagcaaaggccagtgacagtgttgtgagccttctgctcctcattatccacagaggcaggagcctatcagagcctccaaccttgaatttttgtgtgagttctgcttctgttctcctactccaggtatgtcccctcacctggcttctggagtaacccatccctgctctctgaacccccacttcgctgtgccttcctctgcttctaaccctgcctctacgatgggctctctctccttttcctcataagccgatcattcttttcctgcaagaagtcccacagggaagccatgccatcctagccagacttggttatggtatgacctggcgttcagaggacacaccccagcacctctacactggctttcagccagatatgtcttcaccgcttgttgagacagaacagctttcttctacctttatgctatgaagcagcctttccaggagccctactggggccagagcccaagtgggaagatcctcccttaagctttcccctctgtttttccaactcctgaaacttacatccttctgcaggcttcaggactcagtgtaggtgtgtctgatgcccggtcatcctagagaaggggttgtgggaggggctgtacctgttgctatggcagcaaccagttgagatcatgaacccatttgattcagaggcaattgcaaggtgaatcaatctccttgtcacccactcctcttctcctccctctccatctctccccacagccttctgtcatctttcctcctccccactcaacctcaagctttctccttccccagttctctctctctctctttttttactcctagttatgatacatcaatgtagcagctaaagctactcatggtagacttcttatttatattatactttagcaagcatcacctaaagggcttattaaaacacagattgctgagcttcctctagagttctgatctggactctgcaccaggacccaagaaagtgcatttctgacaaggtcccaaatgatgctgacactgcaggtccaggggccacactctgagaacaactgcgctagactatgtttacccagtttgatttggttgtggctggaatattcctctgcattttgattctaaagtatttgattagctcattcatccattcatagaacagatgtttattgagcatctattcagtgtgaaacactgtactaggtactagctacctagagaaacataaaaccttgccctctaagagttcacagatctgtacaaaagacacagtaaataagtaattattatatggggtgataagtattgtaataacctgcaaataataagagatttaaaagtatacaaccaactccttgctcgtggcaagtaaaatatttagatgataggaatataaataataatgacctattcatttatttttctttctttgccaagaattgcctgaagggaactgagcttaacctatttaaataataatattaacatctaatgtttgtggagcatttactatgtttcagatactgtaccacatacaaggcatattggttaagagtgctgcggtcagactgctagggatatagtcctgacttgtcattatctgtgcaacctcaggcaagttacttaaccactctgtgcctcagtttcctcatcagaggaaaaggttatagtactagtttctgcttcagcagattactgagaagatgaaatgtgataatgtagtcaaaacatatatagtaattactccaaaacacgttgactcttattaccaacatattttgacctgaggctgaatatcacagaattggcctagagaaattgatatcttccagactaaataaatctccaggattttgtcaagagaatggatgggggctggacctcaatgtggggattagagaattccaaaacaggcctgaaaactccttggagcaccagtcagaggaagcagccctacttggctgtcggagaatcagtgcaccccaatggaatataagaaaggccctgatggatggccaggatttggaccatgaaacttgttttggaggagggagggggattgtcaggactgaggctttacagtctctggttgacacagctgaggaaggcagaaccctcaggctggggtgtgagagtttcaagcttagccttgaccagtcttgccatctagagaaccagggtcactttcaggcccaaatgccacggggctggtgctgtcagcattatcagagcgtttcctagcaatgcccatcagcaaagaggctgtgttttctgaaccttctccaaagaggctgccctctcccctcttcgatatgcacccccatccctgagagaagtgatttcctcttgttatttggaaatcagggagagagtttcccaatctttgtctggggctctacagggaccacagtccacattcatgttgagtcaggtctctcttttctgtctcttagacccagcttcacagctgagactgtagctatatgagaaagcagaatctaccagttttgttttaatcctttcctgagctcatcagagataagagtgatagaaactttcttcttacagagaggattagaagttctttgtggcaagatatacctgggaaggggttattaagtgatcatccctgataaagcccctctaatcatctactagttttgctattttagtggtgggaaaaaaaacacaaaaccctaggcacttaactcactcttggggaaatctttctaatcccttcctccctccctccctccttccctccttccctccctccctccctccctcccttcctcctttccttcctgccttccttccttcctttctgtgtgtctttgtgtctttctgtctttcatcctttctgcttgtctcagatttaatcggagccatacattccgcttattcacttatttgtttgttcattcaacaaacacttgctgagcacctactgagagctaagttgggttctgggccagaaacagacaaagcaaacctgcttcttgttcttgagggtgtcaaatattgtagaagtgaacaacataccagcccacaatgattatgttgcagttaagtggtatggtggaattcagtgtagggcataagggagtgactgactctgggaaggttttttagtgaaggtaacattcagtcagggattgagtggaggcttttcaggtggaaaaggtaggaaaggcattataggcagtggggacaacatgagcaatagtgtagacataggaaagaatgtggcatagaattgcaagaagctggatgtggctgtgtgacttggtatacaggtaggcagatgctgtgagagacagatgagctagagagggtaggttgggtcagtcatggtaggggattggcatgggcaaattcccatttcaaggtattaagcaggggagagacagggcaagatgtgttggttagaaatgacaactcttccctgctctgaagaatgaaaccagctgtgcctgggaatcacttgccccactttacaagatctccctggcaacagaatggctgttgtacaactagccagggaatttgctgtgacagtcttccaaccttatctgacatccagagcagggaaggaattgccaagttagggtatagatatcaaaggaattgaagcaacacaacattggaatagtattacaatatgaaattagaaactattttctctgctggcattgttgtaaataccagcatccatcactcccttctcaaatatattgtaagttaaaacattgctatttttatctctaacccccttgccctctaacccaggcaatacaatatagcttcttgaggagaggcccaagctgggtgtggattccgaatcttcacccagcttcacatgcttattgtgggagcttgggcacatcccctgtgccttctgagcctgggttgtgttgttattgttgcttgttggtttgtgatatggtttggctgtgtccccgcccaaaatctcatcttgagttgtaatccctataatcctcacaatctccatgtgtcaagggagagaccacgtagaggtgattgactcatgggggcagtttcccccatgctgttctcatgatagtgagtgaattctcacaagatctggtggttttataagtgtttggtagttcctcctgcattcattctccatcctccctccttgtgaagaaggtgccttgcttccccttctaccatgattgtaagtttcctgaggcttccccagccatgctgaactgtgagtcagttaaacctctttccttataaattgcctagccttgggcagttctttatagcagtgtgaaaacaaaccaatacagtttgttacatgtacaattgcaatagcacctctcttgcatgtggttgtgaagattaatgtatgctatgcacctggtccaatgtccagcttagagtagagtagatgcctttttttttttttgagatggagtctcgctatgtctcccaggctggagtgcattggcatgatcttggctcactgcaagctccgctgaccaggttcacgccattctcctgcgtcagcctcccaagtagctgggactacaggtgcctgccaccatgcccggctaattttttcgtattttcagtagagatggggtttcaccgtgttagccaggatggtctcgatctcctgaccttgtgatccacccaccttggcctaccaaagtgctgggattacaggtgtgagccaccacgcccagccgagtagatgcttaacaagtggaaaccattattatttttctccccttcgatacatggagccttagggtctaagtgacaggaaaatgttcagataaagatgttttaattatgtcttcttagtacttccagaaagaggtctgcatgggtttaggtcagctctgccttccgacagcttacgtgcattcttgtgttgctctcccatcttcactgctcttcctacattccaccctaatgaacggcagagagagctatgcaaagtggtcaaagtaaaaagggattctttccgatgtttcccagattggagaaacaatgaacatgattactttattatctctgttttgttttaatcttgttgtgccccaaactaatggggatgctcatttggaatgagctttgtgtatctttgggcaaagaggaaaaccaagatgaatttctaggagggcagcaggagagtgaataagagagtacaaatcatcacaaatcaagagatgagtaaagagaagggggttgggaatggcagaattggaacctgagagttagagtccatgagagagaggagaagcaaaatgagaaatatggagtctgagtgggaaggaaccccacatctgttgtctgatacaggcacctactcaagggaggaattcggcatcagtgtccctcacagatggttgcctgacacagtgatttctataaataacaattatatggcactacgggaagtggatgaggctacttacaaatggagctgaccagcctggggactgactgtccccaaggtctgtcaaagaggtgatgggaagatattttgtgcacatctgtagctcagtgtgctatgagaaactgacctcatagggccatcttggagtgactcacccatgtaccttcaggccttcaggtgattaataggcatgtaggactgacgtttcattatcactgcatcaacgctgatgtagacttattgagcatgtcttccattgatgctgtcttgggttctggagatacaaagacttacaagccatggttccttgctttcaacctgtttttgttaaggaataggagtgtttcctgtggccacagaataaacgaaactaactgtcctggggcttcttcaggaaaccagtggggctaaccagacttacatagtgtttgatacacaatcattaattaaaacagagatgttcaatgataaattaattcgccttctgctcagaattcattgaggagggaagaatggaagccaagaaaaatgattatctgaagcttttttcttgagcgtctgcccttgtaggctgtgctgaatatttgagtgagctaagtgtacttgctgtatgtcaacagagatgacattttacaggtgatatatttatttccagagaaggaaacttatataggcttgtgaagcagaagaatgccagcaggtttctaatctcctattagtaaacaacattatcgagaatctcctgtttgtggagtaatattctaggcatttgtagagtgaacacagaaataaagatgcagttctgtctttaagaaacattcagccctaatgggaatggaggaccaatatgtaaaagagacagaacacatataaagaaggtccataaataagtgcaaataaatgcctgagtgcagcacttaatgttctgttttctattataggtatttgtactcacgacttagccttcttatggataccaaagcccttgagaactgttttcctttctcattcatcttgtgcagagtacacactcaaaagtgttgaatgaatatgtatgctactgtgaggtgtgcctaattgctgggggaattctggagtgaagtagaatgacatgtttaggggaaaccttatagcggcttagcagtgttttcaagtatgagaggacttgtaattggtggagtaaggggacaggagggagaagaaagaaggaagagttcacggggactgagcaaatccaaacaatttatgccaccattcagggtcctccatgatctgatccttcaggtcttaccttgccttgcttgctgccaccaaaggcagcccactgtggccttagcattcccacctctttctctctccttggaatgtcttcctctgttgattggccatctgaatccaccttccacttcatgtctgggtgaaagtagagtctcaggaagccttacatgacatctctatccttgctcctatcttcattaaatggcagtgtttgcaggtctgatttcagtggtcttaaccttcagaggaaacgagagacaatcatggtcttcaacctcgggtagctttcaaatgagatcatgaggcaacactaattttttgtttttttttttttgttttttttttttttttgagacagagtctcgctctgtcacccaggctggagtgtagtggtgtgatctcggcttactgcaacctccgtctcctgggttcaagcgattcttctgcctcagcctcctgagtagctgggactacaggcatgcgtcaccacacccagctaatttttgtatttttagtagagacggggtttcaccatcttggccaggctggtcttgaactcctgaccttgtgatccgcttgcctctgcttcccaaagtgctgggattacaggcgtgagccaccgcgcctggcctggggcaacactaattatatacaaaataataagagggagcagggctgtatataattaggtgctaaacagagtagacagaacagaagaactgtgcagagttgattggaggtcagaagtcctgcattctggttctacttccatacccaataagtggagtaccttttggcagtcacttggcttttgaaccttggttcttctgtaaaatgaggggtttgtgcaagatgctgtgattccttccagctctagaatctgcaagatgataaaggttagagtactcatattagactgagtgggaaatagtgatttgttagtaagaggggagaggggaacatcaggaaaagcaataaatgatggcgaccagaaggattgattcctgacaaccataggacaaagtggagaatcagagagggactggttgaagagcggttaccttggtattatccagcatgttctttctggaataggatgggcactgcacaaaacgttcacaatagaggatatatgaagcctcctgtactcttttgcgtttctgatactcacctcccctcttgttttcagagccctttctggtgcttgccactctttaaagaatacaaatctctcatcagcaagccctgtagaaggggcaaaggggtgatgcactttagctcatcaccactgggcacgttctctttaatcctctcttaaattcacctgctttggctgatctgcatacagtgggagtggtgtcagatcaacacactggccttttcccaaagcaaagcgggatcccagcctggatggcccagcacagggtcagctgcctccatcctggccccccagagcatctgcctccccagcaccctgggctgcagttgcagagggccttctttttaatgtttttctaataatcacttttttcaaaccctaaaacaacactttgttattgcatgatagttgcaaaaatataaaaataatttttaagaataactcatttctaccccctcactccccccacaggttatcatcactattattaataacatttttcactgttttgactaaaaaaggttttcttttaaaattcacccatgacccagaactatttaaataaactaattttattttggagaaagaccctaaaacttttattatagagattttcagtcatgcacaaaagtagagagaataaaatattaaaccctatgtaacccacatcagccccagcagttacaagaagaccttaaagtctttagaggatctggcatctccctgttgggcttctgtgtcagagttcagaaagggagaggggagggacaggataaatatcacatgacatcaatgttggaattactaggatttaagcagagggattttaagcacagcaggaccctgagccctgcccatattggaggtgcccacttttgcagaccctgccacggcagccttcgtagtcctatgtggcaccgctctttgctcttgaattgtcctcccaagagcgtggatgggttttcactgacacacgggtacctgcctgcccagtgccagtggtgaggactgcccacatctggggtgggccatgccagcccttgcagctgaccggccagagctcctgaccctggtctcggtagcatcgtgtggctgcttgtaggttgggtggaggagtgtttctttctgtgctcctcctctttgccaaacactctgctgcattttcccactggcaaaagaaggggaagaataggtggtgaaatgtggttctggactgaggcactgcttcatcctcagtgacaatcactgacattcttggcagcggggagatggtggctgcatcaagtccagaggattctgaatgacctgaatgtgtgggaagccttgcttactcataacggcccctggctaagtcagatgctgcctccagagattgtttgtgtggggagacttagtatgtttattaaatatactcagggctccaagttacagtgaaacgccctgctcctgggcctgacaggctcagcctcctggctgggtggcagcaggtgcctatgtttcacttggagctctaggtcctcattctttcccctgctccccaacctttgcctcttgcctgggggctgagaagacagctttcatttttctggctgtaagatcctagtggtgactgtcctatctgtcttttgttctgccctagaaggtagtaatagtatgggtaggattgcttttaagagttctggaactaaagcagacatgaagagtcaagggtttgcaagaagttgacccattttggttctagattgtggccccagatctgccgataagttgcttggatcctcagggaagtcgctttgcttccttggggctcagtttcctctcctatggaatgatgagttggatgacttgttctcatcatcctcttccaagagtatgactggatttcctagtctgcaggaaacccgttataggcatttaattgcccagtgatgtgtggggtatgctgtacattgtatccttttcctaaaatgtgggtgtggtcagaggaatcataccttggctttgaggtagaaacaccatccaactggtgtgactcaggggaggggtgttgccagctttgtatggtgggtcaaaaccctgatagaatgccttaaatcaaattccctagaaactgattgtgaaactgagcttcttgtggcagtgttttaatgagggactgctcttaggagttacctaaaggtatgtgagggaagcaggataggtcaagggaaaaactaggcaaagcctcagcctggttccatgggcagcccaaagtgtgaattccaccacagcaattgtcttacccagtggcaaaagggccgggccattgataactcctacattaggtagttatctgttacagccccccatcatcaccagcaggggcaggaataacattccaggtgaagctggtctgtcaggcaagggcaagcatctgaaaagcgtacaggagcaaggcaggtgtgagttattagcagccaacagttacatagcagctgggggatgagacatgggccagaatgccacagagcctgccacgtccttactggtgacagccgcgcagggaggaaggcaggagtagggtgggagagggctgtcctgggtggctgattcctgtggatggctcagcacatgcaggaaagtgttcagatgggatttccaattaggtcaatctaagtgattgttctaaaagttgggatgatgttacatttggggtgggggatagtgtgcctaggaagggacgtgaggaagaccttaaggttatctagaggctggttgtccagtgatatatattttgacaaaatccggggtacctttatgacttgcatttcagcataacatccacacagagctccagggcgctgctactgcaaggtagtagcagttcattctgagagggcgttccccaccctcttttttcttcttataggtcccccacttcttggcatgtcttcatcttaatctttttctccatctttcttctacctccataattaatcttttcactgcctttctggcttctgctgtctcagcgaaggtagtttcttagactcccgtgttattgttttccctgaaaacttcagcacatccttttctgacttcccggacccatgcaggcccacctgccccagttccctgtgctcccttcatagcactgaccacactccagagttaaagttacatttgtgtgctcacttgcttcatgggtgtttcccccattagatcacaagtttcaaagagctgggactgagactgtcttgctcatcatccttaacacacagaaaattatctgtcacatagtaggtggcccatgaatgtgttgaataaaaaatatggcatttcagctccaagacatggaatccaagtccctcggggtgggacaggagctgtcatacttggtgctggaggaaatgggagcctaggggagggtgtgctggcctgtgaggtgcaggaggccaggtatgtgtctgtgagggaaggtgtgaagtagttgaatcagtccctggcctctttccttccccactcactgctctgtgaattttcctttccctaggagtggtcagcagaggctttggacagatgcttctgcagagatgaatggcctggcttttttgctagcctatgttggctgctccaaccctctcctggcctgagccgaagatctctcctcgagatggagccttgagtccagcagttcttaatcaaaagtaatcttgtcccccagaacatttggcaatttttgattgttgcatctggagaagtactagtggcctctaatgggtagaggacaggaatgctgctaaggcacacacaggagagcccccaccaaacagaactgtctctccacaggtgctggcagtgctgcagtggaggaagccctgcctaggccagccctgatctaaccagcaggtgctgctgacagcctctggagcaggtgttccccagagaccctttgcttctgaaaggaccatggaatcagcatctgccttactcccagccccaacacactcagcctccccactcagtcataggcaattcagcctcccaggttacagctgctctgtgaagagggtgcacagacagggagaatgttttccatggagccctggggaaccctgttagagacctgtctctggggctgggggctgggccctgcctgcatagcttcagctcaggggacccatggggcccctttcctcctgcttgctctatccccatctttctctccaatcctcctcccaccccaccttgcagcatctcccccagtcccctggagattaatgtgataattaccatgtgtgcctgtttacgcagggagtgggtgagctcaccacccccatcagtcaggttcccaaaggaacacattcccacaatgtcaggactggtacccgctgagcactcctgtgcaggtgggctgccgcccccgaactgctttctctgtcatcaccctcgtcgtgcacacgtgtgcatgtgtgtgtcactcaggggatcggcaggtgaggaagatggagagcagccagtgtgccagtctagggaagggctgggtggggagggtgttgggagatgggaggagcatcagtgccccatgtaagaggacactgaccaaagagaagcactctcctatgatgcctgactgatagtaggtgttgcatgagtggtgtgggatggaggggctggcgtcttctgggcagcattctttgcagggagggccctggtttcccttagctgctccacagtagaggtctgggctgtgaaggttctcctggggccagaatcttgattggagtacttagcatggctgtcccgtgttcctgaaggaagagtctctggggaaaatagagtgcaagtcttacatgaaaggagcttgcgagaactgccactctgtcacagaagctgggggggatgctgtagagagagaatgagtgattctccctctcacaggcaaccctcctctcttgcacctcctgctgagacagacacgtgcacaccacgagagagaaaacagtcacaactctgtggttgaactggcagcttcaccccgacttccacttcacgtgctttctgggtacttgctgccttgagttgtcggttgctgctgcttttttaatctcaaaggacgcttgagtcattgtctctcctacactggacaattttgttttaataatgatgaatcagaaggagattgaagccccaactggcatcagaaagaaccatgccattttgaaaaagggaagcatgcattcctttgctagcctgcttcctgccgaggtgtgtccctttgtcctaccgggtgtgtcactgacccgtggacaaacatgcaaggggagtggaagccagttggccaggaagaatgaaacaggagggagaggagcaaggtgtggagaagggtggggcaagcctattaaaaggtgtgtgaataacctacaggagctgtcaagctgctttctccagaagaaccttttaagctgtcagtcatcttcaagaacccccagggccttgctggtgctggtgtcttcccagctatgcttttctccttctagttcccatcctcctcttttttcatccagcaggccccactgtggtggataatgtttgcggcaattcagagaaatctccacagattgagagggggctatgagaatgaattgtatcagtgtatttttaacaggagaatcttcatattagaattgtggacgttttttgattagtcgaccatctatgcatgccaaaccctttgttaggtgccagatacagaaatgagcagacagttaaggtttctgcctgaatataggttgaagcaacaccaaaacatactcacaaaatgctgaatcaaaagacactgctcgtcattggttttttatagaattgagaaacacattccagattctgacccactgtagttcctacatttcaaaggctatgttcttcgatgtgttactagattttctctgaaaatgagggtttcactatgatcaaaagtgtttatgaaatggtggaataaacaaggtaaataatgttctttttttgtggatcttctcacgggctcagaagaaaatataatctgctgtttcccaaatttctttggttacagaagccccttttccacaaaatacactaacttcttacagatctctagcaatgagaacaatgtaattttggacatcctcattacagcatccctggcaagtagtcacccaagtgaaattgctctgagccaccctcaaactgtagctcaattatttaagaacaaaattatcttaaaagtcacaatttcatcattgctattgctgatacctgctaatgtttgttggcaacaaagtcctatctgggtgctgggtgtagactcagtttttgttgccaaggaatgttggggtgctggggggtttggccactggctaagccatagagtgaataaaccctgttaatctggagctttactggtgaaccatcagagctagccagccttacagaaggactgatttgtaatcacaaataaacacagagctagctatacaaatatcattgcaattcacttttcagctcatagggaaggtccatgtcttaacgatctcagagaaaacggcttcctacctcccttaaaaccctcaacaactcttggcatctagttcctttggatctttctactaatattcaggaacagttttctctgaggtctggcccacatcttccctgattgtatttaactgaccagacctgattgaaccaaagagctccatcttacacactgaaattggcaggtccctgcatctgtcccttcccattcagaaagtgttttcttgtttacttttaacttttattctgcttcaattgcaattatctctctctgaatagtgtaggggcaaaaaaaaaaagacacaagtgtggtgaaaggagattgccttagaagctgttttagtggggtgattcctcaaataccccaaaacagaactagcattcaacccagcaatcccattactgggtttgcttacaacccaaaggaatataaatcattcggttataaaaacacatgcatgcatatgctcattgcagcactattcatgatagcaaagacatggaatcaacctaaatgcccatcaatgacagaatggttaaagaatatgcaatacatatacaccatggaatactatgtagccttaaaaaaaatgagaacatgttctttgcaggaacatggatggagctggaggccattatcctcagcaaaccaacacaggaacagacgaccaaatactgcatgttctcacttataggtgggggataaatgatgagaacacatggacatatagagaggaacaacacactggagtcttttggagggtgaagggtgggggaaggaagaggaccaagaaaaaagcagctattgggtactaggcttaatacctgggtgatgaaataatctgtacaacaaacccctctgacatgaatttacctatataacaaacctgcacatgtacccttgaacttaaaataaaagttaagctgttgttaatggatgaatcaactatacagtgatagcttccatgactgataagaggctatattctgtggactggaatatttgaatgggagacagaaatgagataatttggaagaaaacaagagaatgtcacagaagtccacaggaagcatggggacaatgaatcaaaatatgttttcagaatttagtagtgagagggggaaaaggtaaattggagggacaagaaatactttgctatagaaattctgagttctggtcttaattttactaatttagcttgtgagttttaggcatggcatttgactttggccttgtttttccagtgaagtagagataaaatatctgttgtaagtttcaaatgggtcttagagtttgtgtgtgagagagtggagtgggggtcgaagggatttcaaagccctgcatatgtgaaatgcaattcagaaagactatttggaaagacttcgaggtgctgtcaggggaggaagagtcaaagggaagactgagaacccttagttgagtggtacagcttttagagagactcccaagctctatttcaaggttctaataagatatcctgctaagaattgcttctttgtttaagtcatgagatataattcttcctcaatccctgaccattcaagggtcttgcatctgattcatgattcgagaatccggaatatggatttgcaggcattttttaattcactgagtgttaacattagagtgcaagtgatcactcttcaaatctagatttattccttgttctggccagagccttgctggggccaagcctgggccagctctgtgctattgtactatgatggaagaaagcaagctgagcgtgggtcaagggctgagcaagacgcagaggaccctaaaatgtcttccaaataaccctgtcaaggcctttgctagcatccatggaatagattgggcacagcctgcctttgtctttttgagaatttgcccaattttgtgtgcagaggcttagaacccacattaccaaatgctataaaaccagtggttgtttgcgtgaccttggaaaagtatctgacctttctgtattgtcttctcatgtgctaagcaagagtgtgagaatattccaactcagtatattatggtgaggctgatgctgtgttcttcattacgtacatgggagattttgagctaactcacggtaataccaaattgggaatggagtaaggcaatatttaactgtattgcattgtggtttttacatcaccctctgtgcagctgcaagaatgtaagctttacttatggaagatggctttaagtattaaggaaccatttttctttctttcagaccaatgatgccttaggagccacctggaattggctgtacttcatccccctcatcatcattggatccttctttgttctcaacctagtcctgggagtgctttccgggtgagccagatgtttctctcttcttaactcatttgctgactgctaactgtaaactaatgcctcctgactcatggcagattcattcatttaaccttcatttagaagacacttacctagcagttcctctgtgccaaatgctttctagatgctgggaatgcagtagtgaaccatcattctaataatcttgattattctcaggaattaaaaagtcttgatgtcaggcacaacactgaacacagtatgtagtgagagttcatttattcatccatgctttcattcagtaactcagcagtcagagacctatgtcaaacacggtgctggttgttagggaaataaaattgaactagacacaggctgtgcctcaaaagtttcttactctgtagtgttttggggatcaagtctcatatttgtggcttgaattagtttatacaaatctgcaactatttggggtccaataccatggtaagcatcgccaggagcacacaaagtataaggtgtggttcctctccttaggaaacatgttttgccaagaagatgatacacatgaaacagagaataggagttcttttactgacttatacaaggtataatcatttgttttggggaaaggacaaatctatgtaatctgaagtcatcagggatagtttcatcaaggattgagattttgcttggattatgaaatatgtagtaggattacatagactatatgggagtgaacatttcaggaaggggaacatcacaccataagcaaagatgaaaaaatgggacttgtcatggagtgtgaagaaattataatgtaacatcttaggagagctgagacggggatatattttagagattcttatatttttctaagcaaaactgaacttaattttttgtcagagtggcatacgttcttcaaatgaaaatttataaggtggcacttctgtttaaacatggcagattgaactaagttggtcatttcttgaaactccactaacacagaaaataaattttaagaagggcactaggacaaagagaacaagaggaatgacaagagatgaaagatgtcaacaacatttttgaacatagaaaaaattggcaacagacagtgataggaaagctgaagtttaattgtttagggaatgccagtaaaaaagcaaactgattgttcttcggagccctagaaaggctcaggaattggagacaccaggtaggtctgagagctggggtaggcgtggtgctaaaaacaaaaggactgatgcaaagtccttgtaaggaacattagaatccctgccccaccccactataacctccaggcaatgctgacagatatctgcttcacccaactcccatcctagcaaaagttaggagacttaatctctgtagatgtggaatcagagaagcttggaattgtaccatcagatacacctgagggtagtgttgatatgttgtactgaaaacaggagggctaaatgaaagtctacaaactgaatgtgcgtagtccagcccacttctgcttgactcttaaaaacatagcagtctggtaggagttgagaggattcctcttttggggaactgtctgaagagaagggacaaatttatactgatatttgggagagaccagagaaacaggttcctacctcatcacctttggtgagactcactgtattaattacctatggctgctttcaactaattaccatagctccgcggcttaaaactgtgagagaaacttcattttcttatagttctgaagggtacaggcccaaaatctggtagggccattgatatagtttggctgtgtccccacccaaatctcatcttgaattgtagctcccacaattcccaggtgttgtgggagggacctggtgggaggtaattgaatcatggaggtgggtctttcctgtgctgttctcatgattgtcacgagacctgatgattttgtaaaagggagtttccctgtacaagctctcttctcttgtctgctgccaagtgagatgtgcctttcaccttctgccatgattgtgaggcctccccagccacgtggaactgtgagtccatgaaacgtctttcttttgtaaatgcctcagtcttgcgtatgtctttattagcagcacgaaaatggactaatacagctgtgctccctccaagggctctaaaggagaattgattttcttcctcttccagcttctggcagccccaggcattccttggcttatagccacgtcactgtaatctctgcctctgtgatcatattgcctctttttcaatgtctgtgcagttttataaggccacttgtcattggatttagggtcattctgataagccaggatgatctcttatttgaacatccttaacttaataatctgcaaagattatttttccaaataaagtaacattcacatgttccaggacttaggatgtgaacaaatcttttggggggctcccagtcatcccattacattcaccattctacaagctccaagcttgcatacagagttgccaatgaggcttttgtgccgtgcttttaaatatgaacacacagctagggatcatcagcatttgaggaaaatgcccaacacaaaagaacaaaaaacaaaatcatgaattataaaaaggtaattgagggaatatgaacaatgcagggagtagaagacaaatttaaaagctgtatctgctattagagatagaagagaaaccatttcatttacagaataacaggccaataaattaaaaaaaaaaacatttagaggttaagggctcttggaaattaatgtaaaatgtacattcattttacaaagtaatatatatatacttatatatatttacattaaatataaaaatgaaataatgtaaaaatataagaatgtaataaaatataaaggtaatacatatttggaatataaaattgatgaaattacctacaaaacagaacagcaaaataggattgatccagcttttaactataataggagttctataaaaagaacagagacatggaaaggaagaaattaacaaaaatctaagaaatgttcccagagccaaaagactcacattgccagattaaaagatgtgttgaggcagatgcaaggatgttctttccagcattatttcatggtagtggggagttggaggcaacgtggatgtccataactgggagattatataggtaaaatattggatgtataccatggcacagtatgtagcagtatgtactgtggcatcctatgtagcacagagcaacaaatactgtgtacacatgaaacataagatatcttgggcggggcgcgctggctcacgcctgtaatcccagcactttgggaggccgaggcgggcagatcacgaggtcaggagatcgagaccatcctggctaacacagtgaaaccctgtctctactaaaaatacaaaaaattagccgggcgaggtggcgggcgcctgtagtcccagctacgcgagaggctgaggcaggagaatggcgtgaaccccagggggcggagcctgcagtgagccaagatcacgccactgcactccagcctgggcgacagcgagactccatctcaaaaaaaaaaaaaaaaaaaaagaaacataagatatcttaagaacatagattttagtgaaaacaagaatcactgtgatatgataccatttacataaaactacatgcacacaaaatatacagtttgtgaaaatacattcaaatcaaaggcacattttgaatgtattataatttttttaaatttttattttactttaatgataatttttatagcagggtgatataaggtaggtatggaggtaaaagagaacaaatgagtttaattaataatgaaatacacactgaaaactcagcatgactaatggaaagtgagaaccccaaggtgaatcatcatgaaatttcagaatatcagattaaaaaatattctgaaagtgcctggtaattaggaaggagatagaatttatctacaaagaaataggaatcaggatagctttgggcttctcaatggcaacactgaaagttagtaacaaatagataagttcttaaaactttcataaggaaaataattttcaagatagaattctatacctagctcgaataccaattgttttttaggatgggatcacaatatttttgatatccattttgaaaaagttactggtgaatgtgagtcactaaaaataaggaagtaattgaagaaagagaagaacgtgatactcatggaaacaagggattcgatggaggagagaaagaagaggaattgattcccagggcgatgaacggaagtctaggatgacagaagcctagagagtatcaagcagtatcaagatttgagtagggtgacagaggcctctaaaaatgctatctgtaagaaaaaataaaactaatgtattccccaatgtgtgttattattttcaaaagagctcatggttttgccaaaactatatacagtcatgtgccacataatgacatttcagtcaatgactgatgtatatgcaacagtggtcccacaggatttagtggagctgaaaaattcctgtggcttagtgatgtcatagtcatcttaacatcatagtgcaatgcattactcacatggttgtggtgacgctggtgtaaaaaaaccctgaattgtccatcatataacagtagaacatatacaattatgtacagtatatagtattcgacagtaaatgactatgttactgatttggcatttactttcaattgttattttacaatttattcctacttatttttaaaaaagttatctgtaaaacagtctgaggcaggttcctcaggaggtattccagaggaaggcattgtcatcataggagatgacagctccctgtgtgttattgctcctgaagaccttccagtgggacaagatatggaggtggaagacagtgatattgatggttctgaccctgtgcaggcctaggctagtgtgtgtgtttgtgtcttcgcttttaacaaaagattttaaaaagtaaaaaagtaaaaagtaagaataaaaaaagcttatagaataaggatgtaaggaaagaaaatatatttgtacagctgtacaatgtgtgttttaagctaagcattattgccaaagagtctaagttaaattttttctaagtttataaggtaaagttacagtacgtgaagattaatttattgaaataaaaatgtttttaataaattcagtgtagcttaagtgtccagtgttgataaagtctacagtgccatacagtaatgtcctaggccttcacattcactcaccactcactttctgactcacccagagcaacttcctgcaagctccattcatggtaagtgctctacggtgtaccattttttaaaatcttttataccatatttttactatcccttttctatgtttagatatatttagatgtacaaatacttaatgatgtgttataatttcctacagtatttagtatagtaacatgctgtataggtttacagcctaggagcaataggttacagcatatagcctaggtatgtagtaggctataccatctaggtctgtgtaagtacacattctggtgttcacacaacaacaacattgcctagcaatgcatttctcagaatgtaccccttttgttaagccatacatgactgtatgaatatatgtatgtatttgtatatacacacatacacaaaaaaacactctaagcatttaattccatgaaatatgaaattgttaccagtaagaaatataagcatagtaagtaggtcctctattcagctcagttgtcaaccaaatttatgttgctgatgctgaattttgatatagccccttacagtgctgtgattaccttaagtggatggaggaggctgaatatgaggaggggaaagggagggggagatttcagtcaaagactgaaatcttaggttccacagtaaggaagtatttaggcaatatctaaaatggaaagataaagacatttcagtttttaagtataatatttagaaatttggaaatgaataccagaagaaacaggtaaaagagttgaaagtggttgcctctggggagtgaaattcaggggttaggagaggtaaagcagagggctgccagtttttcattagaagtctttcaaaattatttgactttttaaattctacatgtgttactttgaaaaaatagaaattaaattttaaagtaaaaatattgcacacacacaaaagtgtaggacgaaaggcgtatataagaatattcatctaacatccgtgggggaaggattggcatggagagagaccagattcagtaggattaagcaggaaacaaccatagtaatccaacgacgtggtactaagagcctgtggtggtaatttgtgaaaaactgaagacatcgtaaagaagaactttaataatgtttattttgagtggagagtcttaagacataagagatttcttctatatttactcattcagtgagtgtttgttggcattctttgttcgtgcccaagcactgctagacgttactgtctccagccagccagtacctacaactccaatgtgcaccttccataactctggcccccagagaagcctgaccacaggctctcctcttgtatttctactgagaggataatgtcatgtttgtgtaatcttatctgatattctttgtcctaagtgtgtatatattttagtttggaaaatttaagacagattcttactatatatttggggagaaaagtagatgtggtgccaacaaaagccactggtgttctggatgaggctccagcataggtttgagttgtgtcttaacagagctggaaatggaacagaacactaccatactggacagtgccttgtgtctgaccacatggactctctctggtttggaatcacatcttttcattctcttacgtctttctctgcatgggaaacagttgtacattggaagaggcatgggctttagcatctgacattcatgggtgagaagcctaaccctgtaagaaaccacttattagcattgcgaatttggataagttactctgagcctgcttcctcctctgtaaaatgggatagcaatagctctctcatatacaaaaccctagcccagggtctggcatggagtagcccttagctcttattagctgcctatatccttcgataatattaacatacattttctcagcctcttaggtccaggtggcatcacctgcttaacggcctgtggatgttcgattgatccagctgtcgggccatgggctcctctgggagatggtctgcacagattagatgtcatggaactgggatggcagatgccttcttagcacttctggagaagcctaggaagtgacagtggcagctgggaacagctgatatgaataaattttgacattttaaggagtgttcacaataggggccttataggctgggactgaaatcattctgacctggtttctttttctcattctgaagctcagcacagtttggggtgggctttattggtgtctgcagggggttcagcagcagccagtcctgtgtacaggaggggccgtgggttctctcttctgcttggttgtctctcacatgcctttggaaagattgtgagctttctccttagagtgggggtttagttgggatttaattcagaagcagcctgggaaatagcttggaaacctagggagcaggtttcttgtgacctgcaggcagctgaatgttatgtaccaaggctgttcccagagcagagagagacagaaattaaagggggaacacacatggctcctaggttgggcaagtgagggagagagtccatgtgagagggggcaggccacatccactggtgctcagggacccctggatgccaagtgtggaaatgactgaggcacctgcctctggggcacaggcattggtgggaggaaggctgtgaggcatgtttgtcggctcagatttaaagaggaagtatggatggaagcattgtagcatttttacttgtctcaaaggaaatgggatttgatgaaaaccattagcttaggcatgaagagaagcagagcttcctgtctccatggaaacaaagcagggctgcataagcacatcctgaaatgccatcaggggctacagggcagcggctaacacaaacagaaatgaccatgagccatcccactgtctccatccattgttgcctgggcttctggacagggaaaggtaaatatggggaagcagttgagctgtctcaaaaccagagcagggacagtcagaccagagactgcttccatatacgtgtggggagcaatgtgagctctcttgtgtaaagcatgccatagttttcaaagcacctttgcttttgtgatcatatttgttctttgcaatgactccatgcagtatgtggacagtatctttatttggaaatgagaagagggaggtttagttaatctccaactagttactggcagaggtggggccagaggttacaatttctcaacttctagttagtgcttattttagtgtacactacgtagcttctattcagggatactgacacctgaggtggcatacccagagatatgccgccagtggtaagcctggaatatcatcttgaccatatagatttggtgcaagttttaatgtgtatgtgcattgatgtacacactaattcacacacactgatgttcacgtatacaatgtgacccggtatgtgtacagggcagaagatgccaagacccactgtcaaggtcctgctgccctaagactaatgggaagtagtgaagtgtccatagtagaggaggaattcttctggttgcatctcatgaatgcatagagtggctcccacgacaagccaaactacagctgtctgccttgctagcaactcatgtgcaagctgattctgtgcaattcagcaagtgtttattgagtgtctgctatgcaaaagatacctggctagacatttagaatacaaagatgggtaaaatgaggagattgtagactaattatggaaatatttcaaaaatacatgtaatgggactctaagttcaaatagtccagaaggctagtccctccccaaagctaatttttttttgagattcatatatgcaggtcactaatgttgggttcctactatcttgcaaggcattgttgaggataaaaagatgaataagacctaggtcttggccacaatgggcatattaacaactataacttcagtgttaaaccttgcatctcctgttgggtgtgccattgcatcttaggaggtggttcctgagtgtttcccatgcctgacctgagacaggaatggctgctggtcttaagaaggaaattattcatgcccagctcagtgttccagatgagatctctgaggggagttggtgggtattagtttgacgtatatctgctcctcccaaggctggctgacattgaaggtgactggctaacataagggagagtaattctgctgggattctaacactggaatcaaccagtagaaagtcaatgactgactcacgcaagagttactaagtacttgttgtatgtgactcactgctaggggctagggataccaggtcaaacaaggacagagagctgctacccctcaacgggtttgagtctaggaagagatagcaacaggggagcatttaaattagaaggggcaaggatcaggtaaggccaactgaggcaggtgacagtggtgtgtgcctttgaagagccagcgatagtttgcgagcacaagggagaagcacattctagcacagaggcacaggcagaggctcatcgagaagggcttcttgggctaagctggtaagtttaagcttgattccagaagcttgtgggaggttttagattgttagataaggagatggctagatttgcatttgaagatgatcaccctggagaaggtacatagagaagcaagactggaagcaaacagagaggagcagcagttcaggggagaagcagagaagcagcggggctgaagtacagcggtggggacggaaaggacaggacagctccaggaggtgttgggggccaggtgtcggatctgcaggactcgggactgtgtgggtatgtctgagtgggtttggtgtggaaatcagagggaagtcttctggattgcttttaggtttctgaattgagactgtaggtggctgggggagaacacaggccaaagggtaggtcttaagggaaagagggcaggttttggacctgttgagtatgagaaagcgtaacacacttcatgacttttggccagttcacaggagtagagtagggtttgttttaagttgtttttcttgtaagctataattttttgagactgtgctacccatcaagcattgtgccaatcacatgacacatattgtctcatttaatcctcacagtgaccatatgaggaagtactaacttccttttataaatagagatactgtgggatgcttggtaatttgccaaagtaaacaaagctcatgagcagtagattcagaatttggactgagatctactaggcacaaacacctatgcttttaagcagatcctccagatagtttaaatgtcctttatggaaggaaattatctgtcatctagtacagcagaacttgatgaaaatgaacaggtcctccatgacggccatggcacatgtaacttcccagtcctgtggacagaaatttcctgtatgataccctgctatgatgaccagagtggggtgttcataattcctacactgatgagaaggacttttcctgggtgagttgtgtgaccatgggggtcacataaaaagcttatgggagcttgctgagagaatctgcatttccccaagacactgcttagtgtatcagttgtgaaaattgtatcttagggtgagataaaaattatttgaggaagacaagactctaagtgtcgtttgtgcctgcctccttgttacagtggaggaaactcggctggagagtgaaatgacttgctcagtttgtagacagctatttagtgttagaccttggctagaagctagctgccctggctccctgtctggggtgctttttcctccatgccctatgtatagcctagtagtaaaatacagactctagacagtctagctgggtttgagttctgttcctatcacttgccagctatgacaatgatgttaggtaaattatttcacttttctataccttcagttacccaattgtgaataaggatattggtgtttgtcatataagattaccggggaaatgaaatcagataatacatgttaagtgtttaatacctgggtgatagtaattacttaataaatgttagctgttagtagcagatttctttctcaagagcctggtttacactcagtaggtggggctgggaaagagccattcttacctaccaagtactcccattgagtcaattagcatgagctcagatgttttcagataccactggtagagctgaccatccatggcaccctacagggaacagcaaagacagactgtgcccttgggccccacatgaggccatcagcttagacactccaccatttgaagttccttggagtacctgggcctttctattctctgctcatgtggtctggagtaagcctctaattttctttgttaaattcctgctcatccctctcagcttgttttaactttggcttctttcacaagatctttccaggtctataccccccaatctcattttacaattagtattaaaatctttctcccacatgttcccatagcactatatgcctgtttgttatagaatctgtcactcatagtaatatcatggaattgttatataatttaatactactaaagataagatgtaatatttattgaaaccttgtcatctgcccgataccatggtaaatgctttatatacattatttcaattaatttttgtaacagccttatgaggcaggtactgctgttaaccccattttataattgaggaaatggagactgagagtggctaagagtcttgcctaagggtgcacagtctaatgagaggcagagctctcctcccttctcctggatgcactatcttcctgtgctttggagtcacagatgtctctgtcacccattaagttttgtttcttctgctgaggatgtctttccatgtatttggatcgctcctgatatcttagtgccttgtttttgtgttcaagaaatgattgatgaattgaagggaaaccgagtaacatcaggaccctcttagggaatgccatgcccccctatgacctcctggaggatagtattgcagagaactgaggaagaggctggcatcttaaaagtcaggagcataatcactggtactggagatcctcgaaaaacctgcagagaagctgtttgctttctggaatgttgatcccagcttacaagcattacagacaagtaattatgataggttggacatttttacacttggccattgctaatatttttttctttgagttaattccttataccatttgcccattttcccataaattggcatatttatctttttcatatgaacttagattatttgcatagtaaggatattaaccttttatatcatatgtggtgcatgttttcagaataatcacttctaaaggattgttaaagctgttatcctataggcaattgtgggcaaataaggctgttggaagcagaaaaagacaaaacagttattcttttttattttagagcatttggtttataaagcatttcatgtgtttgattcccacaataatcctaagaagtatattagtattttacaaacaaggagattgcagctcgaagtgggcaagtgacatgccctaaatgacaaatgtaagtgtgattttaggactcccagtccagtgctcttgttccacaaaggagtgcttcccctatggagtgggcatttgcaatgggacctttgctgctcagcttctactcacaacagagatgtgatttacacacatgccccagcacaacaacaaagtgctcttttgagttgattaattcaacagatagtgccaaacactgttctctagatgctggggattcaaaaatccctgcctccatggagcttatatttttctgttgcacatgtaatctatattttatgtaatattacccccattttaggactttattattaggaagaagtacaatcagcaccaacaccctgaaattgccctgtattgataacgctatgggctgtgaaatgtgaatgtgaaatgtaatgcagctgcttttggggggaaaaaggctctgattttcttgtattaattaaaattctgtctcctttcaaaaattaatctctagtgtctcttgctgttatctaccttgagaagcagaggcagtgtcaggataggtggttctgggggctcagccaaggtgagagcatccttggctgcagaggtatggcgggggtggagaggtgaagtcatagctgggagaagccaagaatcctatccagaaaggttgcatgtgagaggcagggtgaaggtgttgagggaaaaggaatagagaaatcagtaagtagaactatcaacataaataatcaaaacaaggtactgttttacaagcatttatcctttttaaagcgaactgttgacaattagattgggacttcattaggtgcctttttggatatgaagacaataaccaaatataaaaatgcctccattctctgttcaagttttcacacatgaaatttctggttgaccaagttcttaggtaactgaaacatccttgtagctcctcagccatgctctaacttagtataggtaaatcttctaacactctgatacctgtatacctatatacctatacacacacacacacacacacacacatatacatctatacatatgtacatatctgtgtatatatacacccatatatgcatacatacacacacattttcacacatgtatatgatgttttctattcatgtgcaaactgcaattcatatactccaggatttgtcccttcatttagtacttaaggaacccagtagatgattgtgccattctctgaatttgccttgcagagtgactacatttaaacttatttcaagaatgttccattttaaaatctagttttatttgttttttagaggaggagataacttctacttagtaaaatataacatgaagtaatgtttaaaaagatggctttttagataggtgaaataagttctggtgttctattgcacagtaggtgatgatggttaacagtaaggcattatatattacaaagtagcttgaagagaggcttttaattgttctcaccacaaagaaatgatacatgcatgaagtgatggatatgctaaataccctgatttaatcattaaacaacatatttatgtatcgaaacatcagattgtaccccataaatatgtacaattacaatgtgccaattaaaaaataaaaacaaatgaaaaaaatttaaaaagatggctttgctaagagacagacctggatttaatgttccagtctgctactaagctccgaagtgtacatattcacttagatatcccttaggtgtcttaagcttaggatgccccaaacagaattcattctttaacttcttttcctcatcactaaacacactctctattctttctatattctctggttttcttttactctttctgtgattcttttatcacatttgttatccaagatagaaacctgagttaatcctggtatcttctcctcacttattctctgggcctaattgctcatcaagacctactgattaagtttcataaaactatgtcctggactatagcaattgtctttttaaatgttctccctgctgtaatgcagcctgctattcatgagaaaacagtctttacaaaccagacatttaattatagaatttgtataccttagttatttataatgggatcccattgcctaaacgatagaatcacttatgtattcacttaaccagttttcaatagatgttgagcttctgtgtgccaggcagtattctagatgttaggaatacagcagggaacaaaacaaaaatccctgccctcataaaagttgctttccagtatggggagagtctaaggacatatattctgatttaggtaaatgaaaagacaaaccctgctcttgaaaaggaatacttcaaattacaaagatgtctgctttctccactttagtctttaatgtgatattgataaatgtaaacaatgtttttactaaattatattaaaatttatctgaaaatgtaaatgtataagagtagccaagacatttccttaaagaacaatgaggaacaggaactttttatatagggagtaaaatatattctaaagctacaataattgaaatgatgtgatataatataggaatacaggaaccaaatatatatatatatacacacacacacacgacatatattgtgtatgtgtgtgtatatatatgaatttacagtatatataagtgtaaagtgtcatttcaaatcattgaaaacgaatcattcagtgaattgtgtgactggctagttacttggcaggacaaaaattgagttggagccccatcttatatcttatatcaaaataaattgcaggtggagctagtacatgcattttaaaaattaaatcataaaaggattcaaagaaaacacagacaatttaaaaacttcaagggagaagacctttctaagcattatgcaaatcaataagccataaaggaaataattgatatgtttgaatttgtaaaaataaaaatacactgaccactataatttattaataacttccaaaaacaaatgagttagttttaaattttagattgattatatagaggattcaggaaggtgataaaaagatgattgataagtaataagattgtaataaagctctagttccagacagaaaatgaggatttcaagcactgatggctgaaatgtaaggtgaaaaccagctgaagattttaagtggtaaaatagtcaggagatgatgaatgactggctgtaagcagtagggaagatcacctagtatatgatcccaagattcagttgcaaatgttttggagaactttggttccatttactgacatgaataatagaagaagaaaaaagctcttattctgagagaaaggtttgtttaattttagacttagaaagtttgaagttcaagaggcctggacaagtagataggatcatccaatatctgtgtcttaagaaaagagggaggaaagatatgatacactatcagaacacaatagagaaaatggtacaaatacataaggttatccatggaggggaggtagagaagaaaaaacagccacagatagaggtttctagaaacaccatttaagagaatattaagattttcaaaaagacataccagaaacatcacatcatagaggatgaagaagtacagggtttcaaaaaggaatgagaagaccccaagtgctgaatgagtcatagagatccaatacacagttgactaaaaaatagctgttgaagctggcaatgtggaggacgtgtctgtcttttttttttttaactttttttttgaaataattatagaatcaacaggaagttgtaaaaaattacagggaggtcctatgtattcttctcccagtttcccccagtggtaacatcttgcataactgtagcacaataccaaaaccagaaaattgacactggtgcaatccatagagcttcagatttcaccagtttcacatacactcatttgtgtgtgtagttccatgtaattttatcacgtgtaaatttgcataaccactgccacaatcaagatacagaactgtcctatcaccataagaccccttgtgctaccctttatagccacatctactatcctctacccttgccaacacattcttctaattttgtcatttcaagaatgttaaataaatggaatcataggatagaaaactttttgaaattgacctttcttcacttagcataattgccttgaagtctatccaggttttccatgtatcagttgttcattcctttttatttctgaatagtattccatggtatggatataccacggtttgtttccatgcactccttggaggacatgtgaatttttttcagtttgggttactacaagtaaggctgctatgaagaacatttgtgtacaggtttttgtgtgaacataaattttcctttctctgggaaaaaatgctcaagagtgcagtcgctgggccatatggtaagtgcatgtttagttttataagaaactgcctacctgtcttccagagtggctgttccattttacattcttgctagcaatgcatgagacttctggtttttccatattcttacctgtgggcttagaaaattaaataatatacaatgaacattaataagtatcttattaattaacaaatttatctcgaagttataagacaataatgtagacccaggctgggcatggtgactcatgcctgtaatcccagcactttgagaggttgaggcaggaggattgcttgagcccaggagtttgagactagcctgggcaacaacgcgagactcagtctcttttaaaaaaaaaaattagctgggtgtggtggcatgtgcctgtagtcccagctattcaggaggctgaagcaggaggatcacttgaacccaggaggtcgaggctgcagtgagctgtgtttgtgccactacattccagcctgggcaacaaagtgagaccctgtctcaaaaaaaattataataaggtagaccaataattattaaatcatgtttttaaaattatggaccagtaagttctcaggaaaaaaataaacaacaaaactaacattggttgggtagaaaagttgaatacagagttaataacttttaattttagcagttaaagactttaaaacaaatagattaatcacaaaaactcaactgctagcttcactcaccatcaattcattaaagaaaaggtccaaattaatgttctttgttttgcaagacctctcaaagctttgctgcaacctacttttctagcctcaattcaacgattcctctgccttagcctggccacacggctcactgttcccggatttcccaggtaatcacttctttggctagaaataaccaacccccacagccacttccacccactgctgtatttgactggggaactctgactcatccttccaggtcaagtttcttcatctgggttcccattgcactatatatactcctctattagagcactcgttacgttattttatagttatttgtggaggtctttgtccctttcacaggattacgaagaagggcatcatggtgagttcactttcttttccccagcatttagcaagcataattaacaagcacacagtaagctcccagtaaatggcctcaagtgaacaaatcaaaggccaacttcctgtttgtgatgtctgtattcatcagaaattttcctgagattttgagcattgttttcagtgtgcataattcccctgaaacccaagtttaatattagctgaagagcagagcacaaggcacttgtagtaggactccaagaagtgtgccactccaagaacgtctccattacatcgagaaagagggaatatttgttatcagcatgatggacatgatcccagtgtaattgttgctgttgtgaaggccttttgaatggttttccctctccccatgataatttatctcctacattcacttcactatagctttgataccaaaatcttgggcttttccagattagaaaaaaatatgtttttgtttaaacttgtctctttttctggtctatagaacctcataataattggctttgccacatggaaatttgtaataacattagagccccacatcattctgaggttatagtccatagtcgaggccctataattagacatgttttctgtgcacttgcagacacgtatacactgaggtggctgaaataatacctcccaatttccccggctgataatcagagtctttacaatttggttatatactgggtgcttggcatttctagctgttaagttgagaagctgttagagttgtagttgaattaaaagttattttccccttggtgtcaagtgtatcactacattctcaacacttaattatcgttgtgtcccaaaatattcttcatttagcaaaatattgaaattactctttcctgttgaagaagctaactctactatgcaagagagcactgagatgccgtgttccacagagaacccaggaaatgaatggcatttgagggcatttggggcaactggaggagccccaaaacctgttaaaggggccacatattcttacctatattagactcaacttgatagctaatctttttagcagctgacacgtcctcaggctgaagctgaccagaccaaaagaggcctccccaccctcggcagagttgactgaaatggcattaaagtaggacatgacttcccttccccatgcccccaccccactaccttttgtgctgttcacagagaagtttctcctccatcctcttgtccctgtgttttcacattgtatgttctatttagatcaaggtacccagtgaccaaatataatatgaggaagggatgatctaattatgagcaattaataccttagtgagcaagagctgaaggaggaaggtacagactaattttttaaagtaaaaggtggtaagggggagaaatacttctttgatcacttactaaaatatctaatcacaaacatttattcatttattattattgttattattgagacacggtcttgctctgtcacccatgctggagtgcagcggtgcagtcatagctcactgtagcctcgacctcccaggtttaagggattctcccacctcaaccttcccagtagctgggactacaggtgcatatcaccacacctggctaattttttgtagaggtgggatctcactttgttgcccaggctggtctcaaactcctcagctcaagcaatcttcctgccttggcctcccaaagtgctgggattacaggcgtgatctactgcgtccagccaccaaacatttgttaagcaccaatatgtcaggcactctgagtttgatagtgaacaagaagatgcagtcccttgctcttatgaactttatttttctcatggctgagacagaaaacaagcaagcaaataacacaaataatgggaaatgttatgaagaaaatgagcaggctttggatagcaactttgattcctgtcttagaaagaaaaaacaatcagacttgagagaattgctgccagacttctacagcctgcattgatctgaccccgtgtgattctatggatatgcttccctcacctgacataacggctcccacactatttccctacaggagaaatgatgcttgtgtttctctagtggccagtgtcagttactctgaagatgtgatttaccaaccaactgggctaaacaaacaaacaaacaaacaaaaaccggagcaataggaccttgaatgcataattaacttgtgtggaaggcttcattcttcactcaggggtgttaaaaaggatgcctttgtgagctaaaagcagaactaccatttgacccagcattcccattactgggtatatacctagaggaatataaatcattctactgtaaagacacatgcatgtgaatgttcaccgcagcactatttacaatagcaaagacatggaatcaacttaaatgctcatcagtgacagattggataaagaaaatgtggtacatatactcatggaatattatgcagccataaaaaagaacaagattatgtcatttacaataacatggatgaagctggaggccgttatccttagcaaactaacgcaggaagagaaaaccaaatacctcaagttctcagttataagtgggagctaaatgatgagaattcatgagcacaaagaggagaacaacagacagtggggtctacttgagtgtggagggtgggaggagggagaggagcaaaaaacataactattgggtactaagtttaatacctgggtgatgaaataatctgtacaacaaatgcctgtgacatgagttaacctgtacatgtaccccaaacctaaaataaagtaacttttgaaaaaaaggatgtctttgcattaactagtggggaaagttgccctagtggattaagtaacttaatatttcttccaaaggtaatgatctggaaaccaagactgtgcttttattgatatcttcaccttctaaattccctctgtaaacacctatgaataggagggaagaaaggacctaaagtggtcagagggaacctcgaggccaaggccaagttgtatcccagactgtctggctccagagaggaaggtcttccttcagtcattcatttctggccccctttcctctgcactaccctcagaaacagtagcagatacctattgcaaggttgcgctgtgctggtcatgttcacagacaatgcaaacattttccctgctttctaggcatttcttatccatatagtctttcaaacctggtcaaggttttctcctggcaaaatttgagaagttggtggcatttgtatttgagatcatgcacctttgctgtcccttagtttaatgttccccttttctcttccctgtccttcggtcagggaggagttatttgttggacttaactagctcacgtatggggttttggcctgggttccctgaaagacgaccccaagaaaagaattggctgcaaaagggagcaagtgagaaaattgaggcagagaaggggaaaaagccaaagagttatgtgttaattgagagggttgtcagtatgaactgctgaggcttaatccactgggaaccctagaaggaaccatgtagaacgtacctcagccctgctccaccaagcaactgggaaactgggacatagatacatgtatctgtatgtttatgtatgtatgtatatgagtatgtgtgtgtgtgtgtgtgtgtatttttcccccatccatcaatccctgtccatccttgagtgatgacactttggggctgccctgtttgtggacttaacagtgcctggagaaattccgtaggtggagaagcaggaagatgtaagcactcaaagtgggcactgtcacatacctgtgtgagtgtttaagtcctgtccactgcagctgcagaacccagaggtggcccgaggggatatggggtggcatccagagcatatgctcttgctccacattcaaggagtagatcattcattcaacatttgtggagcacctactatgtgccaggaacagcttttccaaggtgagtgagttagaagaagcagagtgacaacagaattcaggactagagtgagccggagagcagatggtccactgcccagaaagaggacatcccttatagggccagcggatggaagccatgggctgggcaggacattcctgtcccaacccacatggcagctagagtcctggaaattacagtcgacatgaccccacccctctcctgaaacacagtttcctcctcccaaccccacccagcagtgcacaccccaacacccgctctgccagctctcgttcgttgcctctttctcctcaatataaccaccattttattttatcccagctcccagcgtgcatttgtcctgcacagccttgctgcccttcaccctgctcctcagtgtagagtaccatgttcccgttattattgttcagttccccagccacacagctaatcctgttagggccaatttaggcaatacaagagtctggagcttttatgacctaagcagttggggctctccttatgctaccaatgataaatgatagaataagtaagcagagggctgggcgcggtggctcatgcctataatcctagcaccttgagaggccaaggcgggcggatcacgaggtcaggagatcgagaccatcctggctaacacggtaaaaccccgtctctactaaaaatacaaaaaaaaaaaaaaaaaaaattagccaggcatggcagcgtgcgcctctagtcccagctgctggggaggctgaggcagcagaatggcgtgaacctgggaggcggagcttgcagtgagccgagatcgcgccactgtgcactccagtgtgggtgacagagcaagactccatctcaaaaaaaaaaaaaaaaaaaaaaaagaataagcagagtctcaattaaaatactcattgatcatgtctgatgtcacagagtttaatcttaaattcagtagacccataaattaaaaatactggatctcagtagccagagggtcattctgtcttagagcccctggacacagtccccctaatatggaccaggcctcatctgaatgttccatgccccctcagctgcgaattcccatgttttctgggccagttatctgacctcttcctgcgagggcagtgcagcaggggtgtgggctctcagggggacagagggactctgccacaggcttgacctgaccatctctctcaagtctctctctacaccccagcacagagagagcagaggtctgcagagtgccacccctctagcagctctgtggaccaaacaagcatttcacctgcaggtgccagctcagcgtgccagggcatgagtgtcccccaggtggcagggtgactgcctttcttaggtggcttatgttcagtgtggaagttcaggctctctcattcctgtttcgattccttttccctctctgtctcacctggtctttgatagcaaaggttagtgttataattaaacaatcaatttagcaaattttctttggggatttcctttccttttgttttgccaactgtaattcctccagtctccagagagatcccctgtgaagtgcatctgaggtgttttcactttccctcatccacagttgttgttgttttcagggactaacaaatgacaaataagacacagcatgttcgtggtttatataagcaggaaggaatatatctgcttctctctgcaggaagagaggaggaggaaaagaggaggaggcacagctgatggctgctacccaaggccttgctccgaaacatcatgggtgactgggagtctaagaatattaattggagacagtgggaacaggggtaatttcacgtacccagtagggacatgctgtgctaagagcgtgtgagaaaatagcgtgtgagaaaaaatttacctgatggtgctgctataggtcttattttcttccatgttttgtttcttatgcaaaacgtatatgtgttaagagaaggggatggggaaggagagttcatggaggagagaagaggaggagaaataaactttgaaaattctagttgccatgacaacataatgagctccaaaagtggcatctctgaaccagttttgcatgggaaggcagagaagctcaaaagggaaagaattaaaataataaaaataataaaacagtgatcatgaagcaaaggatacatctgaagaggctgtgagcccttcttgtcaccctctgtgtgttgggagtgtcaaagctgcttgctcctggctgacctgggcagagcctgcgggattgccgtcaggggttggaatgcctttgcagcctcccgggctctggacaatgcgcagctaagggattttgacaaaaaagacctcatgcattgtgtgtgaagtgcattgtgcttgagaacccattgcaagccaggctgtcttcctgctccgtttctcctccctttcctccctcccacccgccctttcttatagctcagctttactcttttcaatgaatttcactgtagcccaagcgacagtgtgtgctgtgtcactcttaccaccatggtatagaatgtaaaatccccattattgggcactcgttagaactataaggctcttctccccagcaaagtgtcccagagctgtgcgaggcttatacaaaagaaggaagcattgagaagtgcagaatgtgaaagccaagaaggatttgtaggtaatgatgtttttgcccaccatactcaaattggaaatgcacccacagcatcttagaattatttattattaaaagtgtattttaatgaagatatcccttggtatcccttgtcctggttcaagtcgtgttcatgttttcctcattataatggccaggacgttgcactacatatgtttccataatataatcggtgtttaacagcatctgagccaatccatcagttaaggcacttgttctgagaactggttgaatgtggggatcctgctgcccccttgtgcttgtttgatattgttgcccacgagactatctagggtgtacattatgatgtctctaccaccaagctctgtgtctggcacacagtaattaatatatgttgaatgaatgagtgcttagttccagctgaagcatgaagccctccttagtatatatgtgctccggctagactccaacgaatagctgtttggcaatacatgtcaagttgagtggatgatgtataagtgaactaatatcccctatggaggacagcaattctcagtgaaataagcaaatcattgtgtgagttctgtgtatcagcaaagattaaatctattaagtttttagcttctttcagatgttaaccacttaagtagttaatatttgcataatgcttcctatagtttagaaccattagtcagtgaggggaacctccttttctctgttatatttcttggtggaagaacttcctccagaaaacactttttaggcctttgtcatcatcctttgctcattcctcctgaactgtaatagatggatttagaagaactggctgtgctcctctcagcttcttcctcctctttagaactggccggccctccaggaacgtatcttctctactcccttttgcttgtagcttctgggacagtgccctgtaatagggtaggactgggcttctgtggttgttcctatgactggatggttcaaaattctggggtatacactcaggatagatctagaagatagatgatagatctaaagtcatgttctccaacttgctttatcagaaatgaaactgattattttttgtctttatttatctaactccagtatgtcccgtgtctcagctggtttcataatcaggaggggaataaaaggaaaattgtatactgatccccacagcactgctatacatgattagaaagtcttttccccctttaaacatgtaattttaaatgatacaatacaatctcagatgtgatttttgtcaccttcaagacatccagcaattctagcaccttagatatttatatcgcaggtcagttggaaaagagtagtcacaaaacacaaattatgttcatagtacacttggctagtgtgcaatttcctgatcaccaaacacaggagaattcaaaagaagtatgaaacctggtcctttgtcttgggggcttatttcctcccacagaaagctgaaacctgccacatcttttcatatgggtgatccctgaaataggcattctgggctggagataccactgtggtttctatcatgtaagagcagttttgtagaagaggtgagatttgaacagggctttgaaaggtagctggaacttatataagcccaggggtgtcatagagtgggttttgggggagaagttttaggaataacaggatgatccccaactttgaggcaggccctaatttatttgtgggataaaaacgatattgaatatgagagtggtgggaacatcattggtttagttaggtctggttagatcatggaggacctcacagcagagggaattaaggcaggagagttactgtgggtgctggatggagggggcaggatgaccatgcgggacatagtatttggggaagattagcttgcaggcctgttctgtggatgaggacacttgcttgtctgggttctctgctgcctcttcaactttaatcttctaggaactctgagtggccccagcatgagggctctagtggtgcccctctgccagccactctgaactgtggcagacttgcccagcacagaagttaggataggctgtctctaaaagaggactgagagagtgtttattctacccagaccatggctttgagattggatatcaggatgcatgttatttttttaaaagagcttttttgttgttatcttctagataaatgagaaatcagaaacaaagtcaccattcacctgaaaaggcaccactgtctgggagcagtagcaatgggctatatataataacaataatgataataaaacaggtactgtttataaagtgttaaccgcctgttagaacttttcttattgtattgctgcacatctatctaacatgtatgtatctaacaaggacatactgaactaacaaggacacactgaatactggtattaggatttgaaaaggctggggtaaatacagacatacaaaaacaaccctgatttgaaggttttggaaggacctcttaggaaaagagggaggcaatttagcattgttttggattacggggctcaaatcctcattcttcatttaattagctgtgtcaccttgggcacattttctaacctttctcagacttagtttctccacctggaaagtggggatcataatatttcatggagtttttgttgattaaatgatgtaatgaatacaaagaacttagcacagtgcctggcacataagagatgttcagtaacacataactattaagaacctcttaaactagcctcctgtgaaacatgaattttctattattcatttttatctttgagttaaggctttttaagagcctctagataactacaaatatgatatctggtgaaagttccacattttcttcctcatggtctttcacacctttgcatgacgcacttactggcacctaaggatgacagagtcccaggagagaggtactcagacaggacagagtcattttaatagatagggagtagagttgtaaacgatgaagaaatctggaaaagaatagccggaaagttaacaaaatgtattggataactacaatgtgctaggttttgtatattatctcttccttacaacaattcagtatgacaggctgtgtttctccatattacccatggtggaatgtgaactgcaggagccttgcatacttccccaaggatccccagttagtaaattggggactaggatttttcacttgggtctctcttaatccaaagctcacgtgctttgtcctacactctgctgcccctcggaaaatgcacagagcaaaggtcctattagaagaaggcaaactcgggccagagctcctgggcagccagggggcagataaggacataatgccagggagctccatgtaaacacgtgaaagagggaaatgggccacaaggtatcctttcacaaacggttacttccagtgtccttagagctggcttggtctcaggaggacagagaggccacactcacaaggcatattacccatcaggatggcactgcagtgatgggattctgagatctttgtcctcctcctgtcagtggctgggctaacagcaggccaggctggacagtggcctgggaacatagggcaggcaggcaacctgttacttgccatagaagtgtgcagaattgacaaatccatgttcagaagggcatcaaagtccgggtgaggctgatcttctaaagttaagtccacctgtaattccagtgctttgggaggctgagcggggagaatcacttgagcagactgggcaacattgtggaacctcattttgacaacaaactttaaaaataaaaaatattagcagagcatggtggtgtgtacctatagtcctagctactcgggaggctgagacaggcaggttgcttgagcccaggagttcaaggctgcagtggttgcatcactgaagtccagcctgcatgacagagtgagaccttgtctcaaaaaaaaaaaaaaaaaaaaaaaaaaaagagtccccaatctcagcagctagacagagagcaagagtcaagacccaggagaaaccagtgggtggaagggaagcagtgaatgaggggaatcaaaatgggcatttgggagatgtcactagaggtattccctgggcagagaatgggctgttagtgtggttcctatgtccttcttgtgacagtggctaggcactttcaaggagccaggtctgacgtgctatgatgcatgagcctccaaccattagggtgaaggatgtgatctggggtgagagcacaagccaatgatgtgacaaccacatgggcctgagtgagtgaaaactgccacagtgagcagcgtgtaggctgccaacccacagggccgggaaagtcaagaactgtgtgttccacccgcacatgttctctcatgcacatgccgaccagcccagcccaccctgcttctcacacgccctgcctccggaaacgaagagccaaaaagggaaaacctcccgagagtgctttttacatcttgccagacatcggtccacgcagcagcacacttcaccacaccccatccctgtcctcagttatcctctgtgttcccagtcagtggtctctcagccttgaagctctttcacctccttggggcgcttgaaaacgttggccagttccttgagaccttccttctcccctagatttctcatttctcacttcctatgtgtctgaccactccctcccagcatcagtaggagaaaccttcagccctgttgccataggtgctaggtcagagttgcttcccaggtgtcacacagggactcaggctgaggaatactccattgtctgccaatgctaccttttcaacaagtacccgtgcagtcgccctggaagaagggaaaggctgcagagggagcactgtcagttaaatgctttagggcggtgtgtgacagttctactgacgtttcattaggaaatgagtcacgtggccgtgcctcccctcaagggtgaagaacagttgaggagaactggatgtgttctttttctctgggttctgggtggttctccacagggagctgttctgagcgtgattgcctaccactgctctaagccttctgtgtccttgtgaccctcagatccatgtccccaacttctgcctctcctgtgctgcaaagccgtattttcaactgtgtggtagattcaaatgaagtacttcaagcttagcatcccacaaaccaaattaatttcccctaccaaaaacccacttggccatcttggggggcctctggaattcctggagcatccttatctggtctgcaaattcccttttattctgtgaaatgtctgttgctctccccatcctcctgtttatttccagtatccttgatcctgtcacacccaggtttctgccatagcctaccaaatggtgtcccttcctcctctttagtttttggcaaaaacatagctattttcctaaaaatagacctaatcatgttactcccttatgtaaaaaccttagactatttcctacaacccacagaatgaagtaaatcacatcaagtcattgggggaatggggttgtatttgaacagaaccagacaaggatctgaatgctggtctaccacctaccagctgtgagtaagttatttaacttcattgactctgtttttcaatctataaaagggagataatgatacctacctcacagggttgcctttattttttgctgtgttctgtgcctatcatctggttggctgggggctttgggcaagtcattttcttcctctacaaccagggatggggaagcagcttctctctgacctcatcacttcctactctcttgcctacttctcttcagccacactttctataactgtgaaaggggaaagagaagctctggaggtccttaccctggcaatgcaatatttgcccttaaatgtatttgccagaactggtcatgtggccacatccaatgttgggggccaagaaggctgggagccaaaagtattatgtgagcagcgttaatgactatccgattaacgatgaccccatagtgggtatagacccttgccctttggagtgcctcttgcctggtcaaggtctgacactgggaccccgtgtgaccatagttcagttgactttgtcagatttttcttagcttccttccaaagaggatgggatacacaatacttttaagtacatttaggacttgatgataaaaactgaccctccaagatgctctaactagaaggaatgctgactatcttcttgtcagttttgcttatcacaggtgaggaaaccggaggaccaagaagggtgagacattcccgccaagctggttgctggcatctcagactcagtatggccacctctgaactctcattgtccctcccagcaaatcccaccctccagcctatatttcctcaatggctggttgtattagtctgttctcacattgctataaaaaaatacccgagactgggtagtttatgtagaaaagaggtttaattggcatatggttccgcagactgtgcagtaagcatgattctggtatctgctgaacttctggggaggcctcaagaaacttacaattgtggcagaagttaaagcaggagctggcacgtcttacatggcaggagcagtaggaagagagtgagtgagtggggaggtgctacacacttttaaacaaccagatctcatgagaacttactatcacaagagcagcaccgaggggatgctgctaaatcattcatgagaagtacctccatgatccggtcaccttccaccaggccccacctccagtgttggggattacagcttgacatgagatttgggcgggaacacagatccaaaccatatcactggtgttgccattgatctctacttgtcctttaacatgcagtgtcctcttccatgaataccttccccagttccttccatagaattggagcccctcccctccctatgttatccatgtcccatttatggcatatgacgttttatattggtttacttgtctggctccttggtagataagattgacttgagtacagcaagggcatcttatgcatcttatgcatctttgcattttccagtctagcaagtggcactttatgcaatggcactggatagaattcttgtctgaattattggaaaagaaccagttcccacaggttcaacaacaggcagtggaagagttggaacttctgatttttgttctcagtcacttactactgaattgcatttagcttacagtttttcagtctcctgcagcattgtgttccatgctcttatgcttgggtttaagagacttttttaagatcagattttatttctttcttcttttattttaggttcaaggaggtacgtgtgcaagtttgttacataggtaaattgcatgtcactgaggtttggtgtacaaatgatttcatcacccagatagtgaccatagtacccaatagggagtttatcattcctcactctcctctgatcttcatcctcaagttggccctgatatctattgttaacctatttctgtccatgtgtactcaatgtttagttccctcttataaatgagaacatgcagtatttggttttctgtttctgcatgaagtcacttaggataatgtcctccaactgcaacatgttgctgcaaaggacatgatttcattcttttttgtgtctgcatactattccatggtgtatatgcaccacaatttctttatgcagtccactgttgatgggcatctaggttgatttcatgtctttcctgttgtaaatagtgctgcaatgaacatatgtatgcctgtgtttttatcgtagaacaatttatattcctttgggtatatatacagattgctccttcaggccaggctctaggggaaatatgacaatgacttgatcaggtttgctaggtcaaatggtagttctgttttaaattctttgagaaatctccaaactgctttccacagtggctgaactgatttacattctcatcaacagtgtatacgcgttcccttttctctgcaactttgtcaaatctcttattttttgacttttaataatggccattatgactggtgtgagatggtatctcattgtggttttgatttgcgtttctctaatgattagtgatgttgaacattttttcatatgctttgttggccatgtgtatgtcttcttttgaggagtgcttgttcatgtcttttgtccatttttaaagggcttgtttggttttcactgttgatttaagtttcttatagattctggatattagatctttgttggatacatagattgcaaatattttctcccactctgtaggttgtctgtttattcttttgttagtttcttttgctgtgcagaagctctttcatttaattaggtcctacttgtcaatttttgtttttgttgcaattgcttttagagtctacatcatgaaatctttgccaaggccaatgtccagaatggtatttcctaggttttctcctagggttttcatagttttaagtttttcatttaagtctttaatccattttgagttgttttttgtgtatggtgaaaggaaggggtccagtttcaatcttttgcatatggctaaccagctatcccagcaccgtttattgaatatggagtctttccctattgcttcttattgtcaactttctctcttgtcttcatttggtttgctgatttgctttgtttcatgtttggtgataatgccatattcccattcaagatggatgttcttcctaaataaaggattttttaaatcctttttttttttttttgccttgttagtgacatgctacagaaaataaacagggtaattctgatttgtgattggacagcctttgaattaaaggagtacatatggctttggggggcttaatatattgtaaagactgagttactcttgagattctctgtaagtttttcaaactgtaaagtggctgacatttgaaagtattatatgtaacatccagcatcatgtctgctgcatagtatatactaattaggagaatttgatgaacaaatggagaagttttcctcccaggagcatgcttacaaaggaaacatttttttttttttttttgccttgcctaggtagcacatagcccacctttaagtttttttttttttttttttgagacggaattaagtttttaaatgatttttatatgtgttatttcatgtcctcataacaagttgttgtgcaaccatatatattatacctctcaagtcaagtattatgttatgaatgccttgtacaagtgttgagggaaccgagttggaatgtgaataactaacccagtgtggtctatcttctgccagtaacagtttcattgcacaatcttccttactggaggtcagtcaccttaccccactgacttggcccctcttggagtatctcctttttacttttggaaggttctcagaactttctcaataatatttcaaattgccatgttttggccaggtgttttcagttgtgtaaatcttaaacccatttctggaagatgttctcagtcctggtctcacctattcaataaacttaaagtttctgctatgagttaagtgctctgttaattttggtggggaaagcacaaacagacctattgttaaggcacactctcaaactttgtctggaagaccttttggaatacttcacctatatctcatagttttattatttctggtttctcaatacttactcatttgtaccccacttgtttcctatgttgtatataaaatgaccctgtcctttatattttttatctcctgcatcctagttctctaagttttacttcctgaaagcaatcaaatgcaactaacattgggtttcatttgagttagacctgtagagtgcttgggctagaaaggctctcagggagcactttgcagttaaaatgaagccacccccacccgcccccactctctgcctccccagggtagtcttgaccaagacctagagacagtgaggggtagattagggccagaatccaggcccctgactcctagtcagtaccctatgtctacctatccttgtccggtgaaccttttgatatttgatttccatccttgttatccctttttctttatttgatgctaagctattgtcatcattcctcattagatccaattacagaggcttggaggccagtaagaaccaagttttttttttttttttttttttttttttgagatggagtttcactcttgttgcccaggctggagtgcaatgatgcgatcttggctcactgcaacctctacttcctgggttcaagcgattctcctgcctcagcctcccgagtagctgggattacaggcatgcgccaccatgcctggctaattttgtgtttttagtagagatggggtttctccatgtttggtcaggctggtctcgaactcctgacctcaggtgatctgcctgcagcagcctcccaaagtgctgggattacaggtgtgagccactgcgcctggccagagccaagttttttaagggatggcttcacgtctgagttttggcctttcacactgacttgctatggctggtagcaaggtgatgaggctcttttaatcttcatagatatccagataatacagcttggatcactgatagtaggaattacaaggccctcctaatccagtgaggacatggtgttcagaggccaagacatggtggggatgcttgcagcaccttcatgtgaagagtttccctgcatggaggtgtttggaaaacaggcttgtgggtgaggggcaaagagagttctaaaaagactgcattgaccttttggatttttctgtagctcacctcaaagacaggcagagatcctgggtgacatgtggtgccaatttttattgtattcctactggctctgtagatattgtcttttgttatgtccttggcaagagaaatgtgattgatgtgattgggaacatgagactggtggggtgggggtggttctcaagctccccataattcacagatttcaagagaggagcacagaaggacttcatttgaagggaggaatgaaccatctaacctccagtggcagatgggagccgagaccctggagtcattggggcagcagttgcctgagcaaggggaataacagcagtttcccaccaaaagtcttctattgggattttcatgttttctgtcctgccttttaatgttttttaatgaacaataggatctatgactctttatgccttggggagtcactcaggacaagtttcatacccccacttggagttgggattattatttactgatttagacagcttggggggctgtcaccacacttcttctgtcttgtccagttcacccctcagctggctaagtctgagaaggtgttacacgcacagctcaggaagaaggcatgcctaagtttctaactaagtgaatgcaaggcagctgggtctgagagccccagaggctcacctctgcacatggtgagggaaaaataaagatggcttctgagtgattttatgacttttgaaagaaggggcattgggacaaataaaaggatacagccaatggacacgcagttctttggactggaagaaaaattataacctgtttgcttttagggtcattgtattcatctacaatagtatatggtttgttacagattccagggcattttccatatatatattttattttttttcctactataactttaaaagacattatttcccccattatttcaattaataaacaaaggcttattgatgatttaactagaatcacatagaatatgccagagtcagaacttgaaaccacctttattccttctggctcagtgttttttctcttattattcaatataactcaattccctcataaccatgaagcattgtgttttcgtgacttatggttcattgacttccaaacatcattttgtctgaaatatttcatatacacaaaagaatatatatatattacatatggtttgttccatatatgtgggacaaatgaaaatgaaatgagtatctgggcactaacaataaagcttaagtgatagaacattactgatgccagggaaacccaattgcctttcctgcaactctcgccctcccactcaagggtagtatttattatccctttgcttatcatttagttttaccacttgtgtatatttccctatgcaatatatcgctaaatgttatatgaattgtaaaatacagtgtatgtttttatagaggttggttcattcacttcactttcgctgctgagcagaattctacacagcagaagtgtaagtgtattgcaagttatcccctctccacttctagaattttgctaatgcaagtgacattgctatgaagattctggaaattttctggggctataggacatttgcatgcttaactctgcaagataatgcccaattgctcttttcccctatcctttttaagttataattgacaaaatttttacatatttacaaggtacaaagtgatgttttgatatatgtatatattgtgaaatgtttaaatcaagctaattagtctatcacctcaaatacttatcatttatttgtggtaagaacatttgctatctactctcagtaattgtcaaatatacaatacattgatattaattagtcaccatgctatataatagacctccagaatttatcctgtttaactgcaatttttaccatttggctaacatctctccatttccccttcccactccagcacctggtaaccagcaggtgctgctggtctactccttgcttctatgagttctacttttttagattccacatataaatgagataatgcaatatttgtcttcttgtgcttagcttattctatttagcataatgtctttgaggttcacttatgttgtcatgaatgacagaattttgatttttttaactttaagttctgagatacatgtgcagaatgtgtaggtttgttacataggtatacacatgacatggtggtttgctgcgcccatcaacccatcatctacattaggtatttctcctaatgctatccctcccctacccgccccctgattccttgacaggccccggtgtgtgatgttcccctccctgtatccatgtgttctcattgttcaactcccacttaggagtgagaacatgcagtgtttggttttctgttcttgtgttagtttgctgagaatgatggtttccagcttcatccatgtccctgcaaaggacatgaactcatccttttttgtggccacatagtattccacgatgtatatgtgccacattttctttatccagtctatcattgatgggcatttgagttggttccaagtctttgctattgtgaatagtgctgcagtaaacatgtgtgcatatatctttatagtagaatgatttataatcctttgggtatatacccagtaatgagattgctgggtcaaatggtatttctggttctagatccttgaggaattgccacactgtcttccacaagaattgaactaattgacagttccaccaacactgtaaaagcattcctgttcctccacatcctctccagcacctgttgtttcctgactttaataattgccattctaactggcatgagatggtatctaattgtggttttgatttgtatttatctaatgactagtgatgatgagctttttttcatatgtttcttggtcatataaatgtcttcttttgagaagtgtctgttcatatcctttggtcatttttttatggggttgttttttttcttgtaaatttgtttaagttctttgtagattctggatattagccctttgtcaaatggatagattgccaaagttttctcctattctgtaagttgcctgttcactctgatgatagtttcttttgctgtgcaggaactctttagtttgattagatcacgttggtcaattttggcttttgttgccattgcttttggtgttttagtcgtgaagtctttgctcatgcctgtgtcctgaatggtattgcccaggttttcttatggggtttttatggtttggggtcttacgtttaagtctttcatccatcttgagttaatttttgtataaggtgtaaggaaggggtccagtttcagttttctgcatatgactagccagttttcccaacatcatttattaaatagggaatcctttccccattgcttgtttttgtcagatttgtcaaagatcagatggttgtagatgtgtggcattatttctgaggcctctgttctgttccattggtctatatatctgttttggtaccagtaccatgctgttttggttactgtagccttatagtatagtttgaagtcaggtagcatgatgcctctagctttgttctttttgtttagaattgtcttggctataagggctcttttttggttccatatgtaatttaaagtagttttttccaattctgtgaagaaagtcaatggtagcttgatggggatagcattgaatctgtaaattattttgggcagtatggccattttcatgatactgattcttcccatccaagagcatggaatatttttccatttgtttgtgtcctctcttatttccttgagcagtggtttgtagttctccttgaagaggtccttcacatcccttgtaagttgtattcctaggtattttattatttttgtagtaattgtgaatgggaggtcactcatgatttggctctctgtctattattggtgtataggaatgcttgtgatttttgcacattgattttgtatcctgagactttgttctagttttttttaatcaagtattttggattttctacatagacgacttctttaaatttcttaggcttctttaaagactttatcttggtgttatggagtttactctaatggtgctagttatgggtttccttttagctatcctgcttttatatgcattgtgctcactgcatctatgtatctgaatatttcattcttgaaaaatcaaatattatcttttcaaatattttctctcatcatttgtctcttctcattttatgaaactctgacttgacttatttaagatcttcaacctaacatttctattagcctcactttcagttttctcatctctttatttctatgcactgcattaaaaatatatatgtgtatatatatatttatttagttctttgattttatttatcagagttttgtagttttccttatgtagatattgtacatatttggtcagatttttacttatttaatttttttaggtactacattttacatacattttctgttctgctatctgctctgtcctgtaacctatctttgaaatttaaattttaaagaaaaaacaacacaaatgatcaaaatctggaatgaaaagggtggcatcactatagatcctacagaaatcagataattaaggttatattatgaataatgttgtgccagtaaattcaataacttggataaaatggcaagtttcttgaaaaccaaaataccaaaacattgccaaaaaaccatatgatcatcttaatagatacagaaaaagcctttgataaaatccaacattgctttataataaaaaccctcaacaaactagacatcaaagaaacatacctcaaaataataagagccagctgtgacaaactcacagccaacatcatactgaatgggcaaaagctggaagcattcctcttgagaactgatacaagacaaggatgcccactctcaccacttctactgaacatactactggaagtcctacctggaataatcaggtaagagaaagaaatgaaaggtattcaaataggaaaagaagtcaaactatctctctttgctaacaataacaattctacatctagaaaactctaaagacttcacgaaaagtttcctggaactgatgaacaacttcagtgaagtttcaggatacaaaatccatataaaattcagtagcatttctatacatcagtagtgttcaaactgagagccaaatcaagaacacaatcccctttacaatggccacaaaaaataaatacctagcaatacatctgccaaggagatgaaagatctctaccaacaagaaaaactataaaacactgctgaaagaaatcatagatgacacaaaaaactggaaaaatattttatgctcatgaattggaagagtcagtattgttaaaatggccatactgcccaaagcaacactatttcaatcaaactacaaatgtcacttttcacagaattagaaaaaactattctaaaatttacatggagctaaaaaagggcccaaatagccaaagcaatcctaagtagcaggaacaaagccagtgacatcacactacctgatttcaaactatattataagactacagtaacccaaacagcatggtcttggtacagaaacagaaacatagaccaatgaaacagaatagggaacccaggcataaggctgcaaacctacagccatctgatcttcaacaaagttgacagaattaagcaatggggaaaggaatccctgctcaataaacaatgctgggatagctggttagctagatgcagaaaaatgaaactggacccttacctctcaatatatgcaaacattaagatgaattaaaaatttgaatataagacctcaaactatgagaatccaagaaatacacctaggaaacaccattttggacatcagccttgagaaggatttatgactaagtcctcaaaagcaattgcaataaaaaacaattgacaagtgggacctaattaaactaaagagctctgtatggcaaaagaagttatcaacagagtaaacagacaacctacagaatgagaatgcaaaatatttgcaaactatgcatccaacaaaggtctaatatccagaatctctaggaacataaacaattcaacaagcaaaaaacaaacaaccccattaaaaaatgggcaaaggacatgaaaagcactttttaaaagatacacaagcaaccaacaaatgtgaaaaaaatgctcaacattgctaattattggagaaatacgaatcaaaaccgcaatgagataccatctcacaccagtcagaatggctatctaaagcaaaaaaaaaaaaaaaaaaaaaacaacagatgctagcaaggctgcagagagaagggaatgcttatactctgttggtggtaatgtaaattagttcagcccctgtggaaagcagtttggagatttctcaaagaatttaaaacaaaactagcattcgacccagcaatcccattactgggtatataattccaaagaaaataaattgttctacccaaatgacacatgcacttatatgttcattgcagcactatttacaacagcaaagacatggagtcaatctagatgcccatcaatggtggattggataaagaaaatgtggtacatatacaccatggaatactatatatccataaaaaggaatgacatcatctcctttggagcaacatgaatgcagctggaggccattaacttaagtgaattaatgcaggaacagaaaaccaaatatcaaatgttctcacttataagtgggagctaaataattgggcactcatggacataaagatggcaacaatagacactgggtactactggaggtggtagagggttgaaaaactgttgggcactatagtcactacctgggcaagaggatcattcatatcccacacttcagcatcacacaatatactcatgtaacaaatctgcacatgtaccctctgaatctaaaataaaagttgaaataaagaaaattaccaaaactaagagaagaaatttaaaatctaaataaacacagatctgttaaaggaatttaattcatattctaaaacttcccacaaagaaaactgtaggccacattgttttaccagtcaattctaccaaacgttaaggaagaaataatgctgatccttcacaaacccctttaggatatgaggcaaggggaaaaacacttctcaactcatttgatgtgatcagcataaccccattacttaaacctgacaaatatgtaatgagaaaataacaatgtccattgtgaatgtaaatgcaaatttccttgaaaatattattaaatctggcaaaatataaaggataatatgtcattaccacgtgatgtttaattcgtgaatgcaatgttgatttagcatttgaaaatcagtcaagttaatgtactacattagcagtaaaagagggagaaagcatacagcaccttaatatgtgcaaaaataacttaaaacttactagtcctttataataaagacttgcagtaaattaataatagaaaagaactttctcagtctgatgaaatggcattgctattgtttgaatgtgttttccaaagtttatgtgttataatccccagtgcaacagagttgagaggtgggacccttaagaggtgattaggtcatgacagctctgccctcgtgaatggattaatgccattattgtgggagtgggttcttgataaaaggatgaattcatcccactttcccatgctctgttgcataggctttgccattacacccttctgccatgagatgatgcagcaagaaggcccttgcaagatacaacccgttgatcttggacttctcagccaccagaacaatgagccatgttaattttggtttattgtaaattacccagtctcaagtattctgttatagtggcacaaaatagcttgggacaggcatctataaaaaacctacagccagcatcatacttaatgaaatattaatccctcttccctgtaatctggaaatgggcaaggactttcacttttaccacttgtctttaatgttgttatgtaaatctgagccatattaataaggaaaggaaagaaaataaagggtacataaattggaaaggaaaaaataaaaaccaattttttcacagataacatgattatgtattttgaaaatctaacagtagactctaaactacaagagctaattaagtgaattcagccaggtcacaggatacaaggtcaacatacaaaaattaattgggttatatatgcttgcaatgaccaagttaaatttaaatttaaattaactaaaaatggatgttaaatatttaaggaataacaaaaaaatcaaatatctagaaataaatctgacaaaagatgtcaagacctttctactgaaaactacagaacattgctgaagtaaattagtcttttgaaaaatggagagacatggtatctttatggattgaaaaacttaatattattaagatatccattatctctaaatcaatatggagattaaataaaatccccatcaaaattctagcaggttaatttgaagaactagacagatgattcaaaacttgatatggaaaggcaaaggctttagagaacccagaacaattctaaaaagagaacaaaattgtaggacttattacactacttgattttaagatccactgtaaagctactgtaatcaagacaatatggtattgctgtcaacagacaaatagaccactggaacagattagagagcccctcatgtatattggtggttgatttgtggcaaagatgcaagttcaatttagagggggaaaggaaagtcttttaataaattttgctatatccactgtatattcatataaaaaaagtgaatctacagctgggtgtggtggctcatgcctgtaatcccactttgggaggctgaggtgggcgaatcacttgaggtcaggagttcgagaccagccaacatggcgaaaccccatctctacaaaaaatacaaaaataacccaggtgtggtggtgtctgcctgtagtcccagctactcgggaggctgagacatgacaattgcttgaatccaggaggcggaggttgcagtgagttgagattgcgccactgcactccagcttgggcatcagagctagaccctgtctctaataaataaattaataaataagaatctagaccttcctctctctgtgtagattaaaattaatttgagaatatctttgcgaattcaggcgagacaaatgtttcttggacagaatacaatataaaaagcataaacaatgaaatcaaaacaattaataagttgggctttgtcaaaataaacaatttctgtttatcaaaagatgccattaagaaaatgaatataaacaagacacagactaggagacaatatttacgtaacatatatctttttttttttttgaccttggagatttccatcacttttttgtaagcttaggaatgcattaattatcatgcttgtcaatctagcacttgggtgttttgtgtaaaagttatttcagaacactggtgttttattctgccagagtagaagtcagttctttgacttttcagattctctgcaaaatataacatttttctgagcagcattaggtagaaatatactatagtatcatgtgattaccttatttcacacaaacagaattatataaccaaattctctatagttaccccttcagaagtaaagcctatacttactagtttcccagggaggagtcgttattgcaaaggagtagattaaacctgtggggaaaaaatgttggcctggtgtatctttttaggcatcagccttcctgtaagtggagctgtgaccaggtgtatgtatgcacatgtgtatgcatgtacattttcatgactgcagatgtagacacgtgtatgcacagataatgtttgcagataagatgtattttcagataagaatggagtaatattttaacttgggttcattgtaatgtttggatataagatatctaaaaaaagatcagtgtttattggtagagcgtgattacttgcaaaagaatttgactattttatttatgctagtgacaactagtgtttttcataggaatccatttctagtaattactgtttgataatataagggtaatgtgaatttcctgcttcctgcacataataagaatgtgaatttaatgccttctttatagcctcatttctccactccatagagcaggatgaggaagagatactctgtagtggagttcaggggcttttctgacctcgggtcctatcctttcatctgagtacatcctcagagacaagaggcagaagagaatacagaaggggaaaaataggatgaaaaagaataacaaaagcaggggaggaaacacacaggaagaaagaagaggaaaatacactgaaaagctgtggtgaaatgttgctgatgtaatcctaagggcctcaggtggcacaggtcccctggcttctatttgcctctctagacctatctgtggtcagaagaaccttgttctgtcagtacttagatgtatgatcttgaacagattcttaaacatcctttggcttcatttaaaaagtgagctagtatcaggtattttgtagttttgtgaaaatcaaagcagatagtgcttacaaacttcagcagagcatctggtacatcataaacacaaaataagtggtcattagtatgatgatatcaataccacatcttccagctgcaaaaaatggttttgctccagacagtgcttttcaaactatccgtgtcgaagaattgcttctaaacattaccagtctactgtgtgtttatacttttgtaaaatgcatttgtttataaaaagaattacctgaaaactgaaatgaaaaatataaacagatataaaatacagccatcaatttttattcttacatttggtagacatcaaatatctgtaaaattattgtagaagttactagtgcttttaatttctgaatttatcttatggactggaaatagtttgcagataggcattggtccatggttcacactttgaccgatacttcatacactgctctgtgaagagcagatctactgttgcctataaatacataagggtggactttgctaaggcaagggacttaggagtatttagaagtctatgctggggtgggggttatggtccaagctggaagcttccaccctcgtgcatgtctctgatggctccaaactctggagagtctgctttgaaggaaatcttcacataaaaggtcctatgtaaaaatgtcttctcctgaaggtggtagagttatttagaatctatgaggtgaacagctagagttcagaagttgtctaacagtctacacgtattcagtaacatagactttatcaaaagatgcactctcctcctctctaaacctcaccagtattccttcccttccagtgttgatttgtattatccttgatgcaaatgtctgatttgagttaatatttcaaggtcacaaagtaataagagttgtcaactgacagtactttgtactttaagagagcagctccttaggaatttcagagtccactcttatctgttgaagatctaccatactaggcgccatgactggtgccttggttcacatgggcttgctgatgcagcagctcagtgaagttgcagtttttatcaatgccatttattaggaaattgaacttcagaaagcttcaataacttgcctgtggtctgattcaaagataggtgtaatgagtcccaatacagtttttatttttacaataccacaggtttaatcgtctttcatggcattttgtcactgtcattgtatatgtattgtacgaatcctcatggaaaagtgcatagcctaccacagccctaggcactggagtccatgacaggccagccatctagtaagaaaatgtctttgcttgtatgtcaccagcttttgtttcatttatctctaatagataaggatattttcaataaggtaacaattaattgcattttaatgaagaacttaggttaactgtaagacaggcttaaagaagttggtgatttattaaatatcctcaatttaagaaagacttctaagtaagggatgataacggtcaacttaaatgatactgagactacagagggacaaagtctcaattgcagcagaaaatatttaagctgaatatagtgaagaatttcctgccatgatgttgctttacagctttggaatagtcttgaaagttcatatagagtgtcaaagaataggtgtacagcttgttttcagaaggtcctggtagagaattcttagattgactacattaccagtagatatgatctgcagtggttgtgactcatagaggtaacctccagaagaaagaatatgtacttctgaacgttctgatgcctttatccattcatgcaacaaatattgcttgaattccttctaggcaccaggcattgttctgaggatatgatggtgaacatggcagaagagatccttttattgtgtagcttatattcttgagcaaagacaaaaaaccaaatagctgaacaaggtagcttttagggacagatgttattaatgaaataaacaggttaatgtggtagagtgcagcaggtaatggggccattaattttaattttgtgatcaggaaagttctcccatcccacgccagtggtcgggaagagagacagagcagatctatggagggtctcataggccacaataaagggtttgtattttaacaatgagaagccagcagaaagtcttaaacagaaggatagcatgatgtattttgaattcacaagtcaccctgttttcctgctatgaaggaaatagggggattgggacaaagatggaaatgtgaagtcagtaagggaggctactgcgctcttgcagccaactgaaggcaagaagcatccaggcaggagacagcagtagcctggactagggtgacagcagtgggtttggagaaaaggggtaagactgccaggaattgcttatggattgggctgaggttgggatgagaaaggaagaagggaaaatgacccctaacttgggtggttttgtttactgaggtgggagagactagaggaggagaagtttggggagaaatcacttggccatgttacatccgagatgcctatttgacatccaagtagctgatgtcaagttgacagttacataactgggtttcaagctcagtggtgaatttgggctggagacaaaaattcggtagctttcagcatagagatgatgttggaagtctccatgggcctgtgcaacgtcacctggagggagaatgttttagaagagaggacctatgcctgggccctggggcactccaatgtctagaggaggagtgaaggagattgagaagaatcaaacaaaagagtgggtgtcatggaagcccaagagaagaggcctctcctggaaggataagctgaagtctaaagatccactgagccccaaacccctgttgagtccacagaccctggacccacacagcttcaggactgacctggaattgagctaacctcagttgttttaggtcaaggcacagggtgtgtgccccctccactccattctctcctgttgttcccaaatctgaactgcttcttgtctggtggctgcccgtagtgtgtggtgcacttattcatgatgtaaacagttgccagacagcctgtctgtgctgggacttcaggcataaccatgaacaagagcaatctacacagtttctgcccttgcagagcttacagcatcatagggtcaccaacgagaaatgagacaattccaagaaatggaaatagttgaggtacagctgcttctagtacagactgtgtgatatgggtaagtcaagttgctgttctaagcctggattttcctgcctgaaaaatagaactaagtctgagagactttctaagataccctgaagatgtgaattaatgactgtgtgaatcaaaactcctatacatcccatcccattttaattgcatccctggaaaggacagcgagtggaaaggccaggctagtccttctgtgtattgagtcacgtttggtgcgttagcccacgccgagcctctaaacttccttccgctcacttcgagtctctcctcaggagctccccctgctccattttccctcatattttggctcttctttcccatctccaccatcccatttctgtgagctttgggccttctccttggttccacttgaccgtcccaaagcatataaaaggacttgttttcataaggaagaaccttttggtgatgaaccatgacattttgccttcctgagaggaatctttgatgtttaaattatctggggatgtttaacaaaggaatgtgggaaatgcaaaactttttacaaaggggaaagatgcccacacagggtgaagtgtacaaagcttcaacctggtaataaactctcaatttcttccttgaacacagctgcacctctcctcagacacctccaaagcttttggggagggagctggttgctgtgccttctcagaggagtgcgaaatgtgtctctgagaagaacacagccatttgttctgttaggatgcttctttcagactgtaattagagtgctgtggggggtgtagatggaggagaaagaagaatatgaaatgctcttacttccctgtggctcattcttcctgcaccacggggctttgaacccactgaaatattgtgactgaaacatacactgttatatgcagagacagagagaaagcagcatgtacacctctgagttcatgccttgatagtatctgtgtgctacaatgaggtggcgcagactggcggagaattaaacagagtaggtctgaattctgctgtgtaactctttgtctttcaacactcttgaaagcctttatttttccaaactgcgaaacagagatgaaagtgtggtcccctagcccttttcttaaaaggttttaaggaccaccatgtgagaactcataacttttcaatattcatagtacatgctattctgtgatcatcccacttatgggagggattcatgaagcagttataatgaaatagtgtagcatccaagaatatttgtgggttttttggttttgttttaaactttatttgcagcaatatcaacaacaatttattgatgatgttttactgaattatcagttaacatctttctagcatgtgccagcagaggggaaggagggtggcagagaaagagcatctaggatggttctgtttcattcacagcagacaatccttgaagcagctggcacatattgtgtggatgacagagaatttggtgctattgagcttaatgatctttaatataaacatgtcaggatatccagctgacttatatacacagctgaattcctgatcctccctcttcccaaacctgctccattatcttttccatcctggtttgtttaactccattcttctggttgctgtagcttaaaactttggggtcatcttggatgcatgtctctcttacactcctcgtccaccagccagcaagtcctcctagctgtgtcttcacagtctatccagagccccactgtttctcatgagctatactttaccactctcgccaaggccaccatcatctggatacaacctggaagatctccctgcttccacccttaatccccttcagtctcttttcaacaggacaaccagagacattctttgcaaacttaagttgtgggactcctctgctgcaactgaccaatcgtttcccaatgacaccaagtaaaactcaaatctttatagggtatctatggccctacatgatggccctccacttccccactgcctgctaccactctgaccttttttccatgtattcagtccactctagtcacattggctcttttctgttcttcaaaagctcctgcaagatgcttctgccccacagctttgccctggtcatcacctctgcctggaatcctcctccccggatgtctgcatggctcacttcctcacatctctcatgtcattcctcaagccacctcagtgaggccctccctggccactcaaccaaatattccagctccccgacacccaatacttactatacttctctgctttatttttccctgaggaattatcagtttataacattctgtttattatgcttatttatcttgtttattgtttttctcctgcagtataatgtaagctctgttgaggacaaagatttgcttctttttttgagaagggggtcttattctctggcccaggctggtcttgaactcttgacctcaagccatcctccttcctctgcctctcaagtatctgagattacaggtgcataccagcatgcccaattatacttgctgctatatcctcatattctaaaacagtacctaccatgtagtaggcactcaataaattgtattttggaggtggaatgaatatataaaataaaggccttgataataggttatctgtattatgatacattctcagaaaagtcagtaatataacagctacttggagcacctactataccttgcacattctatcatttaatcctcacaacaaccttttgagataggtatgatcattattcctaattttatgaatgaggaaactaagatttagtttaagaacttgccccagatcacaccacgatggagctaggattcaaacccaggtctgtacaacttcagagcttttaatcattatactttaacattctggattccaccaacttcaaggttaaaaaccgaaacaggaaacatattccagttccttcattatctcccttacattaattgtcatgcttttcttcccctgtgtctactcaaacaaataaatgagatctcaatattgagaagagaaagaaaaaagaccagtcattccctgagctcctaaaagaataatcttctttgagttctcataactgaaatgtcatgaagctgtggaatagcactggctttggaacgtgatgctctaggtctgccgccaccgccctaatccttggaaatggcaagtcatctgacctctctctatgccttagtttccctgcttatggaaagccggtcttggacaggtgatctgtcaggttcccctcgcctgatatcctggtctgtgagactcctggtctgtcttccattgccgtggacataaggtggtggagtaggagtgggatatagcacttcatgtaatgccatttatttgccttaaccactttagggaaggatttctgctcataggaggagccttctgaaagctccagattctaaggaagaatgaccccatatgatgtcgtcgagcatttgcatcacccatcctgcttattagagtcaataatggataggatttagagggctagcttctgttttggcctttattgacaacctaagtctccttaaatcctttctggaacaagtcaagggataaagcataaacaactttaatactgctgaactctatgaccttcaggaaggtgtttaccttctctggggctgtgtttgcttctctgaaaaatgggagaaatggttccccaggctcgtaagaacactgaaaatatagaaacattgaagaggctcaccctaaccccaacccattttccaatggcactgaaatgaaaccactgccaacacagaattgccaatcttgcttccaatttctctgttagtttcagaacatttagggttgaagaggtttttcttgatgtctaacccaaattcctccttcctaaagcaaagactttacaggaaccttggcaaggtttccctatgggtagcaaagctctctgaaacatggactctgaagattaataggaatatgaccatgtggccatttgtgtgcttggcagagtgtgtgtacgtatgctgcttgtgccaggatgagtgtgtgtttccatgccaatgtgtgtgatgaagcatgcaagtgtgtacagtagtgtggataaacagatctttgagtcacacaggccagcccatcctggcactttgtcttccttttggttgtcatgacagcagcgaggggctgtgcatcagtaaacaaagctccctgcatggagccgggaggagaggtctggagcgagaggctaaaacatgagtcaagcagtcctccaaccgaggctttcttaccccagccgacctaccagaacatcttcatcgctagacaagcatcgagataccagtccaggtgccctgtgactgactctggggtcacataacatgggcagacatttcaggctggagctaggctttcatcaacctcacttctaatccccaagagttagcaacagcataatcaagtctagaaatgtgaatgaccgaagaccctcctagtatcagcctatgggctaaaaccagttacttcattaaggcagaaattagccactttgtgatttgtctgtagcagtggctccttataggttcatacattcataaaatgctaattttaataataacctaaaatgatttcaaagaagtctctgtcttctctcccctcatccctccaggcacacatgataaatgttttgggcattctaccttgtatgagattatgtaattcttccacttcatcttaatgattaattatatagaattagctgtgtatgaatagttgagttttacaatttatatttctcatgtaaactgctgcagaaaaaaagcagtcacaaatacaaatgtagtaaccaggataaaagaaaactgtgctcaaccatgcagggcaaagagatccaccttgttcttagtttccatgactgaaatttagaaacccaaaccttgcatacatatgtagcatctagagtagaggctcatccatgcttaactccaattcaccttacttccctgtatgcaagagccgtatgtgaggggacctacaggttatcctccctcagaggagccaggtttggggctggaggagcaacctaaaattaaggatgacagaattgggtaaggagaagtatcgggaatgaaacacgacttggatttgtgtcactgtacaatctcttatgggaatctagtcaggactctcagagtcaaccagatctatccctgcctctggttatgagcctagggtttatgtgggtcctaatgtcaactcttactgatgaagaaattgagacagcaaggtgactgtccagtttgtaagcagcagaggatacctagatccccagctctgaaaatagaatggtggtgtttctgctgcatcacatggggatttgtttttgttccccttgtttggaattctgaaatctagatgcatcccttcttgatttctgttgcatctctcggtgtagaaaccctggatagaacaaatgaaaaggagccaattacctatcctcttaccttaggccacaggctgttgccaaggggccttagggaatatgaacactcttcttctataggccagattcccccttttacattttctatgccttgctccaagggaactggataaattaagatattcatagtgccctgctatgagctgcctttcagtgggggaattcagcagtcatctggtaaactaaataaccgtaatatgcatcatcatccgaatcaccccaggatcctctgtgaagaggacagggtactcagatcctcagaggagagagggaccagttaaaggagtatgctttgtttcgcaggtctggccacatatatacccatgagcctgatgggcatgttaaatctaaggtttatgaagctgaatcttatttgctcctgttctctccagaatgcaatatgtgtatgaataaatggacacaaaatcaagcagtatatcactagcttgactaacgctatgaattttattctaggtctttaataacccaacacagagcaatggatttttatgctactgtctcaatgaaaaggatagtcccttaaagaaaaacaaaacccatctgttttaatatccttattttcctcaaccttgggctgaaatgaaatccctcttgtagattttaaatgttgacttctagatagcagggaagacagctaaggcattgtggaaacagcacataacctggaagaagacattagtttgaattttgtctctgcctcttgctaattggattatcttgggcaagtaatctttttgaatctcgcagggcttttgaaactataaatgaaataatttacatgaaaatgatttgtaaatttaacaagtttaaatgtgttacatgaacattagctgttcttgatattttatttctataatctatggaatctatcataccagacactgggttaagcttcgctgacccttgttggaatgtgatacttgacctcatgaaggctttacttgacctcatgaagcctgcagactagtcagggagacaggccatgggtactaacaattacagcagcgagggcagaggggctgtaagagttaggaaagacacaggtgctggacttgctacccaggttcccaatgaaagaacaaaacagaaaaggctgcttgataaagcatcataaagaaggtcccccacatcctccattaaggtgctggagctgcttaggaggtactcccagtggtgcacattcgttgctttacttcttttagccaagaggcttggccaaattggttgggctctgggactgtgagttccagctaggatgccaggtgggagggtgggaggaaagggagcctacaatggcgaagaagagcagggaacccagcgagtgagacctggatccaggaaacttccaaacacaaggaggcatgtggaaacagcgcttaacctggaaccggaagaggttagataaagggaggttagacgggggtttgttggcctatcctaccagaaatcaagctacatcgtcattctgggggccttataaagatgacataccccattcttcatagtctaatttacactgattatagtggagtcaaatgaagagaaactggtggcagtgtgcaggagttgctcctagttcacctgctccctttgagtcagtgcagagatggagtactcctccttttaagcctctgggagtcagggaagaactatgacttctcctagttagcctggatatttgtcattaaaaaaaatctactgaacatatactatgtggtaggcctattctagtctaggaagatagaaagttgagtaaggcacagaatgtttttgcaaaaagctcacatagaaggagagacatacagctgaccatagtaaaggtctgactgcaagatgagctctaaagggatggggaagaggtagactggaggccagaaggttggggtgcagtgatggtgggacccaaagagaagaggcaacatttcagcctggccttgaagaaggattttgactcaggcagataagcattgtgcactagccttgaacgcccatcctgccttttcagtaagtgtgggaaatgtgctgtagttgaagtgtggctgtggtgggctgtaggcaggcagggggtggatagggatggcaggaggagataaggcttgaagagaaaggtttggctacaactgtgtaagactttgaacgtcacgcttgaaggcttcatcctcttcattgagcagagggtgatggaagccatagaagaggggctaatagagtagaaagagatgaaatttagaagatctgagagttgtggttcctctgaggggctatgtgtccttggacacttgccctctcaaagggccacttaagtcactttagattcagttttctgagctggaaaatggatatgttggtcataatgcttatcctagatgctcaaggatgatcatgttcctccggtcgtagcctgcttcaattctcctctttcaaggtcttgctcaaaatatcaccttcttattaaacctccctggattcccccagggttgagaaatcaagacacagacctatgaaaaggtaaagtaacatataaaaatgccatttggctaggcaaatatgtggtgcatgaaggacttgggctcttacaagagaaaggcctgggttctaatcttggctctgtttcttacttaaactccatcaagttgcataacttttaagttaaggatgaaaatacctattctaccttcttctcagaatggttgtaaagattaaatgagcaaaatatatgaaggtgcttggtaaattaagatgtgctctacacatgttacttgccatggttagtactggaggtttggaagtggtaagatccagtgaatgaccttttaaaaagataacgttgatagtgtgagatgggtgaaaggaggagaaagagacaggaggttgagagaccagccgggtgctattgcagtggtccaggcagggaaggatgagatcatggatcaagatagtgaggatggagaggcagggtgaattcaagtgcttttatgaaggtagaaccaacaggacaatggtactaactggacaggagggattgaaagaagcaaaaatccaaaggtaagaattttggtggatggtgatgtcatgaaccaagccagccccttgttactttcaaatttctgaaattcagaaagtagaaaggaggcatcccagggcttgaattcagttatcctggccctcactggccctggtcactcttcattttgactctttccttcccttcccccatagcacctttagtagaacccaatgaacctgaagccaagcacaggagaatttgtccttccggtgtgcctttccctacaccttctgcctgattgtaagcaggtggctgtacccaaggacaccagctctattttggcaggagggccaggtgtgacacgaacaggtgtctgttggcattatggtagactggcgtcttccctttccctgcactgtagctggggcccatcccccagcccctcattcatttcttctttcctagacatgacagagaaactggcaggacttacagtgggtgctggactccctcagattcagtctgcagctctatttttttttaaacgtcttgctctgttgcccaggctggagtgcagtggcatgatcacagctcactgtaacctcgaattcctgggctcaaacagtccttccacctcagcttcccaaagtgctgggattacaggcatgagccactgtgcctggcctgcagctctttatggggatcacatttaataagtagaacagcttcccaggtagtaggagaacacctgagccatggctgggaggcactgcactggtaagggcatcctagcctggaagggtgtttggtgatgagagaggcattgctagaggtggcttctggaggaacctgttagcaaactgtgatttatttatccccattctttcacccaataaatttgatcctcctcttctctatcagggagcccttagtcctcttctcttctctttctcccatggagctgtagccttctcattcctgttgtcacacggagtggcattggccccctgagcccatcttgggctctatcttcttcctgaccctgaccttcacctgagtgttccctctgcctcatgatctcccctccaccccacccccaccaccttcccactggctttatgggagtcaggtgtccttctcacgtcccttcctttcttatttaactgacatcagtcaccttcgaatagcattttagcctttgaagtcatcaggctcattgatcttcagtggcagcttttattgagcactagagtacaggacagcagaggcaacacagcattgtggttagggttcaaatcccagcaaggcatttcacctcaagaaaccttggcttccccatctgttaaatgggaattttaatagtattaatacttcataggatggtcgtgaggatgaaatgagttaatgggtgtaaaaaccttgatacagggccaacacatcataattggtcaatatacgttaatcactattgttatcaaaaggagaaagagtagctgtgcccttcagagggttaagggtttttgttgtagctgaagaggtggaacatggcattttgaaacctagtttctcacatggctaagaacatacctttcaaaacagagcaagcaatcagttggtcctgactggaatgcagctagtctgggaaggcttcctttgtgaggctgaatgaggtgtgtttctgtgtaacattgtaaggaggtcatatttgcagcctgggtcaggggaaagggtacatgggcttaatagaggtacttgctcagatgctctctctctgttgcttgattcactctttcccttagtcatggccctgtccaaacccagtgaatcttatccttcttgtccacagggaatttgccaaagagagagagagagtggagaaccgaagggctttcatgaagctgcggcgccagcagcagattgagcgtgagctgaatggctaccgtgcctggatagacaaagcaggtaggcctggggggctgcaggaggctggtgagtgggctgcagagacatcagggccggcccctcactcccaatgctcccattcaaggggcagcctagacaagacaagagagacactctggatgcttggttggctcttaaggttccctgctcatccgactttcttcctctggggtctaactgtcctgtctatcaaactgtcccaacaccttaaggcaggcatcttagcaaggtgaactgagtaaaagtaacataacccaatcctggagctgagactgggctgatggcgttttgtaataccgttcctggtgctcacagcagtccattcattcagcaaatatttattgagtgcctactttgtgccagaccctgttctaagcacttgggatatggcagtgagccaaacagtcaaccagctcaccaaagctcttctcttgtaaagctctctagttggctaaggcagcgataaacaaaataataaatgagtaacttataagacaatgataaggtggtaaatatgatgggaaaactgatcaagttaggggtatgggatatagaatgtgccacagttttaaataggaggtcagggtgggcccattggtgtgtagacttgaagaaatgaaggagtgagccagaagaagttctgggagaggagtatttcagcgccaagtacctaacatgggagtgagctggggtgcccaaggagcagaagggggaaggaatagggaggaggaacaggagacagagtgacagctgtcatgggggaagtgggcagcaatcgtgtttgaccttatggggccttgtaagggctatgggcttcactctgagtgacacaagaaccatgggagggttttgagcagaggactgacgtgctggccgcattgagaatagaccatagaaggataaggctggaagcagagggactagtagtgccgccatctagggaggagataatggtgagaacaggtgttttcctaagccttgagctgtcatcagttcttaccctgtgactcaacattaggaatagttctcagctgcctgtgagaataggtccaaacctatcatgatttcattaacccacagagccaccagattcaagtttggctgtggctcagatgcttatgaagggcatcaatcacccccatatttgtcaataaaagggacgggtttgctttctttattattttaaaggttggtttgcattagtattatatatcttcattttcttccagaggaacaagtgatttcttaaataaaaactacacgtatgacagtatcttttctctattcctaatagaaaacatagcacaaaagtgaggtcacagaggaaaaatttggagtttgatttagtgcttagttgcttgagccttattcttctgtaggagctttggaatgacactataacacttactgtgactgccaacacacaaaaaccctctctaagctctgcagtcaacttttggtgacctccaagggttgagagggtacctgtatgattgcgatctgcactcccttgtagcctctggaaacatgagcaatgtgtgttgactatacttgcatttcgccctttctcctccaaggctgttgtgtagggatgaagtggacacaaatatcccctaccgcttcccagaatggtaactcaggcttaccatgggaggtcaagcagatttgcctctaggccaggaaggcagcttgatggtcccagctgtccttggctttctcggcggaggagccatctgacagaccactaagagagctggcagcagacccaggaaggagcccgcccagccttggccaccccacacaggtcaggtggcagggtatgctgctcgctggggctctgcttttcaaatacttgcagaattccaaggcttccctttcttccagttggcaaagccagctctctcctccttctaagaaaaaagacgcactgcgacgtcaaagtgtgcttcctggcccttccctttacaaatggagcgccagtgaatcagagacagatgggttacatttccctggaaagacactcaagttctaaagcgaacttggcaaaaggcatggggtgaggaggaagggggatggcttcagcaaatccagagcccttgagtgcttcccagagatctcggcagcaccacacaccttccatctgtcctggggggtccccagatctgctcaccccaaagcccagacactgtgcacagcaaaagtgacttgactgtctggctaagataattaaagttgctatgaggtattttaacaagttcctaatttttaaatgatgccctccaaacacgtgctataaaatgacttaaaaaccctttatgtctgcaggaaggagtgccccaccaataacacttaacctgttaatttagcgttttgccagaggctatacttaaaaaagaaagcaaacatttatgactttgtaataatggccatccggtgagtaccatcccagccttaaaatgttcccctccctaggaaatacattatgtactctcagttttatctgtagctggaattacggtaatgactttaacctctcctactgtccttttacttgttaaaagtgtttaaattaaaccattgtttagtagggtctgaagctagctttcccccagcagctgggatcttagggaatgtttaacgaggcctctggctccctggcctatgggttgagctcaaactcatcccgttactcctcatagggcatgcaggatcccaccagacttgggagagaagggctattttgttgatgcacttggagggatgctagtgaggtttggtctaaaagtcttagtagaaaatattccccttcagatgatgacacctcagtagagtatgggactgctcctggggacaccaagtgggaagagtacaggggactgtctggtgtcattttagaactccaacaagcaaatatattatttcatcatcaaccagtccttcagttctctaacaccaactaggtgttcaacaatcagttaaattctaacacgaaatactacctcaaattagcatagaccccacaggttaaaggctcggttccacaggactgcccccactttagatggcagccaaaagtgggatctccaggcaaccaacatatctgcctggctgactacaaatctggggttcccacaaccatcaccccactccccactggttcagtaatttgttagaatgactcacagaactttggcaaaaccatactgtattataaaggatacaactcaggaacagcccaatggaagaggtatatagggcagggtatggtggtggggagcacagagcttcatgtcctctctgggaacaccaccctcccagctcactgatgtgtttaccaacccagatgcctcctgaaccccaacatgctgaaccccaacatttagcatgcccatcattacataggcatgctcgattaaaccatcggccattggcaattaaactaatctctagtgcccctcctccctagaagtgggagtagggggaggctgaaagttctagcctccagtcctgtggctgtttgttctggctacaagctacctcctctaacctatccagggcccctctctcctccatgagtcatttcattagcatatgaaagactgccaggaaccagagacaaaaaccaaatactttttaaattttatcttagggacaaattcatgattggcccaagcctctttggctcaggctctggtcaaccaacaaaggatggaagccatggggacaggaggaaacccacaagcccccctcctgtctccaaggacctttgggcatcttcctctgactcctcctcagagacatagaataaagcccaaaacatgggctcagctcctgaatgagggtgtagatgttataacccatggccactggcaagagaagctaaggaagctgttgctgctagaagttcaaggagttaggaaagacaggaagctgggtggaattaaaaacagaaatggaaatttttcattcctatcaaggattttagcttcttcctctcttctcacaggtatcctcctgaacaggagtatcagacacagagccgattgttaccccaaacaccccctccccgaggcttcctttctgttctcaggagctctctgtgcaccctctgtgacacttgctttctttctgatgctggtgcctgtgacaggctctgaactctgctctctctctgttgccctgagctgaagttgtccctgagggattttaatcttgcagaataatttggcatttacagataatttaccaaaccatttgtttccatatagaggaagtcatgctcgctgaagaaaataaaaatgctggaacatccgccttagaaggtaaggaaatgttctgatgccttattccagttgcatttgcccctcttaggcgatggcaatctctgttattcaaaaggagagaaagaaatgaaagatggtgttctgggattggaaatgagagtctttctgtcataaaatccctcatgctttaaaatgaagggaattgagtcacagatttaaatgccttttaaagtgatgaaaatgaaacccaagagttgctttgttccagggcatgtgattgatactgagcaaggaaaaggccatcctacaaccaatgctatctaaagggaccttctcttaaaatgtgtggggatcaccttgagaccactttcattaccaggaagtggcattgtagatgaagagccaggacagatggatacggagtgcctgtttacctcctgcatttagataggctctagcatggcttccagagctcttgtgttgcaggaaggtgctggtgagcacagcatttgcggtccggtagacatccgtgatttctgttaccctggctcaggtattaaaggcagatagatgcctgtgttacaggggcctcacacaaggcatcttgcctgcattcctcaaaattttgtccagaatggtctgggtgtacttgtggcctctcactggtcttccctttccctgatgcagtgcttcgaagggcaaccatcaagaggagccggacagaggccatgactcgagactccagtgatgagcactgtgttgatatctcctctgtgggtgagtggatccagttagatcttttactgctctgaatctcccacgaaaaggaagatcctgtcttttgagaagcaccacaaggagggaaagaatccaaagggtccagaatttaggaatgtaattaaggaaaagggtggaaatcgaatctagattacaatgatttatttaaaaaaaaaaaaaaaaggacctggggatgctatttattcacacgaaacatgggatttagggctaagaatccaacccaagtttttcaggtgtggcagatgtattccatttgcagaagtatccaccctctcctgggagtgatgatgagaacccactatgggacattgttcaaaggatcctgaggacctgttgcttccagggacacggatgtgagatcttgaagccatttgcttaacaacagtagcccccacctacttccatcatgtgaaatttaaactaattctgattggcaattatttaacattatgtgttccatctcaggtgctcctagagattctggctgatggcaggtttttcctccccagaaaaagggaaaggtcttgttccatcctcaaaagcagaagagacttacaaagctcattgctgttttgtgccaccagtggtagaaatatcaccagtgtagcagaagaattccagtgcttgaagctattttaaaaggaaagggcagaaagaagcccaatctgttaaaaacataaacacgatcctattaagattcaagacactggtgtcctgtctggggaatctttccatttcttaggactgagagtgcccagagaggaaaaacagggtcactgcctatagaaactactgagcccgtaagatggggattccccacacctgcaatgtggcagtcaccttgccctgggactagagcagcccatcttgcccttcgaatgctccctggcccggaccacaggatattttgcagtctcattcttccttacttctccctcttaggcacacctctggcccgagccagtatcaaaagtgcaaaggtagacggggtctcttatttccggcacaaggaaaggcttctgcgcatctccattcgccacatggttaaatcccaggtgttttactggattgtgctgagccttgtggcactcaacactgcctgtgtggccattgtccatcacaaccagccccagtggctcacccacctcctctgtaagtaaagcctctctctaaagcctcctctgctggtccccatgtggggcagcttgatgtgtgtgtgaacgcaagacagcaaagcaccctgctaggaaaggttctacctcttcacgctgtgagggaggccacatcgtcctcaagggggctggagtatctcatgactgtttccagctttcattctttaggtaaacagatcattgttgatgaatcaacaagatagcataacgttatacctttgggtaccataaagccttcacttcctttcttaaggaggctcaatgatcaggagttttgatcattgaaatcctgggcaggaagttctcagggcaatggagacctcaaatagaccagaagaagagcttataggtcagctccagattagactgccactgggtgtgagtgagggtcaggggcctgtccctgccaggcatgtagggaggaatccagctctttgatcaaagccatagtaagtcctctctttccccctgagggccctctaccatataaagaccagtgacaggcctacctattgaaagagagcaatgctgatctcttgagtgcacctgggactcggcctgggtcagagggtactcggacatcattaggctctgtccagccctggcctgatgtggccaccgaatgtcctgacgtgtgttgttgtgagatcctctgtaggtgggtgtgttagctgagaagtgcatgagcccaccccacatgtggaaccaatgctctacttttaatacttccagactatgcagaatttctgtttctgggactcttcctcttggagatgtccctgaagatgtatggcatggggcctcgcctttattttcactcttcattcaactgctttgattttggggtaagtcctcggaagcctgcctctgctcctgcttcgtgttgatatgccctggttttagataagcagcttgctccttactcagcatgaggcactgaaatcagaatatgtaaaagcggaatagataagattagctaaagggaattcagaagcgagtgaatccttcccatgcagggtttgtttgtttttctgagctctttgattttcaatatttttattaaaatgtaacacatacattatagagggtacacttaagtgtatagctccgtgagagtttacaaagctacccatagccagagttttgaaccacttattatcttgggggaagcctgaaaaggacaaaggacttgattttagaggtggttccataggaaagagaagcttatatatttgtttttctacttcagtttaaaattgggataattatctagatagaccctcattcaaacacacacacacacacacacacacacacacacacacacacacacacacacacacacacccttatattagcaagtcctcacagagaatatctcagtcagctgtttactttctacatagcatggatatctaaatgtatacattgtgctaacacttcaaggtgctttcacgtatcttttatttttgtcccctgccgcttacaggagtcctatgaactacattacatttcaggagttagccttcccatttacacaagaataaatagaagctaccgtgcccaagttcatatacccagttagcagcagaactgggtcgcagaactttgggctcctgaaccacttctctttctgtcaatcccactactttttctgccaaagcttcagttaggtgctaaagattttgaacacttgctaatctacattttaacttggaacatatggttctgagtacgggcaattttcaggcataacagctagtgagagatcactttaacctcagtttctttgtgtccgtacctttcggcattgctgtcaggattaatagttgttgtttctcctagcacaatatctagaacatagtggacattcaataaatatataattaaaataaaagaaatagaaatgttcatctgaaattgctgcatcttgcagcaatcagatcctacatcaccatgaactgtcacattgcgggatgcaagacctccatgactgaaagatatttattatatcaaggaccaaaacattcttgttagcactaaattttaggatgatgagagaatgtagaccttctctgagatttctgtattgagaagcaacttgtactaatcagtttccttggtttgagtaccactcctttgtcagagcagcagaagcagcaactggctgttgtagttttcaccaaggacaggagtcagtaagccaatctacagtgtgaaggattaaagttaggaaggggattggagagcaatgggagagaggtggcagcttcccacataggtagttctactgaaggtagggctggtgggagaggagagtttttatttccccatcccccactgagagctgttgatggtgtgctgggcgctagaatgccccctcttctcctcttcctcctcctctcactgtggctggcattgcctctctaggtcacagtgggcagtatctttgaagtggtctgggcaatcttcagacctggtacgtcttttggaatcagtgtcttgcgagccctccggcttctaagaatatttaaaataaccaagtaagtgatcagaatttggacttttcccaatgtctttgagagtagaaccttttttctgccttatattttcttccatcttctctttcccccttagggggaaagtatcccttccctgccccaccccttttctattctttagctcttcctttttctccaaagattaaaccaaaaatatctatggtgccacattcccaaggggagcaataggtttctgccctctttacttcctacaaatatacaaatgcagcttatttcatagactaccaggcatatgctgagctgggcttggtgggtgacttggtatgcagtgttcacagctgtcacattgtctgggttttgtaggtattgggcttccctacggaatttggtggtctccttgatgagctcaatgaagtctatcatcagtttgcttttcctcctcttcctcttcatcgttgtctttgctctcctaggaatgcagttatttggaggcaggtaagtgcccagaagctttccatccaaaggaggctcaaaacccagtcgtagcctgtgttgggctagggtcattaactcaatcaccatgttactatcctgtctgcctttgcccatggcctgaattaaccactgagtgagttcatatgtggagtaaacgtctctgcttttattcctttcatgctgtacagggttctcattccggggacccatctctttggtgctgtccctgaaatgtgcagcgtgggcacattcttcaaagtgcatagtttatcagtagtagtcactgttacagtctttgtaagttatgtggaatggggaaaaagtagggaagaggggggttgtagaagaaaggagaaaagaagtgatgaaagctgtgatcttggggaatggaaaacttggtatgtgagattttcatttcattattttctctaattttgtttttcaggtttaactttaatgatgggactccttcggcaaattttgataccttccctgcagccatcatgactgtgttccaggtatgaggccagctgacggttcacaagtgctgcatggggtcccttggactgcacactgcaagacaaggatgagtttcaggataattctgcttttcctttccaggctcctcccaggggattgaggcactctttctagttgagcggtcattactacaataatccctagaacttctgtggctttgttcttaccaatagtaagagagctctgttgggaccatctcactgtccttctctcacacctgtgagtttgcaggagacactgagtctgaggcattcagccaagaatcacatctatggttttctgaaatctaggggcatcttctaacccatttaatgaggtatccattaaatggtgtttatttaacaaggtctcttttccatccctactccccccaaaactcaaccgtttaaatcatggggaaaactcaaaatcaatagtgtcttaggcctaaagaaaaatactgtttggccagaatctgaggttggaccacaacccgtttcctgaactgcagcccacaaggctctttccaatcatgctgctgttccagaccctgtatctgggcagctctgaggacagttaggtaatgaccagaccacctgatctgtgtcatttccacaaggaccttgcaaaactggaggtgggagacactctgtagttggaggaacagaatctttccctttgatgctctccttccattttcaatgcctaaaattcttttccatacgaaaaaaaagtttaggattatttatggaaatgactttttttttttttaactccctggcaagattgtcaagcaagggggtagatgcaaaagacccaggcccagaatttgcccttggcattggccccattttctcctccagcccaggtttctgatgcgcctgtcatttgctttttgtagatcctgacgggtgaggactggaatgaggtgatgtacaatgggatccgctcccagggtggggtcagctcaggcatgtggtctgccatctacttcattgtgctcaccttgtttggcaactgtatcctttttaagatgcacctcctcaagctgcctgccttcctggaccagcatttgaggaggcattggtggtggtggtgctagagcttgggttggtgggacaggggcgtggacattgtttggtgtactaaagtaaataaggatcctgatctgaaggactttatgtactagttgggtaaagaatacaaacgtaaacaagatagagtattatccaaatctgtagtgtatgcaaagaataacataggaggctgttacattgaatggttggaggtactatgagctggggaacattagacaaagcagagatcactgtaggctgaaagaggcacattataccactaatgaattaattacatgctaatgtagaacagagcctgccacatagtaagatcccaaaaaattagtgttaggattaatgctattactgctaattatagcaaatatgtattgtatttgggctatacgtgagaccttaaactaagtgcttcataggcactatttcatctaatccttacaagacagagaaaaaaatatctcgagtaaaataactactaaattgtaaagggaaactaaagtccagttccatctaactccagtgccctatccaatcacaagatctagaacaggaaatttaggttttaatcccagcaactctgtgtatcagctgtgtggccttgggaaagttacttaatgactccaagcttctattttttacaactgaaaggagaataataatatttatctcctttgttcgtggtgaatactaaatgagataatttatttgcatgtgatttataattacaaacttctatacaactgttagatgcttttggggagttgggttggccgtgaattgggattagtagaacagaaaggcagaaccatgggacgcaggtgtatttttgcattttccatagtttcatagagaagacatgctgttttacgttttctgccctgaaaacatctagaggttgggacagactagaagctcaatatgagaaactcatgaaaagaacactaggcagtaagtcacagacatggaagctccatgtgtcccaatggcaccatcattttcctgatattctgggggtagtcagagctgggctttgatgctagaacagttctatgttccacaacacataggctttgaagagagttggaaattgagacttcaggcactagagtatggcataggaatagatttcatagtgaatcatgtctgctgtgtcacattttgttaaatgaaatgtggaacccttcaggaccctcacaagaagaatgggagaagttagcatctcattattgggagatgctcagtaacaggggctctggaatctcattctttttgtcgttaaggacagaatggtgtgacgcccattggtctaggtaggattcaattccagcctcccagaatggggagatgagctcccatactgagctccctacacatctcgttcagtgattctcttagttgttattgctatgggtagaggccacagctgtctaaagaccttttgaatgtggctgaacaaactcaaagtgctttttctgttcccttactcatcaacaattaatgcagaagacttctgtaaccaaatgcgtgggtttttttactcaccaacaagcaagcaatccggcagtggatactaattggtgtcctctaattcaattctgacgctatctacctggagatagcatcagatcccacaggtcgatggctcaatccccaagactgcccctgccttacgatgacgattgcatgcctcaggttactttacctgtgttttgaaggctataattcggggttcccacaacccccttcctgggtttggttaatttgctagaatggctcacagaactcaggaaaacacatttactggtttattataaaggatattacaaaggatgcagttgaagaggggcagagggaaaggcatggggatgggcacagaacattcatatcctctccgggagtgccagtctccaggaacctccacatgttcagctatccagaagctctccgaaccctgtccttttggattgttatggagtcttcattacataggcatgattgattaagccattggtcattggtgatcaacttaaccttcagcccctcacccctccccaggggttgtgggggtagggctgaaagttccaactctctaatcatgccttggtttggtgaccagcccccatccagaagctacctaggggctaccagataacactttggagtttctaaggatttaaagagttgtatgccaggaaacacagttaaagaccaaataataatttttcacagtatcgtaattttcctcaccccatctggcccccagatggtttgattcaagtatttctttatcctgggtaaagagatgatatgcagaaggagggaagaaatatcctctttctcctttcaacagagttgtacaacatctccctctctgttctcacagcccctgcttaagtgactcttcagggtagcttctgttcctgttaatgtcccaggcaggaaagattatcaggtggcctctcagccttgctgaagacttttgcttttcttatttgcccatccttaattcatcaccccagacacgctactgaatgtgttcttggctatcgctgtggataatctcgccaacgcccaggaactgaccaaggtaagcattgttttctggggatctgatgtttctctagtgccattgggtaccctttggcctttggaactctctcccaaagtctacattgtctgactcaggcctgccaggaaggccctttctggaaacttctggacagttggagagccacacacccatgacggaaggctggttcacttttattgagtttggtgagcctcaacctagcccagggggcctcaaggaacacagaaaataacatcttaatttctatgagccctcaaaggagtcctttccaggatcatcatggagagtcaagaaaattctaaagccctggttttaagttccacctctgctactgcaacctgcggctgtgtgacctgaatcacatgacttaacccttttgggttttggtgggagagagatcagggccatcacagttcctgggctatggctgttgggatattccagtaggcaaaggtcattttggggaaatttcaatgaagccagatactaaatttctcacagaactgttcccttcttttctctgattaatttccccagtgtggggaggtaatattaacagcagtgggatggtctacagagatgagtaaaaacccttctcttcacagagggtgccaatttggttttgggcagaggtgcatagcatcctgctgacatttctgagcttcttccatgcattctctgatgatctttctacatccttgagggtcttcttatctgcatatatggtaggaaaaatatcagctttagtagctgagaaactgggtctgagtcccacacctgccattggctgtgttggctttgcttggactcctgatctctattagcattggtttcttcatgcatgagacaggaatgccatatctgcattgtgtaccttacaggattactgtgaggatcaagtaaaataacgtctgtgaaaaccatagcatgctctgaagatgtatgtgctcttattagctctagtcattttacctgagctggttttccttgggttcatcacatagaggggacacttgcaggaatgctgctgaagggatgagatcttggcctaagcacccacttagctgtgcaaagaagacactacaatggggcactcagcctcagcactttacttggcggggtccttgcctggaaggcccctgctccatcacttccagacactgtaggacatctgggaagtgtcagctcctgccactgacctccacagccatagccagctccactgagggctaggggttggggtagacttctcctggttctcatgagcaacctgtggatggctccaggatggagacagggattgctggccacgctatagctgtgagactactgactcccaaggggcctggcctctggccatcagaagtctctgagccaacctaacatctcgctgtcttgtttatcctcttcctgtgtcttcctcacttcacttggtattcagaactcctccttaggagagcagccaagggaagctactctccttcctggggatcccaggcaaagccatctctgctttgtgtctaggatgaacaggaggaagaagaggccttcaaccagaaacatgcactgcagaaggccaaggaggtcagcccgatgtctgcacccaacatgccttcgatcgagtgagtcagctgcccccttcactgatccctgagctcctgtgctaacagccaattcatcaactcacagaactattggttataggagtgtacctactacatgctgggaactgttcctgagaatacagcagtgagccagacagagtctgttttcatggaagtgttatttcagtgagtgagatagataataaacatgcacatcatttcagatagtgacaggtgctataagtaaatgaaacagggtcctatggtggagaagtacaggagctgggtgggagcagcttatgtcaagccagaagggattctctgaaggggagctgtttaagccaagacctaagtgtgtagatgacagtcatgtgacattttgaaggaagagtgttccccagcaaggttcagtgtgactggtgtgtaattaatgaggggaaatagagaaagggccagggagggggcaggggccaactcggaggtccttaaagtccaggtggaagagtttagcttttattctagctgaaatcacaagaggacttcaagtggaaggatgaataggatatgatttacacttttaaaaaggtcactctgttctatggagcataatggactgtaggggccagagtggaggcagggaaagagtctgctctcagagtaaagtaggtgagaggtaatgggggtttagactagggtgggggaagtcaaggagatgagtaatcccattcagtcggtagtttggagagagagccaataggatgagctcatggattaaatgtggcaggggtgaggatgaataaaagggaagaaacaaaaatcgatcccaggttttaaggttttgtggactaagcaacgggttggggagtggtggtagttactgtatccctggaaactgttggaaatctaaagttcattttgagatacttctaaggcatccaagtattgaactggctattggttacctgcatctggagctcagaaaagtcagaattaaaacaatgattggggaaggttgttcgcatttagatggcatttaagtcattagtatgggtcagatgacccagagacccagctgctgaggacagaggctgacagcgctcctcctgcttaagaggagaaatcagctaaggagaccaagggagtgcagccgggaggcaagagaaagaacaggaggtatagtgtgctggaaacctgtgaaggaaaactgcaggaaggaggagtgggtgccggtgctacatactgtagaaaaatcacatacaatgaggaacagaaaagggaccactgcatatggcaaaatgaaagctgttagtgaccttacaagagccattttcgtggccaggttggaacagaacccagttgaagtggactagggagagaacaggatgtgataaaggagagtggtgagtccactgcttcagggatctagcctggacctgtggtagagctacaggtagtcggcctgggccctgcgtggcctggtctctgcgtggtgacacagaggggtgttggagaagaggctgggaagtgaccatagaaccacataactcctgttgttgcatcggggcctgcatgaggactgtgtgagtggtgagtggtgctggggcatctgtgggagggtccgagacccccaagggggtagaagtctatcctggcaatgaccctgtcattgttacttgaagctagtaagggaagagcccttggttggctagagttccagtgaagggctcccaggcagcctcttccttgccttgtggggtgtgccagggttgtgtgttgaagcgggggacctccctcctgcacggccatcatgttgcctttgcctttcgtaacaaatgcctggcccctggatccctcttctgtgagtgaaagagaaaaattcccttccaaatcgttaaaggttgatagggaaatgccaaagattgatagggaatattcctctctggaatattctctgggccttgagtaatttctactccaccttccctgaactcatgagtttgggttaaaaacacatacacacaggtatccaaaaatgtggatgggtaggactggctgtcacttaggagtgggtggttctatttactgagatgaggaagcctgggggagaagtgggtttagagagatgtgagttgggacaacgcttggcccagagtagaaactcactatttctggaatgaaagaatgaatgaaatgtgggtaggcacaggcagggccgtgggaattgagcagagtgtgcatcagggcacagtgaggtggaaggacgtgctgcaaacatccaagaccagcagagacccgggctttggtgctgtacatgtgctgtgaggttggcgttgctggtgtgagccacctccgggtgtgtgtgccccgctcagctgtgtacactctgctcaggtatgtaccctgcacagatgtgtgtgccctgcaaagacgtgtgcaccctgctcgtgtgcgtactctgcccaggtgtatgtgccctgcacaggtgtgtctacattgcttaggtgtgtgtgtcctacataggtgtgtgtcctctgcccaggtgtgtgtgccctacacaggtgtgtgtgctctgcacaggtatgtgtacaatgctcaggtgtgtgtgcattttgctcgggtgtgtgtgccctgctcagctatgtgtgccctgcacagatgtgtgaacatcgctcaggtgtatgtaccctgctcacgtgtgtgtacactgctcaggtgtgtgtgcattttgctcgggtgtgtgtgccctgctcagctgtgtgtgccctgcacagatgtgtgaacattgctcaggtgtgtgtgccctgctcaggtgtgtgtacactgctcaggtgtgtgtgcattttgctcgggtgtgtgtgccctgctcagctgtgtgtgccctgcacagatgtgtgaacattgctcaggtgtgtgtgccctgctcaggtgtgtgtacactgctcaggtgtgtgtgcattttgctcgggtgtgtgtgccctgctcagctgtgtgtgccctgcacagatgtgtgaacattgctcaggtgtgtgtgcactgctcaggtgtgtgtgcattttgctcgggtgtgtgtgccctgctcagctgtgtgtgccctgcacagatgtgtgtacactgctcaggtgtatgtgccctgctaaggtgtgtgtgctctgcacaggtgtgtgtgccctgcaccagtgtgcgtacattgcttaggtgtgtgtgctctgctcagttgtatatgccttgctcaggtgttcatgccctgcttgggtgttaaggcgaaactgctgatttccgactacactttaagtgcaaacatggctatccatgaagaaacacagaagaagcactgttaaaaagcaaagtgcctgagtgctagttatatttgtctcactaatataccctgtgacctcagagagaaaaccactccgatctcagaacctctatttcctcatctttgaaatgagaagaatgccacctgcccttcctatcccacaagggctattgtgaggcgtacacaaggtctcattcatatgagttggagacatgtggatgcttctctgtatgattttaggtatgaatgtaagtttgaatctgtgcatatgtgagtagagagaatgctcatgcttgtgtgtgtgagagaatccttccacgtacgtacactcttacacacatgcttctggatagctggtatttgaatatttgagaatttgcaaatagatggtgtgatgtgcttttcctagcagatgtgcatgctgcctgtctaaagcgtacgcttctacttctgtatctacccatgcttcttggctctcccgcccccacctgtgccttgttgcattgcaggtcactgatgctgagggttgtattcagttgaggagctcacaggcttctccacaatgatgtctgcatcagtgggtgctcctgggtggccacacacatgtgcactgtgcatcttccagacacccagagtgggcctcagaccaactgcctctgctccctcagtcccacccttgtgtggggctcttctgcagacatgtgaaagatggcagttgagggggattaatttgcctagcatgttctccgtgggtgggcatcagctttatcaggaaaggatcagcatttgccaacatcccaggtccaagcagggcccactgggctggactgagttcatcaggccagtaactggggcaggctcactgcaaggatagcccagatgtgttgtcctctagctgagcattgaacctgtgctgacagcttatttaccaggcatcctgtctgtttttgcgggaacagttcatacgttgccattctaaccttgtgtttgtaaggacacaacatgcatatggaagagagttttctctgtacaaggctaagaaggtcaatactctgctctgcccaggtgaacatagaacagggtctatggccagggcctctgcgttgctcaaaggcagaggtcactgctcacatcctggagtacatggatggtggcctacggaaagatggtgctgcctctgaccatggaccacttcgtagccttgacatcgtgcatggcagagcacttgctccgctgcatgttttgtgaagctgggtcaggttctgctatgggagtcatgagctggggagccacacccaatgaatgtgctatgctagccctagaaatgactcgggggaggggaagaaaactactcagcaacatctacaggatttccaaaataggaatctgaaggatgtgtaggtggaagtttgcgtgcctgtgaggcatggtgtttgagcatctggagctgtggatcatgtgaaatggcataacctgtgtgcctctgcatgtgtgcttcaaaaactagatccatgtatttgcacatagcaaggaatcgaaagtcactccattggagaatcgaatgtggggagtctacagaaggcaagcaggcacatggagacctgatggccacacagaggactccctgtctccctctggaaatctgctggtggctgtggggcttgaggttcctagaggttggggtgaactgaacctgtccatttttcttccccagaagagacagaaggagaagacaccacatgtcgatgtgggagccacgcagcagccacctgtatgtgtgtaccagtttgcgtgtttgtgagtggttacgtgtgggcgtgggacaatgtgtcattgtccttgccatagacaaagtggcactgggtgtgcatgtcagtgtgtggcttggtgtgtgtgtgtgtgttccgttcacatgatctgtggatatgccctctgcacctctcaacatttgcttatatcagcgtgtgtctacctttgtgaactgtgtgtttttcgctcttcagtctggcctgtgagtgggtatatgttgtgttagtgttggtgggtatacctctcacgtaggtagttgtgtacagctatgtgtgggcctcagcgaggatgcgtgtgggtacatgcgcgtgtccccttcacagtttgtaggtgtgcgcccacaggcacaggctcagggaggaggtaacttcccctccgcccagcgagccctctcccatgtgctctcctgcacttgtcatgttcatgatttcccgctgccccatgaatgctcctctaggcccctgggctgaaatgctcgatcgcagttttgagtatgagctgctggtggtctctgcacttagccttctctggcttttattagctattgtggaagagactcctagcactcttacttttgagggtgatatcaagactttttgtaataagtctgcctggcactcttcttacccttcaatggtatctgaccatttcagccctcattatcccgggctgtaacctgagagggaagggagatgagggggagaggaggaggaaagacctttgaccttgaatcaagggccgttgagtgtgtacaagcagatgccccgaaagcaaggagagcaggggagtgaagacgtggtaagcctgtggatggctgccccagcaggccctggggacttggaactcctcccagggttgatgcctacccagccctcagctactacaaagcagggattggagcagaaagtacctgggctgggaggcacctgcctgatgagctcctcacgtgtggcccgcctgctcctcgcatctttctgtgcttcctgtctgcaggtcctgggcactcccatttgcccccaccatgtgtcctgccctctcacatggcccctgtggccaccctccctgcctgcagcttctgggctctgaccgcggccctgccctttccccttggcaggagggagcggaggcgccggcaccacatgtccgtgtgggagcagcgtaccagccagctgaggaagcacatgcagatgtccagccaggaggccctcaacagagaggaggcgccgaccatgaacccgctcaaccccctcaacccgctcagctccctcaacccgctcaatgcccaccccagcctttatcggcgacccagggccattgagggcctggccctgggcctggccctggagaagttcgaggaggagcgcatcagccgtggggggtccctcaagggggatggaggggaccgatccagtgccctggacaaccagaggacccctttgtccctgggccagcgggagccaccatggctggccaggccctgtcatggaaactgtgacccgactcagcaggaggcagggggaggagaggctgtggtgacctttgaggaccgggccaggcacaggcagagccaacggcgcagccggcatcgccgcgtcaggacagaaggcaaggagtcctcttcagcctcccggagcaggtctgccagccaggaacgcagtctggatgaagccatgcccactgaaggggagaaggaccatgagctcaggggcaaccatggtgccaaggagccaacgatccaagaagagagagcccaggatttaaggaggtgagtgagtcacagggctcccagatggatggcacacaggctgctgttaggtgttcctcaatataagcctttctgagctccagtttcttctcctattataaaatggaaatgatgctgacacacactttgtgaggtatgaataaatataacaggcagtgggctctgtccccccaaaaacgagggcctgttggaagtgggtcgtggatagaaggatgggaataaggcagtggccatggcttgtgggtcttagcacctctctgcctgtctggttggggtggaaggcagtggtggccttgtaccttccaggctgcctgagcttccccgccttccccttgtgccaggcacacctgccatttggggacagcgtctgagcaccagctctctcttcctctctcttcacaggaccaacagtctgatggtgtccagaggctccgggctggcaggaggccttgatgaggctgacacccccctagtcctgccccatcctgagctggaagtggggaagcacgtggtgctgacggagcaggagccagaaggcagcagtgagcaggccctgctggggaatgtgcagctagacatgggccgggtcatcagccagagcgagcctgacctctcctgcatcacggccaacacggacaaggccaccaccgagagcaccagcgtcaccgtcgccatccccgacgtggaccccttggtggactcaaccgtggtgcacagtgagagcacagtccctgttcccctccacccccaactcctatcccatctggggctggggccatgacaataaagccacatggaaagcaccaccaggaggagtaaatcatccttcaagaagtaaaaatgagtggcggttttctcccagtgtgcagaacaaaaataagctagcgttctcttcatcttaaatttttcccataaaatttccccaggcttgttcctgtgaccaccctcaagtcttcagagtgatcacttgtgactttgtgcccagttagatattcagctgtttgctttggtgcatgaatatttgatggtgttgtctggggtctcccaggtgctctgctgccctggcaagttagggagcctctgatggagtggaccatggctctgctcactgagtgatcttggaaaaatctctgcatctcttgaggcctcagtttgtcatctgtaaagtgagagcattgtactagatgatctctgaggcctttccctgtactaacattttatatgattctattgctcttatcaactctttttctcctaggagcttttagccacaagttctccccatcacagttcccttaggcaacaaatgttaatcaatggtgtcctaaagggaaacacagccaaaaaaaaaagcacttccccacccctgccctgaccctacatcccatccctgtattcatcctaccccttatccttgccctgaccccataccccatccctgccctgaccccacagctcatccctgcattatgaattccacaccttatccttgccctgaccccataccccatccctgccctgaccccacacctcatccctgcattatgaattctacaccctatccttgccctgaccccacaccccatccctgcgctgaccccacacctcatccctgcattatgaattccacaccctacccttgccctgaccccatacccgatccctgccctgaccccacacctcatccctgcattatgaattccacaccctatccttgccctgaccccataccccatccctgccctgaccccacacctcatccctgcattatgaattccacaccctatccttgccctgaccccacaccccatccctgcgctgaccccacacctcatccctgcattatgaattccacaccctatccttgccctgaccccataccccatccctgctctggcctcatgatctctgtgcattaatcccacctgctgccccgtgatcactgaattgtgaccacaggattccagccttgctgttttcctctactttttctgtatttactctttcacatgaaaatcttttccctccctgtttttctttcttccatggctccctctccatttccgcatcttctctatagtcaacgtgccactgctacttcagaaagtgcaatctcccatgtccagtgcatgcttcagttgacttgggcatgtctcaggatcccagacccacagctcttttggtgtttgtttgctttaatacataagaagtgttttgggccttcttttatgagaaagaacataaagctttactctccctctgttgtaattccagagctagtctttggtcttggtcataggtaaaagcatgtgataggaaggcttttggatacttcttatgacttactctttaggaggcctgggcatgggccaggaccaccgaggtccactgctgacacagggttccagggtggagtcattcaatgagcagggagcagtgggcgagggtgactggggccctttccccactgtgacagcttcagcctcctgccagtttaacctacaccgtgtcttgagtatggaaacagagcagcagctgagagctcccctcgacctctggctccttcgtcctcccaatccttggatgcagtcatggacctatactcacatgaatattgcattctcatttctacattaaccatggccgagaaaagcacagccagaaagcctgctgcaaacagaatcatgatttcttgaaatcttccattgcagggtgattcaatgaaaggctataggattttgaattgggaacccatactagctgtatgaccttaggaatggtacttaaattgctagaactttagttttcccatctgtatcatgggagtaataatacatgccactgagggtatacccctcagtgggaaaattcagtaagtgagcatgtacaaagaatccagagtttagatataaaatctaaaccttgtgaattttataacagaaacatcatgttgtttatcagactgtaaaagttcaaccttaaaagtggaaacatgatcatggtcatttatatgacataaaaggttatttctcataacatttggggagggtaaaaataagaagagaagaggagtttaactcagtgtcaggtagtaaatacccccagtgcctgcagggcaccttgttagggacatccctggagccctttctcctcctctcctttcatccccaactaaacacaaatggtgccattttcacatgcctcatgatttctgaagatttcaacgtgttcctcttgcagttagcaacaagacggatggggaagccagtcccttgaaggaggcagagatcagagaggatgaggaggaggtggagaagaagaagcagaagaaggagaagcgtgagacaggcaaagccatggtgccccacagctcaatgttcatcttcagcaccaccaacccgtaagccaccctcgcgttgctccctctttagtgctagggtaaacggccaggtgtgaggcagggcagggtgaaggggagaggaaggatgggggcccagccatcttcttaagccttcctggtggagcatggccagacattgagcatctggggtgccccctaagtgaggtgggttggtaagttagtcagcctctgaactctgtgcccatagctgaaagagtaacatcgacaggagaacatgagaaatgtcattggaaaggaactctttaccagtctttggtcagtaggtagtgtggagggaggaaggaaatctacttgagattttgccaccaaatattccagaagtggatagagccaagaatgtggagcctagaatgaccagatcacctgttggagttgagaattttggtcacactgctctacatgtggagttttgaaatggtctgctctgagcatgctactcagagcagaggcagggacatgaagtgggggtgacagagcggagtctggaaggttagattcaggaaagatggaatttgggaagagcgttccagcagggctctgggaagggagcaacctgagttaaggcatgtgagccatccatggctagaatgcagaatatagaatacagttactttaaccagaataacctggggctcatgaaaactcattactgctttcgtcaggaattttagaatcaagatctctttttatgttttttggttctttgtaatttccttgggatgtcccagtttcctttcagtgggagagtagacatcgagatacagcagagggtgctatgcagctgccctgagttggtaggctgatgctggctgctccccatggctcagacgtgtctgtggataatgtatcttggcttgcgtgctgcagcctctaaccaatctgattaccttcctccactggggctttaaatcaagggtggtggctgagaaattaaattgctctccctggcggcttcctttggcaagggcctggctgtctggaaggggccaatatgtgtatgtgggagtgaggagtaagggcatgggcgtggtggggagtgggccagctcagccatgcccactgcccgcaggatccggagggcctgccactacatcgtgaacctgcgctactttgagatgtgcatcctcctggtgattgcagccagcagcatcgccctggcggcagaggaccccgtcctgaccaactcggagcgcaacaaagtgggtacacaggggccatgtgccagcctctgtagtgctctggtgctcaccccatcccagcactggaggtgaaccgagatggtagcaaggtttctggggaatgagcaagggttggaaattgtccactcctgttcctcagggcgaagtatgaaccattcccagacaagccccttcttagcccaacatactacaaggctctgccccaaaccggccagggctctgcagggctctgcagccacccatgggcttggatgtgggtctaatatagggtcatggatggtgtgtgtgaagctggcagctgcagctccaccacagggggccaaggcctctcctggggtcccacgggtatgtgtcaggagacatgagggacgcgaggaggacaggagctgacaaggatttcaggtcccgagcctgaactaagggacaggtatgtgggcaattcagacccaaaatgctaagttctggccaacgagagggagcagccaaggagtggccactgggtcacatggctccagcagggcccatgcccctccttctggcatttctctctcagtccagctagtggctctaattccaagcctttgttctgagggtgcagtgggtgagggccagggtgggcgtgcacgagtgcatgtgtcctggcaggtgggagctcatgtagtagcctgttggccacacatggtcatttccttccaccatatgtgtctttcaggtcctgaggtattttgactatgtgttcacgggcgtgttcacctttgagatggttataaaggtaaaaacttctagagaaaacctgggctcttgggtttagatgggtcacctgtctgctccttaggctagagcccttcctcagtgttaccacctaccagccaatggcagccctcagtagagcttctgccgccccttctctggcctcagaatcctgaagaaatctgtctcagcaagacacggctgcgtggatgtgtttgtactgctgcaggcctgtggacatggcccaagtaggaggcaggcaacagatgtgcagacagggttggggcctgcactcccctccccagtgcttgtcttggctgagcctgggtgtgtgccaaggcaaagggctaggtagagatgagtcttcctgggcttcatctagtcccagccaccacaacactccatagtctgtcttgttcccagcctcatccatccaggattttacccatctgtgcatatgtggcaatgcccagtgctctgagccataaatgaaaggaggaatgtgtcagggttctgtgacaaccaaggagtctagtgaaccctgggtgactatgagatgggggcctcaggactcagttatgtggagaaagcctgctggacctaacctctcattctccaggtcctagcatagggttggttgtggagacagtggcagtgggggcactgccatgatgaacagagctcaggtcaagtgttgcccacactttcttggctcactgtggctgttcatatccttctgcagatgatagaccaaggcttgatcctgcaggatgggtcctacttccgagacttgtggaacatcctggactttgtggtggtcgttggcgcattggtggcctttgctctggcgtaagtgactcttttcatatttgattcccttccttcccctcttcctggagactccagttgatttgaagccctttccagaaatgcaacatgcagggtgatgccaaagaatgcccccgctggaaatctgctccccagtcgcccccagcagagctcctgagcgccttgcagctccagctcacgtgacctgagtggcagaacgggggaagcaggagtagggagcgtcaggagggagaagtcagaggccctaggaattcctttcctagagatgagtaagcatgggcaggcactcacagtgtggacagtgtttccatgcattcagcaatggacccaggaacagcttatgggccctttctttcttgagtgtgtcaatcaaggaagcagcttgaaagaaagatgcagagggtagagcaaagttgaggatcacggaatcctaggcatggtgaggttttctattcatagcaggtgtaaacgagagctcttccagggatgccagaaccatgcttttgcacaaacctaataatatgtgtaatctccaaaaggaaaggctttccaaactttccttgataacatacctaggaaaacagtcttaaaccattcaggcaacaaaatcatgttcataatatttgtgggatttttttcccccctgcacatggatccagctctagccagttttcaatcacattctgacatttcctgtggaatctagccaaggaaagggctcttctagccctcctgggattaactaggaaatgggatgctttcagggcctttttcctaacccggtgtatagagtgtcccagtaggatgaatgacagcctcagggctctgtctgtaccttgttcaccctgagcagcttcagcctcttccaggaggcacaacagaattctcagagccatccctcaagtctctctgagtacaagtggaagcctcatctttaggctaagcaaggctagctacactgtgtagtgaggcaggagagctttcaggagcttctgtcattgatggcagctgcaaaaggaacacagtatcttcatacgtttacccttctgagtggttttccctccaagggtttgcccttccaagtgtttagaaagagatcacccttggaagggtttgcccttctaaatgtttagaaacacagggaagctgacagtgcttctccccaagcttctcttcaagcactgtcagctgctgtctcttatcctttctggcagaaaaacaggtgggataaaaattaccagatgtttctcaagtggcctggtgggggtggggatagtggagggctctctctctcttaaggagaggtacaagatacactcccagctgtgctaggagtgtaggatctcccagaccctggaactggactgtgtccactgcttcctcagccatgagagacccttcaaaagaaaaccacattgagcatagtttgtgactctaaaatgggctggtgatcaaggtaattccagtgtcccttgtccccttgtgcacatgttaattccattgtgtgcagtcacctttgtcccccacaaaaagaaagctttctgtcacatgtggctggactgttcttgaggaaattttacagaagcatggggtattttctcaagcatctgggccctgtctggattctcatggtgcaatgaaaggaaaggcagctctggctccaaaagagggacttccagctcctcttccgtcttcttggaaagaaggattaaagtctgcctttgccctaaggagacccaccttttttgttagagataaatattatccttaggtttttaaaaggtcaagttccctttcattttactaattcatttgcatagattattcactgtatcattcttcttattttgatctctaaaaatcatgtgtctctctttgaagtataaaggacaaagagatagaagcatataggaaagaacccaccccatctttaggaagaacagagcccactggcataacaggacagagtggcaagaaaggttgggctgtggaaccagacgggctcttgtttgaatcccagcccctctactttccagctttgtgtccttgagccacacagcaaaatattaaccctcctaacctcagttctcatctctgaaatgcagataaaataatgtgtgtaaagtgcttaggacggggcctgatgtagtgtgaacagtcaatacatgttgattcccctcctcatccttccattctcttatcacatcatgaaatccaaatataggaggaagtacatattgatgcacaatgtatacagatagatgtgtgcaggctggcccaagacctagttgttttatacagacacaccccccttgcctatgcccgtgtgcctggtaaccaggctggtgtgttggtgccagtgtgggaggaggtgtgttttagagggagctcctgcatgcctgcccattgtccacagtccagacatctctcctgagacccagagcagtgatgatgtgcagtagagctgtcatctgtcttgttctttctttgtgccctttgaaacatggcggtggtggctttggcgctggtggcaggggaagccttaacggccccggagctgaagcctctctgttggtcctcagaccaggtacagtgcaggggcccccaggaaccccctcgttctggggtccacacttatgtgatgtattgagagttatgatccatcacttgcttttagtcatgttacttcttgaactctctcttcattttctctgaaacatagatgatacttgctcacccttctccatccattttctcttttgccttcaacttcccaagcttgccatgcccattccctctcccctttctccgctcatggagcaggttcccactccccctcctttggccttcgtcacatttgctgagggaggtccaggtaatgctttctctcactcatgcacccatgctttctaactctgccctgttcctttcctcattaatcgtaccagagaattcagctctcccatcactttgatggggttagccagagtcccacctgccagcagagagagggcctggcctggggcagagagtgaaagaagtcactgagcctatattcctcatggtcaggggctcaggccagcagaaagccaaatgtggggttgtctgcaggcttgtcaagtatctctctccttgtgtttacaactttcgttatcatatcccatatatttgccccataatgtccaccattcaaataaccttattcctgtcccagtctctttctgcccttcttgaaattgaaccatgacttagtgaggaggcttctgtgaagcctattgcttaataaacttgagctatggtggttgccatggtagcatctttctgtggctcctcagaaaccagggctgacatggcattccttccaccacccagccagagccttctcagaccctggcccaactcccaggagcaaagcccctcaccgagtcgggggagtgacctctagctgaattctcaaacaaagctgtggtgtcccctgagccctcctgccgaggcgtgtgcctgccaccatgtatgttttctacaagcatatatgttgtttatgcagtggctgaagagaagactgttctccacagctgcatacatcaagttaagggaacgtttataatgtaaagctggaaaattccattagggaactttattgacttttgaggaggaagggaaggggattttttcatttgtttatttttcttcttggatttattttaagtgtgggcagagcagtggataaaaaaaataaatggaaagatacccacattgcaacttttctgttctttccaattcacttttacgttataaggcatttataagaacactcaggtctccttccttaagcccaccgtccctgcagggaggtgggcagagttttggcaaaggttgggttcagggcttcgttattccgctgccctgacaacacccgctttctgggccacatggagacagagtgtttgctgactataaatgtccagagctgtgccttctgtactttgaggtctcaagaaaagtctggtgagtggctggatctatgaaaccttcctcttttatctttttctttccaatgaagagggattcttttgtgtgatttcatgtgaaaggaccagaaaccgctttgtctagtttccacacaccctgttgccatcgctgctgcttcccagactcctgcatggaaggcaaagatggttacagccttggcatttctggggatctgcacatgaggcacattcccctgctttgggggaccctgctccccaaccaaagtcagctgccttgtagggaggtcacataaccactacacagattacattcatgaacctcacagaaccctcatgtttcatgtgtttcatgtctagtgaagtgacttgggcaaacaggtgggcagggacagcatctctggagaaatgtaggagaggaccaggacacctgtgcgtgtgtgtctttctgtgtgtgacacctgcactccaacccaggactctcaccctctccatttccactgctctacagcacgttacttgactagctcgattcacatgagcaggtgagcgctcctggattggattctaagtagtcatctcacagcttataattgatcgtcagcacagatggtttaatagaaaaataactagcaattctgctcccatctcctcccccacctcggaatttaccatggcccgtgcatcagtcagttacacaggctctctggcggctgacgccaaagcttcccattgccatttgctgttgtagcagggcatggggtgaggtcaggactccctggcactcaggagatttggctcacagccgcacttggcctttcattattcagtccttagccagaaacgaaaaacatgagtcaatctgcctcttgatgccagaaggaactggagttcccacattagcttttattacattcttttcattgaagtatgtcactttcctgacacttgacactctgccctagtcactgagatggataaggtccattgaatgcattcagcagtagctgtagcagcagagttatatacacaggcatggacaattttagatttggaaggatcctaaggagccacataatatgttcctctgggagctgggcgtggtggctcatgcctgtaaccccaacgagtcgggaggctgaggtgggaggattgtttaaggctgggagtttgagaatatggtcctctggttccggatttgcttgtgggattttgtgttttagaaggtgagaatgtgcacatgtaagaaagaggtggctattcagcaccaaaatgctcgtacacactcacgctcagcacagcatagaaacaacagacaaacatttcaccctaaacctggctgtttctttctcctattcttcactacctgcctgtgtctgaggcagtcccctcaaacctccagcgttgcctatgggtcttctttcttgacagaacttccctcttttcaaactgaaaggggagtcttccaaaggaagcagtgactgcacattaatcttggaggcaaaaaaagtggacgaagtcctgcttcatgcaaagaagacccatttaccactgagccagacaggtcatccagtgcccctgttctgtggaagagaacgaaggattaaaattaaatttagccgtcaagtagcccattaactgtggatttaggaggccagctgaaaaggaattggaaatttccaactgtaagcagataggaggattttgtttcctgacactccagtttaaaagtcacctcaagaatgactacatctgatttttgtgcccagacaaggacactaaggatgatcaatgcccatggacttttgaggtgcctactactatatcatagctgccttgaaaatggagtttgggagggagtaaggagggacagagtggcagccacatggagggagtgagtgtctgaaaggagataagtcctcagtctacctactcttggcattaagtctcagcatgcatattttttagtgaacgctggaaaatgtgttgtctgctgcatgtgacattggtactgctgaggaactgcctgtagaatattcactttgagacctttatcttatggaggcaatgggtgtgaacacccaagtattttttttttttttaattaacagcatgaaattgggagatggttggttgtaaatgggatctcagcccgtggccacagacccaagcaaaatgaaatgatccaatcagggaacactgccccatccacacggtaaccaacaaccaactagacccagatataaaatgcaccctgtgagccttcacaaccatgggaagagcccagtactgctggattagtggaaactcctcatagtgccctccagatttaaaagtagattttagagtaacttgagtcggaagacttcataatgggacttggggaccatcaacacagatcatgccagccaccttcctaatccacatgcacaggggcacagcctagcatttcaaattagtcttcagtgggacaagtgtattgggtggacttccaccagctccaaggccttcttagaaagatcagcagatgaggtgtctttgggtatgtttagaataagacaaaagagacaactaaatccactgttcaccagattgaataataaaactgctaggagacagttagatgctctgctctctcctgctgcttctcagtgtttggacaaaaacacctgccagttggagtatggtgctgtgtatagcaaaggagaaagcttgcaaaaggctctcgggagtgtgtgtgaggagctcgttgaggtccatgtgcaagagggaaaggattatgcaccacttagcatagagctagtgctctggtcacatgacaaagaaagatggcagaataacaatggattgagggttcgagggtgaccccaagaaatgctgaggcatggaccacgaggaaaaataaaccccaaatggtagccgctaagcagtgacaacgtcaaagtggtaaatttaaaattttcacagaagcagatgaacatatccttatctgcagatcctagagagacaggcactgccagtgcaaaaggggaaacttccccatggggtctttagaatttttaaagtgctttcacactctttattttatttatcaccgaacagtcctgttttacagttgagaagtggattgcctgaggtttgactagtctgactcatttgactagtaaatagcaaagccagttcttgagcaaccttggtgttctgatttgaagttcagtgttgtctccattatgttaagcgcccttctacacatcatgttctagttagctccaagcaattaacccctgtaagctaagagcagtggcttggtatagatctctcctcaacctacagatccttctgtctctacctggtgacagacaagacctatgggtagatggagaaggtcatccctgaacttgtccatcttgttgtttcatctgtaactttttttttcctaggaaccctcatagaccctaaactgattacagggaggggagtgtgatagcttagtatttgagatcaggaagtacttggtcttttactgtttccttctttggttaaaacgctccagtggttcccatttgaaaggcactctaacatcacaaataagagcatagatttcagagtcaggcacatttaggcctgaatcccagcactattattaaccgccttaactttgaacctctgcttcttcatctgtaaatggggattcaaaataatattttggtcctataagcattaaataaggtaaaatgtatttaatgtctgctatagtgccaaggacttagtaattgtataataaatgatagttattatttcctaccaaataatagtccagacacattagtgagacactcgaggctcctcacagcatgacccctccatctacctttcactcctgcgagcctggccattccctgaggcaagagattccttcagatccctgagctattccccgctcatggggtagggcagaaggccatggcacttaaaggacagaagggttctttagaacctgatgtccctgctctgccctcatgggaggagaatcagttcctggcagaaatcaacttgagagcatgtcctttgagaagagggggctgggaggtgaagagcgggattacattgaatgatgagtaattacacatgaaagatctggagggcagcttgacaattgagctggaaaattctcgtcttttactgatgaaacaagaaaaatctgtcatttttttttttttttttttactggagagcagccaggaacttaccaaataaatagaaaataaatggtaaaatgtgtggcccaattgagtcccaattaaagtgagaccagtgcatcctagtgtgtggaattgtccttagattttaacattagagtcaatttttgaacctgatagaaattttattaatgaggcagtgtaaaaatatctgattataatttagtatcagagactagcaaagtgttatcaaacagttacatttaaatgatttgtaaaatgcacgtgaattatttcctaaacaatgtgcctcaattaaggtacttgaagagctcatccttttagtttggtgaaatgtcttccttgcaatcttgttggctttgataatggcttaaatcactcttgtatgtatggatttgggagcagtactttggcctagtccatgtgtaaattatattttaactaatggggactaaagtgttgaggcgtttcttgactccagggctttgttattcagtactcttttcatttcaaatggcaattttaaaatcagttaaatcttgcccctgttaacaaaactgaggatgaaagcatatttttctgcagctattccaattcatagcttttcaatggctcctctgcagtaagagacctgatgaaagatgcgtagagcaatgactaattttatttttttttattttacttttggcctgtgtctgattgctatccttggctcagacctgtgggagttaggatgtgacaaatagcccccccagtggtttggcagccacgttcagctgttaagattagagtgtaccattaaggaaccctgttttccaaaacaagagacaatggtgagtttgcattataacatgccttatatggtatatgtggtaatacaatgaattataccatgatgctttactaggattctggggggaaattaattcaagagagcaaattatatcctttatccaggtgtgtgggaggagcaggaaatattgggccctcccgcagaagacgcatgtctatgagcatgacctctgagaaccttttcagatgctacaggatagaaaggtctccgagataaggacttgagctaagcagaaggcagaagcttggggtgtgtgatcctagatcacctgcccatatattgatctcccaccctattcttacatcttagagatatgaaagattatcccttagttcttccttaagacaaatgtagcctggggaaagggaaacctttgtggttattttggtaaattttttaattgatttcatttttcctatggcagcttgcagttatacttttattaatgtgcttgtttacttgaggtctatcttccctactagactaggtaagtttcaaaaggttggcaacctcatttgttcacaactgtatatccagtatgcagaacagtgcctgacatatattaaggactccacagatgcttggtatatggatgaataaagatgtgtttggctgacctaccatatgccctgtcttatatgtgagaagatgctggggaagatatttctgtcctctgaacatttagaggttatcacattaaggatttaaggtttataaggccttgggtctaattcccaagtcatgattcatttggcatttatagtgaaaattaatttaattttgaatatgggatcatttgttgagtaaaataaccattagaagtctttgcttgtgacatacagtagtggaacataggtttgccatacgttggcaaaaaataagaaaggaaagaaaaaaagtaaccttcatcacaatgtccaactaagaaccaaagcctgaattatgagcacttcttcttagcagcaggccaggatagggaatcatgagatgcaggttcacctatgtttctaaactcactcagtgaatgatcttaggcaaggcacttcctcctggggcctcagtttcctgtgcagttgggtggatttcagggatctcttccagctcagaaattcactgtgctgtttgacagaaccttgaactaaaacctgctgatgcagagccttagtggttaagagcaagagctttgatcatcatacatgcttgggttcatgtcccagctctgccagctgatgtcgggcactcaacctctctgaatctcttctgtgaaatggggatagtgattcctatgtgctaaagttaggaggtttaaataaagatttgcactaaaattgcttagcacagagtctggcccagaataaataaatattcaaaaaatttagaagttgtcattatttctatcttgaagatatttatgccctgacttattttaaatgcctcaccagtagaactgggatgatttttcaccttcaagctgcacagtatgctcacaatggactggcggtcatttaatttatcaaaaggcaaactttggtgtgacatcatgatcttgacagacaaatgcctccctcccttatttcaagttggtttaatggtgttgctcctctgagcttctaagagacatcagtgagtctctctctgagtggttgcgtgtccctctttagatgaaaccctttataagcataactgtgccagtgtgtgagagaatttctggcccagagtgggcatagttcctgcagcctggtttcttataaattcactggaaacagagtttgtctgaagactgcataggaaatgaaagtaaacgcctgcacttagaaaactgcagttaaaccagactccatggaaataacacacaatacccagaagtctatgtagaattgtcccttgtgctggcagagggccttcgcccctgcaggctgggacagtggcaatggagcaaatggtgtgctggcccttcctttcacaaaggtgtggacactctaagtgccaaggctgtgggtggggtcccctgggcctgtgctgctctgattccctatcattgtagggttctcttttctccctgaagtgttctgactgtctttcttctctctaccccaaccccatttttttgttttgttttattttgattttctactgctctctgattggatcctccataggaacgctttggggtaaatatgttcgattatctttgaagtaaacgatacaaggaatgagttggaggagcgagaaagtatggttgggaggggaggggctcacgcactgagaaaagagtggtcagtttttatttatatccaagggatcaaaattaggagtcaccaagccttcttgggaaatggtcattcttattggtttggatatgtattcggctcatatgttgcctcttttaggtatgtagacagatgagcctaatgcagtgaaatcgtttgtaaaacatgccaaagtctctggatgctaaagaccacatcagtgcaaggcttttggattatttatattcagatctgggattgaataaaagtgacttgtaggtcatggcctataatcattaagagagtcttaaaataaacattctgggcaaagtcagcattccttcaattcgattaaatatcttttggcctcgttttctgtgaaagaatggatggacttttatctccctgtcaggggggtggggtaggggggtaggtatcgcaggaaggtcagggggaaagcagccggaagccttgcagttcccacctgatgttctggaccccatttcctcagattgttggtgtaagagtaatctgggtcaacatgaagaaagagacagagcctgactccactatttagagtcttgttttccaccatttgtgtgttttataaatgacaactatttgaattgaatgcaaatatctcaggggatgaacagagaagaaagagaaatgcaaatgtatttgttcattttattcctaaaaataaaaagagaaacatactgtcactattaggagtaaacatttccaagaggctgactagggaggatcaatagctgtagggccaggataaaggtaggctgggcctgcagtttgggcctcctccagttgagtggctctctgcagcctgtgctaggtgcacaccatctgcaatggaagggactgcgggaacagccagccacacagaggtactggggtgtgagccaaggtcctagctagaagcctgcatgacatgctttctctggaacacgtggcccagtgagagtgtcatgtctgccaccctgcctcaccttgctgtctcctgaactaatgaactgtgcagcggtgacaaacccagattaagtctagtgccctgatgagacttgctctcaactgtgggttcatcaattcagcgaatatcatttgagaacctatcatttgacaagcactggattaggcacagtagggatctgaagtgggctactgctcacgttccctagttgatgtgtcttccgttttcattgtgccagtgtggtaatcagcagcattagactggtagttagggaaggaagtgtttattaacatatgtgcatggatgcctctgtgtgcctgtatgttcctctgtgtgtgtatatatgagtgtgtacgtgcatgtggatgtgtgttcatgcgtgcacactgggaagtgatttgagaatattcctgaagcatttttcgcaggatgtccctggagtcaaatctgactcagtttctggcttcttgcctccatctctcccatacatctctccccttttagcctgttgttactaatgccatagtttgaatgtcatttttatttctcccccattccatatgattccctgggggcctctcccctgcagaaccaacaaaggacgggacatcaagaccatcaagtctctgcgggtgctccgagttctaaggccactgaaaaccatcaagcgcttgcccaagctcaaggtagtgtttacagagtttgttcccatcaaatccccttctcccatcttctctctttagccatggctggcctgcctttggagaatttgttctgggaatattcctttttctcacacggatatcgaagttcttttcatctgcctgagctaaaggtcttagtttcaaaggaaaataaccaacatcccaagaaatctataagaaagctttttcttttaagttcagacccagatggtgtcttctctccggtgtgatatgtcatccaagagggaatcctgtgtggctttgtcctggggcctcctatgtctatgtccccagtgcagacccagaacaccagaatggaagcaacgggatccctctgtgtgttctggtctgcatattttttaaggccgagtatcctgggacattttctttttcttataactcaagaggagaagaggctcttctagccctacccttcataattttgaggcacagataggtcagtaacttgtccaaggacatgcagtccatttttggcagaggcagagaagaaatgggaagtgagctgacatgaattaagttcttcctattgccaggacctttactaggtatcttacccagatttctccttgtctaatatgctccctcctcaactcccctggggttccaccttccacgagtctccctgcctctcaggaaagcttcctgcactctatcacacaattctgctagactgttgaacccacctgccccaccccgcatactttgctgttagtggaagctgaggctccatgggaggaaagttctttctctctgaattcctgtgaatgacagcaaggcactgccagggagaggaccagagctcctggtttccagccccaaagtctttctgctgctcaggccacatagccagtcaagccccatcttcaggggctacaccagaatacttcccagcaagcagactcaattccctaacttcagcatcacatggaatcatgcagtgcttctcaaggtgtgggtcataggccacctgcatcaggatcacctgggtacttcttaaaatccagattgctgacaaccgcaacacaacagagccagactccctgtgggaggggcttggagtgcgcctcctaaacgggcttcccaggtgactcttagaatatagtgtagtttgagaacccctgtcaatattaaaaagaacccacttgagtgcgaggctcagctctaggacttagaagctatatgacccagggcaaattacttattctttgactttctttcacatgggaaatgaggacacattgtaactcatacatctgtggtgtggagaaaatgaactgacgtgagtggtccctgttagaaaactcaacagttcctctggaatgcctgggcctgctctcccaagcctgccacggaggacacagcttggggagggctcttgtgcacttggctctcccttgcttctcaattcccacttcctattgaattctcatcacctctgatactctttgcccacgcctaccccagacctccttcaggcctcatagcactgcttccctttcagccatttagctctgcagagaggaggcaaaactaactaggtttgtgaaacagaagaaaagtcacttctgagaggccccgatgtgactgaaacctggctacctttcagagcccagggccctggcccaccgcgtgggttcccagagagagacacccatgctcccaaggaagtggcctggccgactgctgtcctccctggctaccccgccttcccccctggaggaagcacttctcacaatgtcagctgtttcttaccaccttcctgcccataaatgctcattgggttctgcctcacacacagagcgtggccaggctgccttgggccctgacccttatcagtattgtcagtgatcctgcagggcaggattcagtgggcctcaaggagagtgcagacaagcttgatgagattcgttaataggccagagaaagcaccctgcaacctggcttaattctgttaaattagaaagggctagttcctcgctctgcagctccataacctgagagagacgtaggtggctctgatgattccacaagggtgcctgtcacttacattccctgcagtgttgaactaattaaaccagcagtgcttcacccagtgctgcaaagaagcaactgcacaaatgcagcaccaccgtggggctagattgtcctgtgagctaaacctaaaaacctagaaaataacctgaaaatgccctgcaatgtattgaattcccatgtaactcctcacagcttagggcctagagtggaggtctctggaggtctgttgccttttaactgaagtgtaagtccctagttctatctacccagcctcgccatctctaagagaaggtgtctattggtctttcccacattacttctattggtcttcatcccaaatgcagccaccttcactagagaacatttacatgaagtgctgaatataatcataaatgtatgaacttgcctatgaaatattagtgaaatgaacaaagatgatagtgtattattacctgatccttttagaaaggtaaggagaaaacaatacataatcagtatataaatcgaatctaagaacgtcaccaaataaagcacaagctatttaaagactaaaattggctaaatgatctcaaatattccttccagctatacacttctatgcttcacactaagtggagtacccgtaccaggatcacacagaggaccgcattccttgcttgatatcatctgatttctactgcgttgggtctacattcagtttcagaacatgtgttcccatcccaggtggtaggtccttgcagtcataaccagcttagaagccagcccttaatctcatgagcaccacctcacctcttagcaggaaattctctcctgggacaacttcttggtggggctgggtagtggtggtatggcccagctcggctctaggcaagtatgcagaccatcacagggttcacacagcagggctgtttgctctgtccacaggccgtcttcgactgcgtagtgacctccttgaagaatgtcttcaacatactcattgtgtacaagctcttcatgttcatctttgctgtcatcgcagttcagctcttcaagggaaagttcttttattgcacggacagttccaaggacacagagaaggagtgcatgtaagtgccaccagcgcattccacttgattttgctgaagcatgtcctgatgatcccactccaccaccacaggtccaccctccctcctttctatcttacccatctctgctcttctttcagcaaaaagacaaaatggaatcaataaactttttactgagtgcctcttttgtgtcagacacgaaaacttgagtgtaaaatatctcgtaccatgacattttacactcgagttttcatttcaaacccctataaccagctattgaaataagttttatttgcttattatacaagtggaagctaagactcagaaagtttaagcaagttgctcaaggttacacagccagtagtgaaagggttaggatttactcctgtatctgttgggcaccaaatcccatttttgctccatggtaaaaataccttcctttaatagaattccttttgccttacacatgtatggtgatcattattacccccacattattgcggcctgtagaatgtgctgactcttctgtagaatgagctatagtgaggaggctctctttcatttctgctctggttttagaggcaactatgtagatcatgagaaaaacaagatggaggtgaagggccgggaatggaagcgccatgaattccactacgacaacattatctgggccctgctgaccctcttcaccgtctccacaggggaaggatggcctcagtgagtgattgagttgtcatgcttgtctgtggctgtgataggacccctggttgccttgagaagctgactcaagatgaacaaggctcacgctttgttattgtatcagggaaagtaaggggttttgagaaggtgacacaggcagaaaagaggaagaatgaaaattcttcaggcaaaaatagagaagtgggtgagcaaatcaggaaaatatttgaaactcttaatgttttagccaattattgaggagtcaagtggagccatctgacttctatggaacaaatgagttttgaacagccctgtacccataaggagaattcctgagagctgttatagacagatttatcctccaggggggcccagcacctgaaagcctgaggattgagggttaagaatgagttggcaaaacccaaaggcacctcctgtgatcatgaggaagaccacagaatgcaggtcttatgctgcccgtagttgaaagctaatttctcagagacttagcaatgactaagacaccactctctagtggcaacaggttctacttggcagcaaaatgttaaatgggaatctgggagtctctttgtattgaacatgacaacctaaactatgaaatggtgtccctctgttgcttaggagttgagtgcgtgatggaacagaggctagaaagagaagtggattgttgatagcaggatatgacaacttgggtttggactcaaaaaaaattaatggaggatctgcaaagtcaaagaagtcagataaaaaattataataggtggcacatttcctaacgaagccaagactgtcatccaccatctgtgccctcttgttctgtccccatagagttctgcagcactctgtagatgtgacagaggaagaccgaggcccaagccgcagcaaccgcatggagatgtctatcttttatgtagtctactttgtggtcttccccttcttctttgtcaatatctttgtggctctcatcatcatcaccttccaggagcaaggggataagatgatggaggagtgcagcctggagaagaatgaggtaatgacaattggtctaaagtggggagcagcagaggctccagaaaggattcttgggccagcaatgtaagaaaggaggactgcattttcttaacttgattaagaattatagagagaagatgggaaaagtaactattcagccattaaataaacattttccaagcactgtttaaggcccacgtatgaggcacggagatctggaagatatgtaagatgtttaacatgcagtctttacctttgtgtgcacatagtctagaaaacaatgataacttcagatatctgcttatctgactgtgaccttccatgccatgtacttgctgtaagggcagggaatgtgtcttatcgcagcttttccagcaacaagcatagttctggcacattgtaaggtttcaaaagctgtttttgaaatttctttattttattttattttttcgatggaactgaactagaaactgttagggactgtaagagaaatgcgacataaagtgctgtagaaatacataggtaggtagatctttacttctgactaaggacatcaaggaaggattcctgcctaaacagctcagccacatgctgtgtaaaggacttttttaataaccatgaagtccctactccatgtggcaacacctccagttttgtgtactcctttaaggtgacgccttgtctgtagttttgtccaagtgaccccagttgccatctttacttgcccagccctgccctttttcccattcaccgtcctcctcttctgagcatggaacagagcctgccatggtagatctaggggatttgaatttgtgctaataaccatgactttcttgcagagggcgtgcatcgacttcgccatcagcgccaaacctctcacccgctacatgccgcagaacagacacaccttccagtaccgcgtgtggcactttgtggtgtctccgtcctttgagtacaccattatggccatgatcgccttgaatactgttgtgctgatgatgaaggtgagaggagagaggcacaagagccaactgagccccagcgatggttccctcccagggcaagtgggaagacaccccaacatcccagcccatcactgctttacctacttttccatcattgaatccttttgtgatcttattttgttcaataacccaacctctggggctttgggggtccactgagcaaaatgcagtgcagactatagtagccatccaggggctcccaagacctgagatggcaatgggaggcagcttcagacaagggtggaaaaatcaggagacagagatccatcatcacggggtctaaaggagccttggagtattcagagaggctcatcctatttaatactaaatgactaactccagtaactaactctagaaaatgtttcttccctgcccaccctcatctctaggaagactggctgttttgctattaagtctggtggggcgtgggtctgtgttttcctttgttttgttgggtagaatatgtggttctcctctccagcactcgaagtccatctctcctcctgtaccacacaccagagtgtcccacagggcaggaatgagagatggccaacctcagtgacatgtattccccctcttaccttaaggctgtgattctttctctcttcttttttcttcctggcagtattattctgctccctgtacctatgagctggccctgaagtacctgaatatcgccttcaccatggtgttttccctggaatgtgtcctgaaggtcatcgcttttggctttttggtatgttgctgaatccttcccagcactgggcttgtctctttctgttgggtgccttcccagtctttgttgaaggggaggtggttactgctattccagaaatcacccacctagatgtgggctcgttttgactgctcagtaaactgccgtagagacaagatgatgtgtgaggaagctgggagaaagggcaaaggaagccacagccatcagcctggtcctgtgaaattctgtcagcagtccagaggcggccatcattgagtttcactagaactgcaatttatgtgtagatgaaggaggaagccaaagattggactaataaacttcgagtgcttatttactggtaaaaggtataacagttttataacacaaatgggaaaataactatctctcttagcctcaaacatagcaaataatagatttttacctattagtccttctgccattagtaacatgaagagtaatttctgccaaagaaaataggtgtttattacttatgcctataaaggctaatgacctttaaggggtgtgtctgtgtgtgtgtgtgtgtgtgtgtgtgtgtgtatggagtgcaaggggaaggattctggaattaagtttgaggaggtttggggatgatgaatttttctgccatgagccctcttttttcttctcctcaactactattaataattataattgttgggcaaattcttgcatctgtcctcaagagtgttaagaaaatccagcccttggcttcagtgccctataaacaagataatccccttggccaccctccccccaacctgcttcattgtgtgcagcaagttcagtgggatgcaagcccatgtgacagctgtttcacacttacttaggacgtgagctaccatttcaaattacatgtgtgtatggctttccctgcaaggaggagaactttgctcattatctgaataagtgtttgtctggtagcagctttaacagagactctgggctgggttcgataattgtgagtgttgattacgggggctgcttttggtctcccagcggttctttgaaaaaccattaatttgatcattttgggtggagagtttaagggaaccaattgcagttggctgcattgtgtttgcctggctcccttttgagtgttttgagacttggggaaataaaaaagtaaaagaaactactaccaacaaagatgcctttataatacagtctagccctgagcagggggagctgagagagagggagacgcaagcaccacaacagggaaattttttctatgcatgttgattacttgtatgtggtattgacattgtctgtgacttaagtcccattatgtgtctaattatggtgagtgctgaatatatactcacagccttaactagattcggcccttgaagcctgcctccttcccaccctacccccatgttttcattcaaggtctagagggattttcactctgtaaaaggtaccactaattctgataagtctttacattgttaaggcactctaagctttcagaatattgtaatatatactatttcgttagatcttctcagtgactctgaaataggcatggcagatgtcactatcataattgccattattgttgttgttattttaaatgaggaaattgaagttcagaaaaattgtatagcttcttaaagattacacaatgaaaggcaatagaattgcaaggctaaatgggaataaaaagggaagggaaaaagaaaaagagggaaagatgtaacaacaattggttggctattaagtaccaaatgctttacatattgcttttctctccataacaatatattaaataagcattcttattttctcctttttatggatgagctggagctcagaaaggttgaatactttggccaagattagtaagaggtagggccaggattcagaccctgttctatctgacttcaaagctcacaataatctagtctacactgcactgtactattctataccatataccagtgttctagtctataccacagcatgctattctgtattgtaaagcattgttaactggaatccagagcttctggtcctctgagacctagatccatgcaccaaggtttagaaagaattaaaaccaagaattaggaagttcaccccaggttggacaataggagagccctgagaattgaggaattcggagacttaatttagctccaccactgatagactaaatattctaatggaaagtgaatttatgaaactgtgtgattcagtctgtccatatgccccataggtacatgtggctttgtaataaggcctctttcagcctcattttctcatacataaaatgaggataatagtagctaccttatggccttagctactttgttgtatgtatccaattaagtgatgttcataaccttctgagtgggtgttcattaaatgtaacttctctctctccacattccttttctttctttattgggtattttcccccaactcctcttgccaactcttccattcaggactttatgaacatgggatatttttcaatccctgcctctaggatccatgagaagaataaatgagttgaaagaatgccaaaggcctggcctagtgtctggctcatgtaggaattcaatgatgctagttgtgaggctgggttggagtatacttctgcagtgctctgagagtctcttgtgttttattccaaggatagaataaaataatccattgtcctgtgatgttgctgaggatatcaattacaggtgtttgaaattttctcctcctggtactttctctgtctcctctgaatttctttattctgttgatttaaatctctgttttctgtgttacagactgccctttaaatgtcccaggggcaggcaagtgaattgtttttgagattcaagtgtcctttttgtttgtttttaaaggaacatagtctaaggtctgtgttcatctgagcctaggagatggatgcatagtccaccctctcctgttaaatggagtgttatctggttggtggattttccaggctctttatatctccttcagcccactcattgtattactgcttccttgtacttagttacatctcctcaaaagatgtaacagcagagaaagagtggaaagatgaagtctatttatcctattaccaatcagtagttggtttgaaaaggctcaatggagttaggaggagatttttggcacatctgtaaccttcagtcacttatgacttgtgtgacttttgttgatagttgaaagtcagactgtattttatagggcacttgacgcaatagagataatttaaaagttatagctgtatgaccatggcaatggtttcacaggtacaaacgtttccccaaacccatcaagatatagccattaaatatggatagctttttatttgtcaatcatgcctccatagaggtttttaaatacataaatatttgttaaaaataaaaattgaaaaaaactttttttacatatgagcttttggtgacagttttcaaagataaagtcttcaaatagtgatagaactgctttccaaatgagaaatttccagattagtaaaggagaaatggcatctctggttagaaatgggaaactgaagccaaagtaagagtgaacttatgcattaattgacaagttttatttccaagggacaaacaaagttatataatgaaagatgtcttttctccttttttttttctttccttttctgatgttcctatgactgaattcatttggcagaactatttccgagacacctggaatatctttgacttcatcaccgtgattggcagtatcacagaaattatcctgacagacagcaaggtgaatggcttataagatccatgtctgtaagcttggccctggagtagcatttttaaaactcctctgtatattcagtccatttttaacccaccaaagcaaatgcgtacccctctaagtgttgggaatttactcccttgctgcttggcatcagccagggaatgcaaacttgggagtggcactggatctccaggaaggctttgttgatttgcctgactcaggcagcagacctctaatggggtaggtgggatagacggtgtcagaagagagctagtatgcatagcgttgcactagagtctcaaaggaggcacagtatctttgccctcaaagttcacagacctgtattttttccataaacttgttccttctaaagatgacttggagagctcagggtaactctctttgaatattagagggccagcgtgtgctagaggggttcctagatctgctctttttggcatttaagtgcagacttcaggccactcagtagaagactagggaggctggttttgtgtgcagggtacccttctccagtacatcctttacccttctacctggggatagagagcaggcatgggaaggcttaggagatgggcctcactggccagcccatcagctggaattggggttaacaaagacagagactgtgtcccatttatcggaatgagggataaatacacaaatactagtgcttagatttttctaaatcaccataatgttcctaattatatgtttccttttggtccaccagctggtgaacaccagtggcttcaatatgagctttctgaagctcttccgagctgcccgcctcataaagctcctgcgtcagggctataccatacgcattttgctgtggacctttgtgcagtcctttaaggtaagaggtaccagcaaatcctctctgagggttgtcatatcagacagtacagccaggcaacactggcatcattacccaagtcccttcacctctgggaagctgaagctagtagaacgggtgtttgttagaagcattcagtaaatactgcaattcttagttacagcacagcttggcttgactgggatcagcttatgtctactggatagaatcttattttagaaaaacaccttgactttgtgactcaggcatcctctctgtctgctgaggcaggggacacattttataagatgtgcttcatccatagagattccagacagtcctgagtaaccccatccatgtaaagagccagccatctgtagtcagatgtcctctgcattttcagggactttgggtgtttgtttttatttcacatgaaagtttttcaaaggactcattgagttgtgtttcatagagagatgattcatacttagccccacctttgtcttcatcagtgtttatttcctgagccactgaacacagggtatactaatggccacctctgtgtcctacaaataaatagggacatctgggcaggttaatatgatgtgtttcctctgcacagtctcgtggagctgtacagaggtgtacatatgataaatataagtaaaaaattgacagctgagacccagactttgagtaaaagtttcttaaacatactgaaatatctttggactctagcaaatatcataaattagttgtttttaagctttggggggcctaaatgttgttcaaatgcctgttcttaccaaaatgagtttttcagtgaatgtgtttaaaaataaatttgatggaattaagtgattcaaagatgagaaattatgaattcaccaaattgactttcttattttaattatttatagtttaattaaaaattaagctaaagaaggcaagccagtgaattcatggtttctcatcacttggaaaaggatttctccccacatccatcattactgatttacttcttcatcgaggacctgggattttgagatgtgagatcaattttaaggatgttctggctcctaggagcgaccttgacactttttatcatatccagagaaagtgtttggcgtaatgactcccacgaggcctcacttcaatgaaaactatttttctaaagttagatatggaggataaatctaaaaccttagtgagaattttctgagtctcaggtgattttggatttagaattggaaacacaacatgcttttaaaaccttttttttttagaggattgcccaacaaacttcagtggttagtcttttaagaaatatgtgtcatcctgtcatattatcacaatcaccaagtctctgagaaaccatacactattgagggcaaagaaaatattgtcaaaaattgatggccaaatggttggcttattccagcaaatactacagagaacagggaagacaggtgaatttgcctccaggtgacactgtgttatagatagatgttcccttttcagaacagttctgtgacacagtatagaagtttgatttttaaaagtcagattaacaaagactacctctgcaaatagaaagcagagagccacacgatataaagagcatcgccattgcctatacctcccccaccctccctaaacagcatccagttttctacctctgacccctactctagagttcttccctcttttcccttattttgtgttagaatgtataaacatgacaagaaaggaaaacagaatgaatctttgcttttctccctacattgggagtagggagagataaactagggactagagtggagacagtagaataagggcagaaggtaaagatgaaaggtagcagcactgcaggcacaagaaaccctgtccttccttctggctttctgtagaggaggtccacattgcccatcaaagtgtagtcaacccccatcacagagcctaggaatcaacacttcattggagagggaattctcccacccactttcagttgcattttaattttagcctctcttcaagttgtaaatagtctcatagggctcttcattttgttagtgctgttgaaaagctctgccctgctcatgcagtctgaaagcctcaattgatctcctgggattcatgatgtgcacaatcaagacagggtggagactcctcgtagcactgtctgccagggagcttagtggatggtaaagaagagggacttctctggcagcgctgagatcaacgcaaaattacagtgtcccactctggccccaaatccaaactgtcctatgtctgcatcctcctccagtaccaaggccagttccctgcctcatatctccttgccttgaccctcacctctaaaactgaaatgttatcccaaagtggcaataagcatgcgcagtatggaattttgtgccacatggcttcatggcagagttttttggtggctaacttaccaggcttttgcatgaaacataataaaacgccaggaggcttaaatactgggaaatgacatttcatcagaaaatgaatgacctttctaggaacttacaaacaagtgagaccccaatcatttcactttgattccagattcttcattatgggtgccactttgggtatgggagtgggagggggtaatacagggatttggaagccaaagctaggtgcttcatatttaatttgcatcacaattgctaggttattaattttctgcatggcaagtgggatgaaccccaagcccaggaagttttcccagctttccttctagatatgggctacatttatgggtgagtgaatctccctgatagaggtaaattttaagcctccctttggccaactgtttacctatctgtcagaggacaaggatgcctgagaaagtactacacctcaaaacagaacaaccccagggaatagggagtcccagtctgtgtttgcattagcctccaggcaagatcctgtactgccggtgactgcaggttgttgagcttgggtgctgcttttctttgattaacgtcttatctctgctttccttccaggccctcccttatgtctgccttttaattgccatgcttttcttcatttatgccatcattgggatgcaggtgagctggtaaatcaagggcccggtgggggacagctgttacccagataatctctggcttagcaacctaagcatgcaagacctgaagatgctttgaaccccttcttgcctaagggtgctcccctgaggtcttgtcacagtgtgaccttgggaatttcacatgtgcagtggctccccattttagcttgcctaagtattcagggtagtctggtacaggggcttcatctcaggttgtcagatcatggtgctaattcataagcagctgggcttctgtggtgacagccatagaactaaagcaaagatgacaccattgttcttagccagaaagatcccccaggagactaaggatctatttctcaggatctctggtattttgacttggcctaaaagaaggtcagatgttagttcttcctgtatatggtgacaccaaatcaccacatatagtcatggctgtcttatagagtcttatacttacacagtcttgactggctgagatttatgccctaagatacatcactgtgaacaactcatggagttcctggcagcccgttcattcctagggagactcaagggccacattccagctaattaggccatgcaacttcctggacagttcccttgttttcccatcccaggtatttatgcaggtagccagaggcctactaagcagaagaagccaaaggatctttcaaagatgatggtggttcttggtgggtgaattcctactgtaaataaccagcagcacatcccatgaacctatctggttggagacacaggctttctgcttgtctccagagggctaactttctgacttggagatattgtgactagatcccagcatagaacttcggctatgtgacagcctcctgcagtcaggcagtctggctgccttgggcctgctggctgccttcccaactgtgttgccacctggagctgctgctggagtgtcccagccttgctgtgtctgcagccttttccagaccctttctgaaatgtctcttcctttcactcttctctcttgcctgtacttcttggtttcattctttaactctattactggagaattttgttctctaaaaatacaatagaatgtcaagtgtcaaaatgtgtgagacttggttgagaagtagtgggttctccttcactgaggatatttcagtaggaatttaatgatcatgttggcagtgttggaaatagaattcctgctgaagtttcatattggctttgtaacgttcatgaagtcctgtctaactccaatatatttgattctggaattaaaatattcttgaagagccaaatgaaagcttgatttaaattattttttcaaaattgattttttattgatgtataattgtagatatttttggggtacatgtgataatttgatgctcgtatacaatgtgtaatgatcaaatcagggtaattggtttatccatcacctcaaacatttatatcttatttatgttggaaacattataattcttctcatctggttatcatgaagttccttttgcctatgctcaaaatagttcttaccccttttcatcttcaaataaaataaactagaataacaccatctccagtactgatctggtatgaatattgttgattctgataatggtgataatgctgtttatcattatttaaattccttggtgtacaagacgctgtactaaatgtatgcatagagagagagtgaggggggagaaagggagggagtgaaaggaagagagagtgagcatgtccaggcaagacatatgactaatgtttctgagtaatgtgaaaacgtttataggtgagtttcattgtctccattgatgcttagcatagttaagtaacttataacatgctcaagttctcagacagtaagtgaaagaggtgagttgtaagatcagctctgtctgctccctagcccatgttcataactctatactgtgtctcatcccaccagacaagcagacacaagtatttatttttaccctctagttggaggtagaagttgttcaattatgaaattgtagtcttcacaataactgtatggtctaacatcttattcccctcagatttctttccaaaggataatagcaccatgtccattccacagagacatgaatgacatttctgctatgacttgctttgagctggccatccccatcctggtctatgacagagacacagcaccaagcacaaagcagacacctgagcttgttgctagagagactgtttctaatatagtcacaacaaaactgagggatctgtacaaataataaacgcaagggcagagacaagcttttggaaaaatattaatagcaacaaggtatgtctatgagaaaaaccattattattccaaactttcaaaggcgccttggaaaaagggacctttgcagaagaatcggaagttcgaaaggaggagtaacttgctggggatgagaaagagccctgtggctacgtggtgtcaggaagtgggattgtcagcctcagctccttcactgaacaactgtgtgaacttggtgaagtcactgtatctctcttcaccttaactccctcaccagtacagtggaggtgttggttagagaccttcacaagtctcttctagttctaaagttctgtaatcccaactgaaatggatttaaatctatactctcatgagatttttctatgaggcctcagcatcccttctttctcttccataccctgttgatggaggtttaagttagtgacaaggactaagtgaaaagttgaaaaaaaaaaaaagtacaaaaaatttaagaacatcttcacaataaatatgtgtttttgacttaaattatgtttgttttgttctgctttttggttttttttttttgtaaagatgaggtctcactgtgttgcccaggcttgtcttgaactcctgggctcaagcagtcctctcacctcagccccacaaagtgctgggattacaggtgtgagccaccatgcccggcttgacttgacttaaattatcttagattcaaaataaatagttttggtttcttggactattacacacatactttgtgcaaaatcgcagtgtgctctgcagttagtttgtgattggatgaggtgtttgagaaaatcataatgaattcaactcatgatacctccagaagtgtcatagggaaaaaagacactgtaagttgtatgtctgtggtgaatcagggataaatcatgaattccaaaccaagagggaagaagagggcaggaaatgtgaacagggcaaggataaatgtcagtgccctcctggggtatccagagttaattagatttgactgcttgggtgggattttttaaatgctactatttgtctctttggggccctctagcttcttcttctctttccattcttctctgctgctgcctcacttgccacctccattctccctgagagacaagtagtatttgggttttgaaaaacagcattgagaacaaattcccagagcaggtgtcagtgggagttacttgagcaaaatagctgggggcagagattgttcctcaattgcacattctaaaaactgtgagggggaaaatgtgttccatttagcatacattggataaactgaagcatgttcaatgcaggctgaaaattgtctcaaatgactggaaaagtaacccagtaagtccgcgattgtctcaacattgacttgtgagaataggtcctgatacccaaaatgtggttggggaaggagggtgcatgtgaaagcctccttttcatctgaagagtggaggggttgaccttggctccaggcagtgctgtgtctgggagttcatcattactcagtctctgtggataaagatctctgagtgttccctcttttgaatgttcacagtgattacattctaagctcagtagccagcagcagatcagcaaatctcattctgtcacccagaatctgcccaaagccattttctgttttccttttcaaagtgcccagttggcccgactttctccatcctattggcctggacttcattttagctcctgcataaatgtttccttttggatgggatttgggtctgttggatgatacatgtggacatatataaatatatgcatgtggatatatgtgtgttcaatctcatagattctacattaatgacatacagaccttctaagatgtgactcaatggatagaaacatatctaaggaagatagagatgccactctctaacctgatctgcttgtaaattgcagggtggcatctgcccaagccataaatgatgtcttcttgcaaatctgaatgctcccatcatgactacctgagacaggaagagaggggtagctccttctgtgcactcctgctgtgagataatgtctttgacagacgcttgagtaccatggtgacaggtaccatggaactaaaagaccagattaggtgtaggaggaactatgtacaggcagaatgacttcaaaagagcttgcgttctacgttatgctcggaccttgctgcatgggtcccctttgctgcactagagcagtggaggataattattcttgcatatcagcccaaaagcacagtatccagcagctctctgggtctgagttgtctgcttcaggggtaggtcatcgggaagagccatgcaagtggctttgccaaccctcatgtgctggacacatcacacagcttggtaatgctcactgttttctgttgtttctctcctcaaggtatttggaaacataaaattagacgaggagagtcacatcaaccggcacaacaacttccggagtttctttgggtccctaatgctactcttcaggtacctggatgcgtaactgtcatagctggggttctcctgatggagggagagagagtttgtctgcctcttcctcccatttccctttgtatctttattccacttcctttgctcctgtcagtagaaaggggaacaggcaatgtctttgccaaactgcccctataacattagacagttttgtcttgtctacagccataccaccatgaatgtgcctgatcttgtctgatcttggaagctaagcagggttgggtctgctaaatacttgggtgggagaaaatttcatcaatgtctttggctcagcagttaatttgcaaattttaacttcaacatggcctgcaagggtttgggaggggggaatgtcaggacagtgtttgcagaccaaattccacttaagggctgaaaccttagatagccaggtttatgctgggtcttagagaatcccatgactagtagcagagaccccataaaagatggagacgcagtggatggggtagcagaacccaaaacagacctcagtgggactctttatctctgcatggaaagcactagaaggggtcaactgggtaaaaagagagcctgttgggcccagacaagagcgaggatggggaaattgggaaagaggaccaagaatatgataggatctgcagagctgctcctgctaaccaaaatgtctcttgggctcaggagtgccacaggtgaggcctggcaggagattatgctgtcatgccttggggagaagggctgtgagcctgacaccaccgcaccatcagggcagaacgagaacgaacgctgcggcaccgatctggcctacgtgtactttgtctccttcatcttcttctgctccttcttggtgagcaacattgtgcttttgccttgctatgtggcccatcccatcctacccctaaccctctgatacatagaccggagatgtttgcttcagtgtatgtttgtgcctccctcccctcctctctccacacccccaccatgcacacactcacactcacgtccacacccaggttaagaactagatcatcctctggagaactcttggagattagagtgcctgtcagactcctggatgggtgactttcaatgattgagaaaagtctttgttggttctagggaaagattgttgtgaaaagggaaggtgagcatatttaagtgcattgagcttcatatcgaatctatggacactcagagtaatcctttgtcatacctcaggtattttatcttataagtacgtctatggatatcttcgctttgggagatttttgaactgcttgagaaaaggtaccttgaaaatgcaaggttatggcattgataagagtagaatgatgataatggaataaatgtggttctctcttgacttgtaatgttattacatttgatgataattgaccagctgatagatgagaaagaatgagattgcttgattgctttgggtgttagtaaatattgagtagtatatgtggagcatacccacctataaagtggtgggaagccctacgtgcctctgaagtctcttttggagaaagcatgactcagcacacccacttccagaaacttctaccctgcatatcagacaagcagtgataaatagaataataaaagggccagtttagtgtttctggtcactctgaaattcctcagctcaactacactgctaatgccactggctgtacaaaaacctaaaactaagacagtgatgccactgaaaagtggtcaatttcatggccatgcatcaaaaagtgaattaattgtcttatgtccaggcattgctaccttgcaagtgatcccaaggggactgaaacttcccacatgtccagctctccagtgaggggggtgggctacagaaagaccattaagtgttgcctgtaggtcagtgtggcagggagggagctaatgggagatgtgggcagcccacgcagtagtcttggctttgttcctctgctagcctgggccaagacactttcccttttatagcatctataaaatgggagaaaaaaatgacttaataataggaacattttatacacaatgaactgatccatgtgttttaatacacttccttcttatgtatgtgaaaggtttttcagtaaaaagaaaagaatatacaacagtatcttatttacaaatatggaagtataatgtataaagaaaaaaccccctgaaatttagaataatgctattgatgggagttttccatttattcacatcttcagcacatttttattgagtggccattgtgaggttcactctcagcaaggcccatccctcagtcaccagtagtcaaggggtgaaaccagctcacagcttccaggaatcggtgctcactgctagggtgaaatggagcagatagaagcgcatgtggacatcttacttttatcttatatggtttaagtgtttcataataaatatttaaaagaaaccaaagatataactggaaattaattagggaccttaaaggtacttttggaattttgagacagagggtgctgcataattcacattactgttatttttaatgaggctatattcagcacgagatgatctgctttcagatctatatgagactgactgtgaccttggacaagtcacacagcttctcaactcaaaccagccactctacagagatttactgatgcctctacgatgtgcccgaggccttgtgctggaagctaagaacaaaaaatgtgaatccaaagcaattctgtccttgaagggtgatggtaattaaacctgcctcacaaagagttggagcaagcgtaacaacaagtaataggtgtgactgcacacgctacactcttaatgactgttcaaatgaaaggcagtaacagtgctaacagttttcattgacattaataataggtaccccgaaaagtatacaaaagaaatgtctggatacatggaaaaccctttctgtctcttgtaagtgaaagggtcctgcctgataggtagtagttgaacaagttcactgtggctccaacctcagaggcagaaagacaggcccatgttgggattaggttcgcctgcatgagacagaaatctccagataacagtggcttaaccaggagggatgctgatttcccttccacatcagtgaagtctggaggaaggcaggcagtctgtttatggtggctccaaaggggtgttggggccccagacctactcctgctttctgctccatcacctctgtggtgtgtccctcatcctcatggaagagaagacacctagacctccagccatccatctctactctaggcagcaggagaaaagaaggaagagaagagtctggctgttaggtatgaccagcagtctctgtgttgtagaaagactccaaccatgtccttcctccacactgtctccttatcctgtacaccctgtctgcatatctggcacctctgtgcacctggccacttggcctgggggtccacaatagagactccagttttcccaccagttgttatctatcaggcaggaccctttcacttacaagagacagaaagcccagctaaatctgcttcagtaaagtgggattttataggctcctgtaaatgaggagtcctggggcagagcaggcttgatatggggctcagatgatatcaccaggtccaggtttctctctatttacagatctctgcctccaccttgctccatccttgtgagtgcaaatatcaacatctcaagatggctgtagtggcagctctagaccgcacattttcacacatttaagagcaacaggaagaactattttgcccagaagattcaataccattttattggttttgatgggatcaccaaccactgtgcccagggaaatggggtttaatgactagttgaggcctgggtcacaggagggcatcccactgaatctcactaacttggaacagccaagaacctgggccagaaatacagtgaatgggtgagcagggcagccaggaaacaaggaaacagtgctgttgaacatcaagtcctgtcgattccacctttgttaactctctactctggtctgtgctgtcgtcctgcccctggtagattcaggagtactgcaacatcctcccttggtttcccacccaccctacatgctgctaccaagagttctttctgaatgcaaatgtcactttatctctctcctctctaaacccctttagtagttcctgttgcttacagaacaatctagatcagtggttggcaaactatagcccttgggacaaatcaggtttaccacctgtttttgtatagcccatgaaataatggcttctatgttcttaaatggttgaggaaagaaaacaaaagatgaatgatgtttcatgacgtggaattacatggaattcaaatttcagcgtccataaacaaagcttaaccagaaccatcgtgttcatttgtatacaaatggtctgtctggtgctacaacagcaaaactgaatagttacagcagagaccacacagcctgcagagcctaaaatatttgctatctgaccagttcaccgatcctggtctacactctttagctcagtgtatgagatgcttctgtgatccggcacttggatccagctgctccgccctccttgcagatccctgactattccctgtccctgcatacctctgttctggctcgtttgctaaaacaccctcctccatgccctgaagcctgttcttctgcttcctgagctctgctttaggtttcccctaacccctcttcttccccttgcccttcagatgctcaacctgtttgtggccgtcatcatggacaactttgagtacctgactcgggactcctccatcctggggcctcaccacttggacgagtttgtccgcgtctgggcagaatatgaccgagcagcatggtgcgtaggcccctcggccgccccagcggggcccagagcaaaggtctctggagttcccagggaagaggctggaattggagccacccaaatgcctgcctgttacagaaggaaaggagattcctcttgattgtggcccatagaagaggctctggtatcaagccagtcaccaaggacttctgtatcctcctttcccctctctttccttctgtgacagggttttccctttgtgggctggtctcatcatccagtcctcacctcagattatttgggctcagtcccaagagaactttccaataatctttttctgccaatggttagtggactcctttgagttatcagggggtttgacaagggtttttggccagctggacatctggccaccatgatcagtgactgtgttttctctttctcgttcctctcaacagatacagttggatataactctgaaattattttttaaaaaccaaacaagttgttcttccaactgttcccttaaatatttgtggatttttattacatggaactaaattaaatggtaggaattggtgaagataacttctttactgtctcttttgctgtttagtagttctgaagtgatagcgtgccttctaggctctagagcagggattggcaaactacatcccatgggcaaaattcagcccattgtctgtttttgcaaataaagttttattgaaagacagctcaaccattcgtttacgtattgtctctggctgcttacatactacaaggaagaggtgagtgattgtgacagagatggtatggtcctcaaatttgaaagtatttactacagaaatattaggttggagcaaaagtaattgtgggccatttttgcaacaacctatatattttactgtcaaaaaatttactgccagaaacatttgctaatccctgctttggagtataaaggcagcattttggccctcatggctgaggacaaggtgagagttctatgaatgcttactccaaaggaactgttctgttccaggtcattttagcttttgggtcttaactcaccaatcctctatccattctggtccccctctgaaaaatactacaagaaatgttatcctttacaggcatggaccaagttgcttccacctggaacccccttcataatcagagacttttcccaaaaatctatcctctggtgaggctgttgaacttgggtcactgttttacagactagaagggtgaatcagaattctttccttcattaattattaatgacttagggtacagagttatctaaatccattcctattacaatggctgagcaacagctttttctttctggtcttactttctaataaatagatcttagaaagcaatgggcagtgtgttagaggagaaggcagccaggcctgcgtgtcttcagctccatggccttggacaagtcacgtaaccactctgggcttctttacctgtaaaatggtgatcgtgatacctacataacttgcaaggtgtttgtgaggatgatattaaatcatgtgtaactgttattataatcaacaataaccacacgggaatgctaattggaatgtctagaaaatcagcctctgttaccatggatatctatgggattgggagcctaagaagggacctcttcactcacccaagaggagaaaccaactgtgagcaaaaaagtccattgttcatctgggctcactcaggtatccttggcttccagaaaccccagcttcttgtggtttcacttatcttgggatccaaatgctgtgtgtataaaacatgctcctccctacttattccagttgctgggaagaaatgattccatgaggatgaatcatgagactcagacgtgtggactgggaaagagcataaagacaaagaagaatttcttctgtgtgctttgtaattcacagtgtaattcattctagttagttagagtttggttggctttctttataaggtgggtgaggaagactaacaaaagtaatgtgagccagtgtcttcaaaaggggggctgaaaccagttgcaaaaaatgtcagtctatagccactcccaacccacctacttcccaatctcactaaggcaaaatgaaaggacaactggctaaattacctcctctcaagagttgagagacttggaggtactgatgagctgctatctggaagaataggaggaatcaaccctcaaatttcaaaaagcctagaaagagtaaagctgggctgaagcaatagtctccagacagttgcaagcaaggactgaatgcacagaggtggagatgttgtgcttataatttccagcggaaaccctggtctgttccagggtgtatacagacctgcagatccctgggtgttgcttctttttctggacgctgacagagaagatgctgtagccactgaaaattaatcaatcattaattctatcccttccataggaagctggtactctctaatgggctcctgggaaaagggttggtaagatagctagaattctggctggctccagccaagctgctgttggctgagtggcagaaagagggctgcggggagagtgtccatggcttcctccctggctgctctctgaacacagacctcagcaggctcctactgagtaaagaagacttgcccaagctgaacgcagaaaaatctgtcacaaagagaaacaaagccctttgtgatttccctcatgccaactgtgctccttgctaattagcctaatgggaaatttgtctcttccagactgcagaaagccgctgacttcccactgcccctgaaaagtgggtctgagtaactgactgtaatcagtgtctgtgaaaagcaaacagttctgcagtccacttcaaggcagcctgacatctgctctggacagcggtctgagtcatttgtgaattggcaggctttgttcctagaagcctagctagagccagggctgtgtctgcatctggccaggtatggtccagataggtataatggggtgctcttggtcattaggcagttccctttggcattgaccaggctctgatttccttagaaaattgcagcagtgcagtttggcaaggtaatggttctctggtgcttactgttttcagtctctcctggtctggctttgccaggcccaaggaaagaagctgctctgacctctttcagccatcctcttcatggctaagctgtcatttcttttctacccttctctgagtgtcctattaacccacctgtgcttcctttacagcggcaggatcccgtataaggatatgtacaaattagtgcgggtgatctcgcctcctctgggcctgggagagaactgcccctacagggtggcttgcaaggtttgcctcccagtccccagccatgatctgccgtgggatgcaacatctaacccctcctctctgtcctctgctccaccaccactgcgccacatgagggaaccttcatgttgctttcctttgagtttaaagaggtccaaacccttccagaaccagcagctgttacataaagataagggcatactttggggaaaaggcagaagagttaagaacttcatgtgaagaccagtgtgatcgctctcttcacatgcacacactcatgtatgtgtgtatatgcacatgtacacacacacacacacacacacacacacacaggtccaccttagtctgtatagttaatcagagggacctctcctttctctatagaatgcagaaatatttttaacccagcaaaagaattctggcttcttttcactggagatggagaagcctcattttagcaaaagagcctcatcgtcccatatgtaatgtatggagtatgatcctagtgatcccaccctcccagctcctggatggtctggtcagaatgactatgaaagctataggacagaaggggtgagaaacaaggaattagggcaagaggtgagagtaggtaaaagaggcatggatttggtgctgtgtggaagaaggtagtaatagctcagagagtctgggaagatcacagtgaatgaagcactactgagagagtccctaccttagggtcctgccatgggttgctgtgagggatctgagggagctgtcataatttccaagtcacttcttgtcagttacaccaaggatattgttcaggggtgagtaggacctccctgctcaaatctgccatacccagggaattctctatatcccaatggctctactaagcccctatgtgaggccaagcctgctaggtaaggaaccctctcctggtgcaagtggagggaagcatgggctccctggggcatagcactgcccaggcagctggaagatgacctaggctcaggaaggatgccagcctggacaatgggatagagctggcctgggatggtgacacggtgattccatactcaggaggctggacagctgcctctgctgagactctttaaactccaccctggtgaaacccgcagccgcatgtgggagagctggggagggtagcatggcatgcaagatgctcttcctcctcctgtttttgtttcttctgtccccagcatgccattgacctggcacatgctggggaataaagagcagtcttgtccacagagccaggtggaagcaacggggccaactctttgagcagcaagcacagcccaccaccttcagtgcaagacgccgcctcctgctgcacacacacaccagaggggggatacacgacgttctgcctgtgggttcagtggagaacagcctgacttccaggccagcgccccagccggggtcagaaactccaacccatggctggagcaccgtctatccggtttataccactcacacacagccctgggaattgaaaataagctgtgttgtattggggagggatgaagtgaacagggaagtcaggggaatgctaatcgaggagaaaatgagaccccgtgactgttcccatggagagtcatagggactgaaggttgccaccagttttcccgggtctgtgtggggcgtgatataaaccgcaccaggatggagtcatgtctacgatttgccttgattaacaggtttcctattcttttcccgtttgtccattttgttttgtttttcttctcctgttttctgtattttgttcgtttttgctctctgggaatgcctattctcctctcctatctttctgcatccttctccccacttccttctcctttccctgccaccccactgccccgctaacccaccccatcccaactcaccaccctccatgagcagtggccgcatccattacactgagatgtatgaaatgctgactctcatgtcacctccgctaggcctcggcaagagatgtccctccaaagtggcatataaggtagaccaccccttcctttgctctgggctacagaccaacaggaaatgggatctagttgtggggaggccagaacatggggaggaagccaggctggggaggtggaggagggaactaaggaggaaaggcacgatgagactgaagagtcaggaaggttcccaggaggacgaactcatgagacaatacaaggaatggtttttaatactgttcaacatggttttttatgtgatattttgtgtttctacaactgtgtggcttcttgtgagtgagttacctgacaagcagtgttaagtggtgtgtttccttttagaggaggcagagtggtggcctgtgggatggcatatatgggcaagaaggaagcctacagcaaaacagctatcagtgctcatatgcaaagaaatatcttcaatcagataaggaaatcatgcagaaattcctttaaacgtggaattgttaggagaaaggaaaattcctttaaacaagaaatttttaggagagaggaaaactcataacaaatgttttcacccatgacataggaagaatggcataggttccttctaggtgtaagaagaaaagaggaacctgtcttccatcctgtgatagactgaggaatgcagctctattccactagcccagctacccaattctcttggaaatactcaaaaggaagggaaataatgggcacaagttgtattcagcattaaatttgacttactggcataacatagttatggggcctggccccagagttatgggtggattcccctatggcttgctgtttagagattattgtacactgggagtcacttgcccttggggtgctcatagcttttggacatgagttgttttgccacccattagtaatagttactgttagttcccctttgctatttagactgacccagaactctggagctctttcattcacctaggaacacatcatagtaatgtttccacttctctagatgtttaaagaagtgggagagagatggaactcaaatccaaacaagaaactggctttccactctaagacaccatgtggcatcagctttaggcaggatgctgcaatggaacattagagacccttctttgggaagaggtacttccctctctgccaggctggtggttctgccagaggacgttctcctgctgctacctcacattgtatggccccagatagcatctcactggaacatggccattagggaccctcattccccccagtacatggctcctcgtgcacagcttaggggctggcatcctttttgctcacgatggccacatccaaaagtaccaggtggtagaatgtggccttgaatttgtacctctgggatgaagcttggtgggagaaggggagcggggattggaggaaaagttaaagagctccaaaagcaaaatactctctggaaagtggatttggccatttcagtgtgatccctttctttgggtaaggggaacaaggcctgcccactctgctcctgcctgggccacccttcctcgttctgtctcctccgctctccccatcctcctaccccagagcctgtttgcactctcccccttgtccatcctgctccacctcatcctttagacaagttggacttatgcatgttcaatcatgtgcgggcaaatttcatctattaaagactcaaaaagggggcaccaggatacatctttcaagttagataagcaaagcaaaatctcatttctcactgtatttccatatgagtttcagggggtattcatgggacaagtggaaatatggagcagccttgaacaggaaatggagccacctccccgagctgactcctttccttgagccacttcttttagaaatcacttcccatccctaacaaagacattcttaggactccaagggggggccttactgaatgattagggaagccccttccctttggaatttggcatcattcccttggtggagaaaaaacaaacaaactacaacaacaacaacaacaaaacagcagcaaatgagccttaagtgagaagcagggagagaaggactggggcaggggatggggatccttgcccttctttttcgtctgtgcatttgacctctacccttttcttcctttctcactgagatgtctttcaatttttttttttttttgcctgctgtttcttttttctctttcacacagaggttggtcctgatgaacatgccagtagctgaggacatgacggtccacttcacctccacacttatggctctgatccggacagctctggacattaaaattgccaaaggtaagcttaggaagggaggtgggaaggaggaattctggaacaactcatgcaggtggcacaggatggagatatttgaactgtcatctatccagttaaggacacaacaatgcagtcatctgaacatcaagtatctgactcaataactaataattgccctttccttctggtacagtgaatggtttgataatctctagggcttctttcagctttaaaagtatatgatcttcagtgtctggctcacaataggtattctagaaatatttattgaccagaggttaattttgtcctttttttctgtatatggtttattttctctgaagtcttgagaggcttctgtggcagaaggtgctgtcatagaggccatggtagtgttttattcctcttgatttctaatgattgatttaggagagaacaggcttactactacttccaggtggacctttagcctttctgcttttgtgcaatctaaatcctttttaaaatcaggtcactcagactatggagttagggttgctggagggattgatgtatggataagaaggcagaggaacgtacttgcggctattgttattttctcctctgatgtattgagcacctgggaggcttttagaacgaatgaggaagttgctcttagtctgagggcctcagatctcttggcaggatatccctgagtcactgaaaaagggagccaaaatgtgttctgcttcttcagcagaaagacctggtattgcaagatccactgtcactcagtgccaagatttcctcttaaaatatgaggtgccctgctgattcagctcctaccttcacctcctccctcagtcctggttatttctgggtctattctatttattagtaatttatcttattctaggtggtgcagacaggcagcagctagactcagagctacaaaaggagaccctagccatctggcctcacctatcccagaagatgctggatctgcttgtgcccatgcccaaaggtttgggtcttctcctgggtatccttgtcactgtgggcccagcatgtgaagactacgtctttggggggaacccagagtgatcaaagagataaggaaagtttgcccttttcaattaataaggacaaaagggacttaaggataaaacatgttctttaagataggtcactgtggttgtggatgagacttcctgggtgtatagctctctccctccatataatactgctcagcaaaccttcatgggagaaaggatgttgtcacttagctatagagatttagaatggtaggcgtgatgcttactcatgtactgcttatcctcagtatcgtcaccatcactaggtgggcatgcaagccccctgaggacagatcaggggatctatgcactctgcatcctcagatcctggcaccatgggggccctcaatatacattggatgaatgggtgactgatagcacagacctgttccagagagtgggtaacaaagcttagaggttcctcactctctcccattatctactccctgttcaccatcatgccacatttgtgtttctagcctctgacctgactgtgggcaaaatctatgcagcaatgatgatcatggactactataagcagagtaaggtgaagaagcagaggcagcagctggaggaacaggtgaaagtcaatgccagcatgctaagtgggtgggccatgaggagttgcaggagggaataggcctgtgcctccctggggcatagtgcccggcaaggacttagaagcagcagtaatgggtgcggggcccaagaactttctagtgacgtggaattagaaacccagtggatcgaaggttaaaatggtcaaacaagggataagttatgtgcctgtattatccatgttaattttattttccccacagcaaactccgtagtcattggaattctttccttcttcttccctctttttacccagaaaaatgcccccatgttccagcgcatggagccttcatctctgcctcaggagatcattgctaatgccaaagccctgccttacctccagcaggaccccgtttcaggcctgtgagtagcaccaaaacatccctggcatggctgtttgcaatctgtcacccatgctgttgtgcagaccccaaaactcactgctcagaagggcccaagaacaaatactctgagcttgagtgatcctttttctgaagttgaatatcttaaagtgattttcagcaggagtaagagaaaagcagactaagcatacttagcactgtggtcaacgtcggtgatcactttgaatgaacaatagaagaagggagtttgacttcttttaatatacttgggtcttatagaggagattatttttcttcacaacagaactacaactaattcttgattatcgcttccccgtggatctagtgtcctgctggaagatagagcctccctcacaggtgccatgctggctgagtgtaagaggggaataaaaccagcagttactgctttccctgaggttgacacttatagagacactatttgcagaatctcacttgattcccactctagcagcctactataccctggaggtatatattaatatcaccactttacacatgaagaaactggagactaactgaggttaactacgttgcctaaagtcctgggtagtagaatgtggaactggaatttaagttccttatttctgaccccagagtgttttcactataccatgttttctttaatgaacaaaagggaccttattcagaaagggaacttactttttctataataggagtaaaaataaaacacaaattaaggaattttcccatccttctgagtgataagcctttgccccaattaatctactatagcatatgtatctcataacattatatttcgatcatcagcaagcatttagtgcatacctaaagaacacaagtatttctactcaatgtaaatgagcttttgtgattgggtttaacaaagtcccagttcttacaaaaccaggaatcaccaaatcgcttatgttaattactaagagagtgatacttagggcttgggaatgagacttctgtcggagtcatttggaattgctcagatcattgatttctttctgcctgtggggctggactgtttttgaaaagcactgttttcagagatcaaagtccaacatctttggaagagaagaaaaggatgagagtcatgaccaaggtcattttttttttaaataatttgatgttatgaagtacagtgtgtgaattctcctgtccacagaaaacaagtcagtgtttatcttctgcttgtgtaggagggagggagggaaagaagtatgattggaagagtgggacctcttcactggaagggtttacactgttttttgtttgtttgtttttttgagacggagtctcgctctgttgcccaggctggagtgcagtggcacgatctcagctgactgcaaactccgcctcccgggttcatgccattctcctgcctcagcctcccgagtagctgggactacaggcacccgccactatgcccagctaatttttagtagagacggggtttcaccgtgttagccaggatggtctcgatctcctgccctcatgatccgcctgccttggcctcccaaagtgctgggattacaggcttgagttgtttttgttttggcagtccttggcttagaaatgggggataccaccccctaaattgcaatctctgtttatctacaatttgctttacaaattaacccaccaccataggatcactctgtcttttctccatgtatttattgatccatttactcattgatttttaccaatatttattaagagccaatatgtccccagagctgacttaggcactggggctatggcaaagaacacgtccccatggagacaaatctggaagaagaaattacaagagcaatacaggcaaacgatgctgaagggtgggctgttgtgatgtcatggaaacagctcactcagtttgagggtttagagagtccttcctgaggaagtaacatttgagtgagacttgaagacaagctcttcaagagtggtaagagaaagtatggtaagtttaaggaacctaaaaactgtcatgatggttggagcatggagagctcaggggatgtgttaagttatggatttggagagatacacaggggctagtactttgggggcattataagcaggataaagaaattggattttgtctttggataatggggttttatgcatcagaatcatgtgatcagatgtgtgctttcttgaattcagtgtaggctaaatggattggagggaagcatttctagaggcaggaacaccatttcgtaggttactgcagttgtgtaaattatcagtgatagtagcttggactagcaggatagagatggagacagatggtcagatgtgagaaatttggtagataagactggataggatttggtgattgatttgctacttggactaaaggggaaggaggaagcaaaggattctgggtgaagcctttgggtgcatgttggtacatttcctgacattgggacactggtggaacagcaggctggttcctcagaaccatctgtgtttctagagccatgcattgttcagtagaggttgatctaggggtatagtggtagacataacagatagggtcgctccctcaaatatggtggaaaaccagacattaaacagaggattattggaaagaagaaaagttgcattttcagtgatttacttacagttctgataagtgctagaaagagtttacagagtggtaggggagttggagagaagtgttctgcactcttagagtggcctctactaaaatctcgaggcagaaacaagcctagcctatccaatgaactaaaaaaggccgccatgtctggagttcagggagcaaaggggaaagtggtacaagaggaggctagtgacgtagggaccagatcatgagggaggctgtgttcagaattctggactttatgccccggcttgacaaggttttcaaagtaggagatcactctgggttccagttatttaactctgtgagattattaagtgattccaagggtcctctccctctagtgaggattctataattatttactctctgtaggacaaaaaggaacccatttctttctttctgagacatgatctcattctgttgcccaggctggagtacagtggcacaactggctcactttagcctcgactttctaggctcaagtgaacctcctgcctcagcctcctgtgcagctgggaccaccccaggcacgtgctatcactgctggctaatttttttgtagagacaggtcttgctttgttgcccaggttggtctcagattcctgagctcaagctatcttcccggttcggccttccaaagtgccgagagtacaggtgtgaaacacagtgcaaagccgagaactcactcattcttatactagctgtgctcaatcttgttcccagtggttctcaggagatgccacaagtggggaagatgactgacatttaggcaggtcatttaaatactgtaaaaactctgtagcagctgtgaaaactcagcaaaagctctcattggaagcaaggggacagattaggtgattctctgctcttcatatcttctcctgtaatctaaaaaaacattcctatggattgtttttaagtaattggcaatccttgctcatgccttgagttttccattggatgcagagtcatcagcagtagacttaaaagagatggtgtcccatctctccctcctaactccgccaccaagagagctgctgcccagccactgaccccagtccttcctcccataatctggaagctcactctgcattcttgagcaggtcagatggtagctattaccatactggtggcagtcagccaataatttggcaacaggcacctcattctccagaaagcttggctgcttctttctctcctaacaagcccagtggatcccgtcaggttaagagtatctggaagtactagacagtggtttaataacaagcctactgtgccagttctgcattcttttcccttggaggcctctaaacaactgggcagactttgtctccatcctcttttctcaccaccatttaaacctcttcctacattgccatcaaccaagaggttttcaactcctcaccaccacctctgaaatccttctcagttcatgaaccaacagacttaatgtatggtacaaagtagtccttcaataaatggcaatggaattggacttaattgtttagtttggccagggatgttggcgaaataagaccatattcttactgcgagtagggaaaatttttaaaaagtccatggctgcttaatatttaaacaaactgttcactgtgtaaactagggtgtttttccgccaaatggggaaactgagcagaaataggtttacaatctagtgttgctcttccatatggctgaatgtgacaaatgatgtcatttgtcatagacatgctagcccccggcagaataatgaatggtttcaaaggcaggatgcaggttgaaaacatcagtttctgtctcttctagtgcttttttttttttttttttaatttcaggactagccacatgtaagttactaggtttacaaaagccagccaaggctaaagggtgttgccctgctggggtgggaattgctagtggcatgactgtccctcattacctctggatttgacattgcttttcaggagtggccggagtggatacccttcgatgagtccactctctccccaggatatattccagttggcttgtatggaccccgccgatgacggacagttccaagaacggcagtctctggtgaatgcatgagttatatgacctcaaaactacttccttggtttcctgatccctctcactaattttattacatagtcatggtccgtcaggaaaatccattctagtagtttagccagttgccctggaggtgtcctgccttagcccttttctagcccagtttctcatgtgctctgacaatgttccctcttcaggttttacagtcccagaggtcccttccctgcagcaggaacttaaattgctttaggccaagccctcttagtttatgcccgaatatcaagtgtaagaccggaagtcacttataaaatcttgcctttgatggggagcttgaagatgcatcaccagagaatgagtgacaccaaccctgcctcttagtgtagttaggtactgcttgtgggacacacaaatgccccatgccattccttagtgatgcccacctcctctagaacctagcagcagcatgtgccacagtgatgagctgcctgccaggaggcacagaagactgtcttacctctgctctgtgtgggttcaggcacattgtcccttttggtcacaattcaaagacattctaacaggccactaaagtcacttccctgaccccaaaatgagtttattagcataaatggtgaaattcctggctgggtgcggtggctcacgcctgtaatcccagtactttgggaggccaaggcgggcagatcatgaggtcaggagatcgagaccatcctgggtaacacggtgaaaccccgtctctactaaaaatacaaaaaaaattatccaggcttggtggcaggcacctgtggttccagctactcaggaggctgaggcaggagaatggcatgaacctgggaggcggagcttgcaatgagccgagatggcgctgctgcactccagcctgggtgacagagcaagactccgtctcaaaaacaaacaaaaaagcaattcctgagagacctattgagtcaagtgaaagcctgaagaagagaggagagattcaagttttggcttagctaatacaaagctaaaatatggttcctaaacatcattgactttaccattattcctagttcaggagccatgagctcaaggtcccccaccccgaccttagcttagaattgaagcccaagcagtcactggactgaagagaaaaaaagacaaaacccaaccattgcaaaagtctgtacagacagcttgtactaagtgagttccatatcatttaaattctgattcatctgtggctcttctctccccttcatttctctcctgatccctccccgctgctactgtgtacctcagagccaccctgaatgatgtgtgatggaatgggcacccccacagagggcgaaaaacactcagtagctcaaacaaatgcgtgcttctatctcctgcgagtgctgagacagagaatcgtgcatggttgtgtgggggagacagttagtccagacgcccccagggctgagcaattgactgcctgagggtgttcttgatgaggcaggtaggaactagtagagtcattctctgccctcccctctgaggaacttagcaccaagacctgtggaataataaactatagatagtttgattcttaaaaagacctcgcagcattttgcctgcctggcgatgtgtctagtgggaaaaaaatctcaataatgtgtcctttctttcacagggagactttatgacatcatttctgcgggttccccagggctgagccgtagtgccaggactttttggatatgtgttcatctcattgtcagtaccagtgtctgtaattcaatttaggtgtcagcctgtgctacacactcaacactgtgtacttctgcccatccctcggggctgctgctccatgtccccaggcgtggccatgattgtgtgtgtgcatatggagtgtgtgtctcacaccacctctgatacctgtagactgcagtgttgttaccacgtctgtctggagtcagaactgtgtgctatacaaagcatgtactacaaacaaacactataactccctcaagtgcaccatagcacatgtcttgggaaagtacccctgccatacacaccagaaaccgctcagccaaatggtcacataggctaaggtgggggtcccagacactctttcctttgggcaatgccctacctgtttttagggtgtcatttcctaaatataaaatagctttttctggtacgatctccatctgcccaagatgttcttaggtctttttgttaggtagcccacgtaaacatctctcatacagctctttatgcaatgatactagctatctgtatagcgcatgcacagctgccaaacaagaatgacagaaccttagagatttccagtccaacctgataacactgtaggctggcacagtccaaaacaatagctcttagccacatgtggctagtccaaataaaatataaactatctaatttttatattgattacatgttgacatgctactatttggatatattcagctaaattaaatgttattaaatttcaccttttacaacatggttaacaacatggttacttggacatttaaaattctgcaagtggcttgcatcatccttccatgggactgtgtcactcagggcatccctgacagccacccaccacatctttggatggtttcaatcagaagaaaactcttaacgtcacgtgtcttaaggcttgagaagacgtatttgacatcagaaattgttgacttcccttagaaaactggtttctatttaattgataaaaggcttcttcagattaaaagaataaatccaatgctatcacttcttagaaagcgaacttcacatatctgaaaagtattataccaaacagtgtttgttgcagaaaacaataaaatctgaatcattgcttagtgatgaaaaagaggaatctacaccagaaaaataggtgaccttcagcactcaatcccagctagagcttcctgtccggaacatatagcacataggtgcacataaacacacacacacatatacatacaactgagaccttaaagctgcaagtctctcttttgaaagccattcttgaggaggctgaattgtccactggacgtgagaagcaatgagatggaaccaagtcccacaagcttggctgtgtgtttatttccaggagccagaggttagtgaattaaaaagcgtgcagccctctaaccatggcatctaccttccttcggacacccaggagcatgcgggatctgggagggcatcttctatgccacgtctgactgtggatccccaggtaaaaagcaaccacctacattaatgcagtggcatccgggctgtattagctgggttatggaataatatctgatatttgcaggtgagccgttgacttgcccgcaccccttccctataaataaaacctggctcatgggtcgtctctaatagagcctgcttctccggtgttttcaatgaccccccctaaccacaacagcccagcgaacaaaattgcatacttcactccggacgggttaaacattctcaagattcaaccagccatgcaagaaatattttccaggattttctctgtgtacttctccatcctttttttgtttcctgactcctccagcacatatgcagttacttacacacacaggtctgtgtcaggactgtctgtcctaaccagtgcaggccacatctcatttctttgtctgttttcctggcttctttttcctgtctgtcggtcttacatcaggttttgacagagacaagaagtttttgtagatttgttttaatatctgtggcaaatcaaaatgccagaatttaaaacggggctaggtgggattgatggcagcagagggagagtgatacattcttagcacttgttaaattgcaagctctcctaggctctagtgctgcagggcagggccttctctggcaagggcgtttaaaaaaaaaaaagcaaagccatgcttctttcatgaatggggtggcctcttagacaattgccctcacatgtttcaaagcagcacagtatttgctgcagcctggctgcgccccatggtagagggctctatgggagcttgcacagttcctgcctgcattccgcatggctttgccttggtacactcagctacagaagaaaagatcctggaccatttccagtgactatattaacataatgtaaggatgctttcttgaacagtttccaccagctaaggtttgagcaagagagattcaagggaagttaccatttccaggggttacaatttgccttccttaacgtctcagtcttgctgcttctgtccttttagatcttttcaatcgttaatccataccttgtgtttctctgggggcttgtatttccaggtggtgacagaccctagctccatgagacgttcattttccactattcgggataagcgttcaaattcctcgtggttggaggaattctccatggagcgaagcagtgaaaatacctacaagtcccgtcgccggagttaccactcctccttgcggctgtcagcccaccgcctgaactctgattcaggtgaggaggtcttcagtgtccagctctttcatcaggcagtgggctcctgccctgatgcacttactctccaaggactgtagataaccagaaaagaattcagagacaagggctgaagaaagtgaaggatgctccttaccaaagggaattcctgtatctgacttacatcctgaaacaggccaaagccctcctctgtgttcaccggaaaagctgttgcaatcccttccttctggagcagggctatacaaatcattagaattgagggagcttttcaaatagccttctacaaaaccactggggctttttaggattgtattagagacccactgtaaggactgaactttaaccaccagttccacttcaacctaaacagtgctacctggagttatttcctgtgtttgaatttttttttttttgagacagagtttcactctgcagcacaggctagagtgcagtggtgtgatctcggctcactgcaagctctgcctcccgggttcacaccattctcctgcctcagcctcctgaatagctgggactacaggcgcccgccaccgtgcccggctaattttttgtatttttagtagagacggggtttcaccatgttagccaggatggtctcaatctcctgacctcatgatccgcccgtgtaggcctcccaaagtgctgggattacaggcgtgagccgctgcacctggcctgaatttcttttaagctttttgctttaaatatatatatatatatatatatatatatatatatatatatatatatatatatatatatatatattagtctggctcaactattttgttttattggataaaggaatcaaagttgaaaaagcagtgacttgtcccatgtcatagggccattaagtggcagaactgggactagcactgggatcctttcatttcaatcctggacttctcaccatagcattatgttaggtgtgttattatttagttcatagaaatttcttaattcccttctgctggtgccaccttccccccaaaaagttatgcagccatatttatgatagagttcctgagccatattgttaaccaagatcctatattgtgtgtagcataaatagaaacagaatagattgcattgtttgacatatgtgtctctagtggcaccttgcaaacttacctgcttacaaaataggtaatttgctagcctgcctttctcccctgcttccctttcagatcatcttttgacatacctggagaagccaggattcttttaggggcctatcttttttcaggctgctacaacaaattaccacagactgggtagattcaataacatgtatttgtcatggttctgtaggctgggaaatccaagaccaaggtaccagcagatccctgtcttctttctattctcacatgatggagagcagagagacaggaagcaagcactctcaggcctcttcttatcagggcactaatctcatcatggaggccccaccctcatgccctgcctcctaataccataccatcaggaacaaattaggcctcaacatttgaatttggggggggacacaaacatgtggttcctctgagggcccaaccccaggctgtgatgtgatacttggagagaagtcccttcatcatcattggtcagagtggacagagttataaccaagtgcttttgtcacctctcacaggccacaagtctgacactcaccgctcagggggcagggagcggggacgatcaaaagagcgaaagcatcttctctctcctgatgtctcccgctgcaattcagaagagcgagggacccaggctgactgggagtccccagagcgccgtcaatccaggtcacccagtgagggcaggtcacagacgcccaacagacaggtgagcgcagagaggaagccagtctacagcagaaggacaggggagggtgggctgtatcattagatgcaagtcgtgagcatttcgcaaacgcattcaagtacccacaaagactggaatttcacaggaagctatacctatagtgcatagaggttagctgctcaatgcttgtgtactcagagatgatctgaattcacagaaaaccagatttcccccaaaaagatggtgtctagaggtcattccattccagccttcagaaaccagagatataaataggttgacagccagattttggaggagaggatggtcctttagccagaaagtttcctttggccatcttgtgatcctcagtatttgtgagaattgtgattcatctctcagcccaggattcacaagtcagagcagttcaccctcatttacctagcttgcagccgtcccagcaagatcatgccttttgctgaaccaccagcttggtgcctaaggaataactatcagatctgtatgaaaacattcatagactctgttttactccttactacagccctatctctagtcatggcattttgacccataataggagaccccctcaacagaaacgatcagcggagaaaaggcagggctgctaatgcaaacctttagagacacagcagtcgagaggtttcccttctagaacaacagttttcaaattttagtgcagaacagcattaacccatgaggtttactagcactgcacattcctggtgcctgaaggacccaggagtctgcctttgaaaagacccctctgtaggattctcagcaggaggttcgtaggtcacacataccttaagaaatgctctcctggaggtttacttcccaaaacctgggctcagtttcccttgggaataggtgagggcaagtatggcctgagccaacaactgagtgtatcaggtacagaagctgagttcagcaaaccacagaagacatgggcaggaataagggtttcccagccagagcaactccagcatttgttcaccttccacagagttgtctttctcaagtttaaagtctctcttttagtgtgccccttgttacatatgtagagcttccttagtagtccaagtgcttgttccacagacctgccacccctagcatcacctggaagcttgttagaaatgcaaaatctcagtccttgccccagatcttctgagcctgcatctgcagtttaaccagatccccagaggtttgtatgcacaaagtctgagatgtcctggtctaaatgttcttgactccttaatctcttcaatccctttttccctgagtggatgtgaatactacagggagctccagctcaggcctctccctgacagaattcagattccaaggactctcttaacagagttgcaagtagggatcatgccaagcccaatctaacatgccatgtctctcctgctatacagggcacaggttccctaagtgagagctccatcccctctgtctctgacaccagcaccccaagaagaagtcgtcggcagctcccacccgtcccgccaaagccccggcccctcctttcctacagctccctgattcgacacgcgggcagcatctctccacctgctgatggaagcgaggagggctccccgctgacctcccaagctctggagagcaacaatgcttgcctgaccgagtcttccaactctccgcacccccagcagagccaacatgcctccccacagcgctacatctccgagccctacttggccctgcacgaagactcccacgcctcagactgtggtgaggaggagacgctcactttcgaagcagccgtggctactagcctgggccgttccaacaccatcggctcagccccacccctgcggcatagctggcagatgcccaacgggcactatcggcggcggaggcgcggggggcctgggccaggcatgatgtgtggggctgtcaacaacctgctaagtgacacggaagaagatgacaaatgctagaggctgctcccccctccgatgcatgctcttctctcacatggagaaaaccaagacagaattgggaagccagtgcggcccgggggggaggaagagggaaaaggaagatggaaggacaccatgcattatcagagaagaggaagtaaaggacaatcagaacaccagtcaaacccaccaaattgctttattcccctttgcaagatgggcactgccatagttctgcctctttgctggggaaagaaaccaggaacgtggagggttattactgcgggagaagggacacgaggatggctttgcttccccttgccccttcccacttttctaaaagctgtggagggatctagctggcctatgtctacactcagtgccctgagaagcctggaagactttctggctcttaactggggagtagtggagaccataggagaggactctcctccctcaccagctcttacgcctcagccagcaccactgccaccagggcaactgcagcagcatctcatgcataaccctgtggcttgcttcccccagggcagcacaggctaagtcaggaacatcggatgccagggagggaggagaaagccgaagcgaaaggggtcagggtgctgaggcaacagcagcaagggctggtctggacaagaaaagccatagcccggcagcccctaccatgagggagacagagaaacagaactggtggtgctggggggtatagccccccatccttgaggcctgtcacccacacagtaggtgctgagagttaggacaggtcaggaagtcccccagggtccacaaaggtgcctgaggctctggtaagggtgaagataaaagtatttaacaaccgctatggcatcaatgtaagtggagtttggtcctagtgccggagcccatgctattccaggcattggctctttagatgccagtcatgggggaaccctgagggtgtgggtagagtagcaggggccacctaagagattaaaaacagagtctgttttccaaccagtgtggaagcaattaaatatacgtaacagtgctacggccacaccagcacctcctggctgaaggtcagcccacactctggtccatgaggcagcaaggccagtgctgtgccaagcccggtaaggccaagtgccgaggcccagccttccctgccactcctctgagagggcagaacacacatatccaagtaggctacccaccactgggtagggatttctgtaaagatgggaaaggctgatagattgaaataagcttctgtgaaagtctggatttactgaggacctcccctgaggagggaccgttgggaccgcagattctgcagctggtgtggggttcaggtcagtttgtcaggatgctttaaggtgattagtaaatatacctcagcttagacttgggctgctccttctagcaaagcaggctccagtggggcctcatcatacaggatgacaagactggggccctgttcaccttgaacatgcccctgggccaagatggggcttcacccctccccagagtaagagctggggctgacagtcccaccctgtcattcctaatagcccaaacgcagaagcactgagcaagagagccctttcttgccaagccagtgctcttttggtatatggcatacagctccattggaggggacacatcactggctttatctggtggaaatgtacctttcccttaagttcctccttagtgccatcacagcaggtgaatgggtgccctacggggccctccttcccccaccaggaacagatggaacctgccacccaggatcctgatctgccctgcactgagcactcagtggataaacactcctccagcccagacacactcctcctcttgggcaggagcaatccagagttgttatttttcttagaaggagcctcttttccctctattttttaaattgaaatataatagctgcatcagccctgaaaagccaaattcaaccacatggctggagaatcatttgtcatggccccgccttctcttctgatactaatggagcttcatgacccacggtcagcccccaaaccaaagttgtcccaacagaggaggccagtgaggcagagacagagctctcccactctcagaccctcttttgtcttcattttcctctcccacttagcacatgtgtgcttgagggtggctgggaatgtgatatacagcaccctgatcctaacaggtgtgattgttacgtaagacgctgatactgggccttgtattgcttttaaagtttcctctgctcagcatcatttcatgccaaagtgctgctatgggctgctttgtgtgcacaaaattgctttttccacctcggaaatgcagctttccctagggggaggcctacaacaggacgaccattctgagccagtgagtctattgcatggtgttttgagaaagggaattttagtgacaccttatgccatttcaagaggagaaatgcaggctggcagagcaatttccagaaatggaatttgcctgcaaatagtataaacaacactaaatttactgtgccaggaaatcttcctgaactccttgaactcatacacacaggtatttgagtcctgaataaagtgttggaaagcactgcagatgcggtcacctgactgaccacctgggttttctattaccagtgaatttcttttattcaccttcccttgaccaagaaattgggtttcttttccctcagcctgcacttactcttctattaagaccagaaaataaaataattttccgttgagtcacaaactcatcatcttgtttggtgttctgctgcctctgaacaaaagtgaatgccagccttcccttgctgggtgtcagagtctgcctcccttgaaaagaggcccctgtagaccccaacacctattcttttctctggttaattacagcagcatctgagaaattccatgcaaaagaagactacaaccagtgtttcagatataccacaagatcaaatttgggcactggtggtccacctcagaagactcttgagtcatatattcagtttctcttgctaatatatgactcgtcttcaccatctcctcaaaacaagagcaaagccaagatagaggaaggtaaaaggaggaggaaaggaaaccaaggcagggagatgttctaagtaggtttgcatttagttacccctcatttcacttaaggctccagacagactccaggtagggaatgcatgctgtctctttctctgtgtctgtctccccatctcctagaggacagagtgccagcgacctctggacaggggcagggctccagccaaggtgcccctgagccagggtcaacatagaatttcctgccccgtgaagggctggcaccagctagcatccccttggctccacatgagtcatgaacacaattgtcagtgggggtctctgctgctcttctggctgaagaatctgtttttcttctgggcttcacttgtagttcctattcaatgtctccatagggcactgagatcaccaagaacattacccagaagctgaagtccaaatgttctagattttgacctctcttgactctggggccacaaagagaaggccccataatccacctctcagccagtatctcccttctttgcacagattcctcccaaccccatagagcctatgtggtgagcatgagggtcgtcttccctctgttctcccatcccagcctctgttttgctgcatgttagcgctgatccagctcctgagatggttaattccacccaatccaagcttatttgcttgcctgactgactccaccactctctcagctatgggggaatattgcattctaatgaaatagggtttggaactcacctggtgctcctcgcaagacaactgacacaaggtgtagggtgtgggggtggacaaaatgcccacctactggataaaagctcactgcaggaaaatgaggtctcctggcataatgcaacaaaaatctcatataattttgatttttaaaaagttgttctcaatttttcattacatcctacttctcagccctctggatgtttcatttttttggacaaagtgtttctttagtggttggggccagggacaggttgagggatatttctcggctcatttataagatataaatattatgaggttgtatgtaaagaaagggcaaacgtacagcagaaggggagcaaatagctacctttcaaggattttgagatttgaaggttaaggaatttttactgctatttttgttcatcagtttcatgtctgttatgttttgagatcctcagaggcctagggttagcgtataccaagaatcctggtgagaggcgttgccatgccttggggtgaattcttccccactagctctctcacccagcctacaagtccttctctcatagatcccagagcaatgggcaccgtccaggaggtacaggagaggactttatgatgcaggaaagaaggaagaagtgggtcccttgcaagtggccagacagggaatgatggtttgactccagaaatcaggaatcaggttcaggtttggataacttctctttaaaatatctccacattgagactcttattttaacaaaatccaaacaaaattaactcagggcttgtgacctaacctttgtaagaaggtgatcaaagagatcctacattaataagcactgcctgtagcaccagctttgtctttttgtcttttgttgtttctttcctgaaccaccctgtacatcatagccaggtctaccccaaatagagcagcagctgatggcttctctgctgtctgtggagggagggctcggctgcagacctatggtgttttgtcagctgttaggtgctacagcccacccagtcagagtacatagacatagcgctttaagggacaaaggacaaacagaactatctttgctttccggaggccatctttttctttccttgaatcctttctgctttaaacttctgaggtttatgcatcccagagaggtcacaccaagccaaagagaaaaaattcatagattgtcccagcctacccaaagggcctgaaaagcctctctaaacaaaactcaagatagctgagaagtatgaatggggttcacagcaaagtccaattgatggcttttgaggctgggacacccccaaactgcccttctgtttttgtagttttgctttcttccacccaccctctctccgcatgctgtaagttaggggagttagtatcttgaacttctaaatgcaaaaggagattttataataagccatgctacctgtaaatacattattgaggtttgcatttttatttttggaggtatgaaagagttgagtagaccaagtcaaaagaggtgtggggatttatgtttatttttatttgtttggggttgtttggttggtggctgggtttcttgtaacagacctattctggaatagcaaagaaggataccttggtgatctgcaatgtttctgaatctgtttctctttaggaagtgattgccatcaaatttagtgatatgatatttgagtcaaaaatctgaggttatagtaccagctgtcttttctctctggtctcctttttgtcgtctttctctttctgtctaaattggcctctgtcttttcctaaggacttaaaatataacccaaattaatgaagaactgccccaaaacttcagtgaaagccaaggaggtacagaattttttcaggacatctttaaccaatacaaaatttatgtcttaagaagataatttttacaatagtgtagtaatctgataaatgaaaactattggaagtcaatagttttttatattccagctttctgtattcaaacttgtgccttcagcaagcatctcttcactttctttcccttgtcaattgaaacatgaatgtttggctaactcatgatgtaaagtgtctgttaagttaataatacataatttaaagcacttagtctccacaaagcaatttagaaaaatcttcacttgttagatcccatgaagtacctatgaaattctcagcattgctataagcatttgattttttttaaggaaacttcctgtttaatggaatctgaatccaagatttgctttaatttcactctattcttcccattttcccttattcttcttgttgtctctctaattaaaaaaaaaaaaaacctaggcttttttttttctatccagaaagttgggttttcatgatctgagcttccttatgtctccttctctttgtgcaaacttaaaccagtcatagattgtcacccagacatattctccaacccagcattggaaatctgaacgaatcttttctctttttgtcctacaagtttgtcagagatgagaatggattgctgtgtacattctacaaccagaccctagactttataccaggctgtgccacttcctcttcacttcactcagaggatggccccaaaactgaaaaggaaatgaaatcatcaaatataccaaatccgaatttgactttatttgatgactcaatattttccttccagtactctaatttttttttatggcaatggcctatatggcacaagaaccaccacttaaagcaaatctgttgaacatttttataagggatgagcaagaaaaacacactccaaaattttaaagtgccattaatcaatttttaagaataaaggtaatatgaaatgagggctaaacaatgtaatataactgccagttaaggtagacagtagttgtggtcttagttacatttgatatggagttgtgtaatattaagcagatcccagtggagttagtaaaaacataggtattgagttttaatggctaccaattgggatatatacttagcctgcaggctgaactttagtcagtgtttttctatcatgttgttttgtgaacaagtcaaaatttatacaaagctaccctaagtgctgcaattgcagaggaacttgcctcttcgtgatattagagggcagtccaactccgctcaaactgagtccaagatttgaattcatccagaaaaacaaatggaggagaaaagcctaatgcaccacatgtgtttggcatttcatggctgggacaatggagtagagggtaggaagacaagctgtagaacaaaagcaaagtgaggtagaaagtaacaggtcccagaagaggacagacttagagatgtgtaaccttggatcctctttttcacttagaatatgggtaaacttcttagcacaagactggattaagagaagttctttctgttaaactcacctagggtagtggctttgaaggcctcagaggattaatagattcccaaaattttcttccagacctgggagatggagagaaagaggttcttgctttaaagcggctcgaagacaatctttatgacttcagcaactcttcaacatagtagcaccaataaaggagagattatgttaacttcctagtggtgagaataccatgggatgggagaagggccagtgagtgggatgggaatgagcttcatcaggaacagatttcagactctgcagggtgcaccggttctagcctcaaataacaacattgcaaggaggtggactacagggtccacaccctctgtccttcggggcccatggtcaggccattccctctttgttttgctcctagaggatgagcatgtaagatgagatcaggagggaaattgggtgctctgcctcaggctgttaaaatgctgctacctgcattctaaaacgtgcaagtcatgccccacaagacacctccttagggcagcatccactgtggtgtgccagcctgacacccctgcagtcacggtgtttgaatggcagctgatgctggcccacccagagtatcggtgcatctctcctaaagccacagttcagcactgcatgttgaccaggcggatatcctataatatagatgctcgtttggatccaaaaggaaaaccattaaaaataaaagaaagatgaaaaactttaatgttttgggggggataaaagaaaagaataaataaaaccttgttgtaaagaatgcatcggcctgatttccctcacttgatgtgtttctttgctgctaccagaaagggaaatcatgggagtgaagcctgccaggaccctcagggtaagctggcagcaggctctgcagctgcacttagttggggtctgctcagaccagtcaggaggaattcaggaggctttcaaagtcccaaggacatcctggctctgaaaggttttcttttgttaaaaaatgcactttgtgctgtgtgtggtagctcgtatgtgttaccccagctattcaggaagctagggcagaaggattgcttgaggctaggaattcaagactggcctggatgacagagtgaaaccctcatctcttaaaaaaaaaaaaaaggaataaaaatgttctctgccttggataacatttttttttaaagattccatacaaactcattccctgaaagagaaaaacagattttctaatcaggacattgtcctgatctgcaagcgaggagtttaacaaggtaggcagagaacttccttatggaacaacagggctctgtgaccagaaaaactatgaccagcctcctctgaaaaaaggtggggggattatagggcaccagctcagccgccaagttcaggaagcagctgattcccaagactcttaggagatactgtccattcttcctcctgtccacatcactccccatttaactgcaattgctcccttgccacagggaaagcagcaagccccaggcccaggcctccatttgatttgccactccgagaactgtctgcttcattctgcttgaggagatatcttcacctaatcctagtgttaattattttaatctgagcaacgcttttatcaattagatagaaaccagcattccaaaataagtcccctaagtttgtagtttgagccaagatattttcttgagccctaagatatatgactttattagctaggatttttcttatgattaaaaacatccaaaaatgtgatatgtggtcatctctcagggaggtctaggtccttgcaggctggattttagaaatttctaagattctctacaacttttaaattttatgttatttttcaatcataatttctttcctgtggcttctatcaccattggagttagaatctgacaacctttaacttcacacttttatgagataataagttggtttcttgggcaaaggttggtttgtaagccatttacatggattgatgatttctgttcttgttttcttctaacctagaactcaggtccacagttttccacaggctaatggcactatgaaacagatataaagaaaaatagacactgttctgagtttctcttgagtgtttttgtgctatgatctgatcatctattggttacctttacacattacattcctaaatcttctatcctgcctctgggatattagaaacttgtctttacttgtgtatcacattactttgctaatgagctgggaaaattcccaaactaaagacccggatttcagtttttaaaatatttaatcacaaaatattgggactagtcacaggcacacatagcccgggaactccttaaacacctgcaacaaaaagaaaagaatagaggctacaaatgcaagcgctggaatagaaccaactgaggtccaacctgtgcaccaccagttacatgctgtgaggccctgcgttggccacttaacctaaaactcactttcttcacctttaaaatgggaacaataatagcaacaaccccgtagggtggttaggcagagtgaccaaattattgtgtatgaagagaatagcccgtgtctgtccacaataggcatctgataaatgtcaggtctcaccatcgttgtcatcattagcaccacatacaagtgcattccccaaacccaccacatctgagaaactgaatctttcagggccacatgctgagaatacactggtgggtgctccccttctgttaatgaaacacagaggacgagttgatccttaggcaagtttctaaggaaagggggatacatttaaaaagcaaaccattactatgtagctattttaaaataatgctgccactcttgcatcagaaacaagtcataattttgtttattcttcatttctcatttccatattcgtttaataacaaaatgggagaaacattagtgggagatagtaattgtaaaagtagcaat

SEQ ID NO: 83 - DNA, 7291 bp, Homo sapiens
gatgcgtggactgagcccagaccgcaggctgcccgagcccgccccctgcccggctgcggggagccctgagcccaggtccgcgggccgccgccaacgccacgtcctggccctgccggaagaagaggcatggcggccccagcagtgcgctctgctcgaggccgacgcctcggacgaggtgggcatgctgccggcttccccgcgcgccgcctctggcttcgacaacttcttccaggtgcaggagggcgagggccagggctgggagggcgccatggcactggaggcgggctccagccctttcctgccggtgagccccgaggtcatgaagcggcggcgcgggggcctcatcgagcagcgcgacatcatcaaggcccacgaggcgcacaagatgcagagcaccccgcaggcccggcgcaaggaatgggagatggctcgcttcggggaggcggtggtcgccaggccagggtccggcgatggagactcggaccagagcaggaaccggcaaggaacccccgtgccggcctcggggcaggcggccgcctacaagcagacgaaagcacagagggcgcggactatggctttgtacaaccccattcccgtccggcagaactgtttcaccgtcaacagatccctgttcatcttcggagaagataacattgtcaggaaatatgccaagaagctcatcgattggccgccatttgagtacatgatcctggccaccatcattgccaactgcatcgtcctggccctggagcagcatcttcctgaggatgacaagacccccatgtcccgaagactggagaagacagaaccttatttcattgggatcttttgctttgaagctgggatcaaaattgtggccctggggttcatcttccataagggctcttacctccgcaatggctggaatgtcatggacttcatcgtggtcctcagtggcatcctggccactgcaggaacccacttcaatactcacgtggacctgaggaccctccgggctgtgcgtgtcctgcggcctttgaagctcgtgtcagggatacctagcctgcagattgtgttgaagtccatcatgaaggccatggtacctcttctgcagattggccttctgctcttctttgccatcctgatgtttgctatcattggtttggagttctacagtggcaagttacatcgagcatgcttcatgaacaattcaggtattctagaaggatttgacccccctcacccatgtggtgtgcagggctgcccagctggttatgaatgcaaggactggatcggccccaatgatgggatcacccagtttgataacatcctttttgctgtgctgactgtcttccagtgcatcaccatggaagggtggaccactgtgctgtacaataccaatgatgccttaggagccacctggaattggctgtacttcatccccctcatcatcattggatccttctttgttctcaacctagtcctgggagtgctttccggggaatttgccaaagagagagagagagtggagaaccgaagggctttcatgaagctgcggcgccagcagcagattgagcgtgagctgaatggctaccgtgcctggatagacaaagcagaggaagtcatgctcgctgaagaaaataaaaatgctggaacatccgccttagaagtgcttcgaagggcaaccatcaagaggagccggacagaggccatgactcgagactccagtgatgagcactgtgttgatatctcctctgtgggcacacctctggcccgagccagtatcaaaagtgcaaaggtagacggggtctcttatttccggcacaaggaaaggcttctgcgcatctccattcgccacatggttaaatcccaggtgttttactggattgtgctgagccttgtggcactcaacactgcctgtgtggccattgtccatcacaaccagccccagtggctcacccacctcctctactatgcagaatttctgtttctgggactcttcctcttggagatgtccctgaagatgtatggcatggggcctcgcctttattttcactcttcattcaactgctttgattttggggtcacagtgggcagtatctttgaagtggtctgggcaatcttcagacctggtacgtcttttggaatcagtgtcttgcgagccctccggcttctaagaatatttaaaataaccaagtattgggcttccctacggaatttggtggtctccttgatgagctcaatgaagtctatcatcagtttgcttttcctcctcttcctcttcatcgttgtctttgctctcctaggaatgcagttatttggaggcaggtttaactttaatgatgggactccttcggcaaattttgataccttccctgcagccatcatgactgtgttccagatcctgacgggtgaggactggaatgaggtgatgtacaatgggatccgctcccagggtggggtcagctcaggcatgtggtctgccatctacttcattgtgctcaccttgtttggcaactacacgctactgaatgtgttcttggctatcgctgtggataatctcgccaacgcccaggaactgaccaaggatgaacaggaggaagaagaggccttcaaccagaaacatgcactgcagaaggccaaggaggtcagcccgatgtctgcacccaacatgccttcgatcgagagggagcggaggcgccggcaccacatgtccgtgtgggagcagcgtaccagccagctgaggaagcacatgcagatgtccagccaggaggccctcaacagagaggaggcgccgaccatgaacccgctcaaccccctcaacccgctcagctccctcaacccgctcaatgcccaccccagcctttatcggcgacccagggccattgagggcctggccctgggcctggccctggagaagttcgaggaggagcgcatcagccgtggggggtccctcaagggggatggaggggaccgatccagtgccctggacaaccagaggacccctttgtccctgggccagcgggagccaccatggctggccaggccctgtcatggaaactgtgacccgactcagcaggaggcagggggaggagaggctgtggtgacctttgaggaccgggccaggcacaggcagagccaacggcgcagccggcatcgccgcgtcaggacagaaggcaaggagtcctcttcagcctcccggagcaggtctgccagccaggaacgcagtctggatgaagccatgcccactgaaggggagaaggaccatgagctcaggggcaaccatggtgccaaggagccaacgatccaagaagagagagcccaggatttaaggaggaccaacagtctgatggtgtccagaggctccgggctggcaggaggccttgatgaggctgacacccccctagtcctgccccatcctgagctggaagtggggaagcacgtggtgctgacggagcaggagccagaaggcagcagtgagcaggccctgctggggaatgtgcagctagacatgggccgggtcatcagccagagcgagcctgacctctcctgcatcacggccaacacggacaaggccaccaccgagagcaccagcgtcaccgtcgccatccccgacgtggaccccttggtggactcaaccgtggtgcacattagcaacaagacggatggggaagccagtcccttgaaggaggcagagatcagagaggatgaggaggaggtggagaagaagaagcagaagaaggagaagcgtgagacaggcaaagccatggtgccccacagctcaatgttcatcttcagcaccaccaacccgatccggagggcctgccactacatcgtgaacctgcgctactttgagatgtgcatcctcctggtgattgcagccagcagcatcgccctggcggcagaggaccccgtcctgaccaactcggagcgcaacaaagtcctgaggtattttgactatgtgttcacgggcgtgttcacctttgagatggttataaagatgatagaccaaggcttgatcctgcaggatgggtcctacttccgagacttgtggaacatcctggactttgtggtggtcgttggcgcattggtggcctttgctctggcgaacgctttgggaaccaacaaaggacgggacatcaagaccatcaagtctctgcgggtgctccgagttctaaggccactgaaaaccatcaagcgcttgcccaagctcaaggccgtcttcgactgcgtagtgacctccttgaagaatgtcttcaacatactcattgtgtacaagctcttcatgttcatctttgctgtcatcgcagttcagctcttcaagggaaagttcttttattgcacggacagttccaaggacacagagaaggagtgcataggcaactatgtagatcatgagaaaaacaagatggaggtgaagggccgggaatggaagcgccatgaattccactacgacaacattatctgggccctgctgaccctcttcaccgtctccacaggggaaggatggcctcaagttctgcagcactctgtagatgtgacagaggaagaccgaggcccaagccgcagcaaccgcatggagatgtctatcttttatgtagtctactttgtggtcttccccttcttctttgtcaatatctttgtggctctcatcatcatcaccttccaggagcaaggggataagatgatggaggagtgcagcctggagaagaatgagagggcgtgcatcgacttcgccatcagcgccaaacctctcacccgctacatgccgcagaacagacacaccttccagtaccgcgtgtggcactttgtggtgtctccgtcctttgagtacaccattatggccatgatcgccttgaatactgttgtgctgatgatgaagtattattctgctccctgtacctatgagctggccctgaagtacctgaatatcgccttcaccatggtgttttccctggaatgtgtcctgaaggtcatcgcttttggctttttgaactatttccgagacacctggaatatctttgacttcatcaccgtgattggcagtatcacagaaattatcctgacagacagcaagctggtgaacaccagtggcttcaatatgagctttctgaagctcttccgagctgcccgcctcataaagctcctgcgtcagggctataccatacgcattttgctgtggacctttgtgcagtcctttaaggccctcccttatgtctgccttttaattgccatgcttttcttcatttatgccatcattgggatgcaggtatttggaaacataaaattagacgaggagagtcacatcaaccggcacaacaacttccggagtttctttgggtccctaatgctactcttcaggagtgccacaggtgaggcctggcaggagattatgctgtcatgccttggggagaagggctgtgagcctgacaccaccgcaccatcagggcagaacgagaacgaacgctgcggcaccgatctggcctacgtgtactttgtctccttcatcttcttctgctccttcttgatgctcaacctgtttgtggccgtcatcatggacaactttgagtacctgactcgggactcctccatcctggggcctcaccacttggacgagtttgtccgcgtctgggcagaatatgaccgagcagcatgtggccgcatccattacactgagatgtatgaaatgctgactctcatgtcacctccgctaggcctcggcaagagatgtccctccaaagtggcatataagaggttggtcctgatgaacatgccagtagctgaggacatgacggtccacttcacctccacacttatggctctgatccggacagctctggacattaaaattgccaaaggtggtgcagacaggcagcagctagactcagagctacaaaaggagaccctagccatctggcctcacctatcccagaagatgctggatctgcttgtgcccatgcccaaagcctctgacctgactgtgggcaaaatctatgcagcaatgatgatcatggactactataagcagagtaaggtgaagaagcagaggcagcagctggaggaacagaaaaatgcccccatgttccagcgcatggagccttcatctctgcctcaggagatcattgctaatgccaaagccctgccttacctccagcaggaccccgtttcaggcctgagtggccggagtggatacccttcgatgagtccactctctccccaggatatattccagttggcttgtatggaccccgccgatgacggacagttccaagaacggcagtctctggtggtgacagaccctagctccatgagacgttcattttccactattcgggataagcgttcaaattcctcgtggttggaggaattctccatggagcgaagcagtgaaaatacctacaagtcccgtcgccggagttaccactcctccttgcggctgtcagcccaccgcctgaactctgattcaggccacaagtctgacactcaccgctcagggggcagggagcggggacgatcaaaagagcgaaagcatcttctctctcctgatgtctcccgctgcaattcagaagagcgagggacccaggctgactgggagtccccagagcgccgtcaatccaggtcacccagtgagggcaggtcacagacgcccaacagacagggcacaggttccctaagtgagagctccatcccctctgtctctgacaccagcaccccaagaagaagtcgtcggcagctcccacccgtcccgccaaagccccggcccctcctttcctacagctccctgattcgacacgcgggcagcatctctccacctgctgatggaagcgaggagggctccccgctgacctcccaagctctggagagcaacaatgcttgcctgaccgagtcttccaactctccgcacccccagcagagccaacatgcctccccacagcgctacatctccgagccctacttggccctgcacgaagactcccacgcctcagactgtggtgaggaggagacgctcactttcgaagcagccgtggctactagcctgggccgttccaacaccatcggctcagccccacccctgcggcatagctggcagatgcccaacgggcactatcggcggcggaggcgcggggggcctgggccaggcatgatgtgtggggctgtcaacaacctgctaagtgacacggaagaagatgacaaatgctagaggctgctcccccctccgatgcatgctcttctctcacatggagaaaaccaagacagaattgggaagccagtgcggcccgggggggaggaagagggaaaaggaagatggaag

SEQ ID NO: 84 - protein, 2251 aa, Homo sapiens
MARFGEAVVARPGSGDGDSDQSRNRQGTPVPASGQAAAYKQTKAQRARTMALYNPIPVRQNCFTVNRSLFIFGEDNIVRKYAKKLIDWPPFEYMILATIIANCIVLALEQHLPEDDKTPMSRRLEKTEPYFIGIFCFEAGIKIVALGFIFHKGSYLRNGWNVMDFIVVLSGILATAGTHFNTHVDLRTLRAVRVLRPLKLVSGIPSLQIVLKSIMKAMVPLLQIGLLLFFAILMFAIIGLEFYSGKLHRACFMNNSGILEGFDPPHPCGVQGCPAGYECKDWIGPNDGITQFDNILFAVLTVFQCITMEGWTTVLYNTNDALGATWNWLYFIPLIIIGSFFVLNLVLGVLSGEFAKERERVENRRAFMKLRRQQQIERELNGYRAWIDKAEEVMLAEENKNAGTSALEVLRRATIKRSRTEAMTRDSSDEHCVDISSVGTPLARASIKSAKVDGVSYFRHKERLLRISIRHMVKSQVFYWIVLSLVALNTACVAIVHHNQPQWLTHLLYYAEFLFLGLFLLEMSLKMYGMGPRLYFHSSFNCFDFGVTVGSIFEVVWAIFRPGTSFGISVLRALRLLRIFKITKYWASLRNLVVSLMSSMKSIISLLFLLFLFIVVFALLGMQLFGGRFNFNDGTPSANFDTFPAAIMTVFQILTGEDWNEVMYNGIRSQGGVSSGMWSAIYFIVLTLFGNYTLLNVFLAIAVDNLANAQELTKDEQEEEEAFNQKHALQKAKEVSPMSAPNMPSIERERRRRHHMSVWEQRTSQLRKHMQMSSQEALNREEAPTMNPLNPLNPLSSLNPLNAHPSLYRRPRAIEGLALGLALEKFEEERISRGGSLKGDGGDRSSALDNQRTPLSLGQREPPWLARPCHGNCDPTQQEAGGGEAVVTFEDRARHRQSQRRSRHRRVRTEGKESSSASRSRSASQERSLDEAMPTEGEKDHELRGNHGAKEPTIQEERAQDLRRTNSLMVSRGSGLAGGLDEADTPLVLPHPELEVGKHVVLTEQEPEGSSEQALLGNVQLDMGRVISQSEPDLSCITANTDKATTESTSVTVAIPDVDPLVDSTVVHISNKTDGEASPLKEAEIREDEEEVEKKKQKKEKRETGKAMVPHSSMFIFSTTNPIRRACHYIVNLRYFEMCILLVIAASSIALAAEDPVLTNSERNKVLRYFDYVFTGVFTFEMVIKMIDQGLILQDGSYFRDLWNILDFVVVVGALVAFALANALGTNKGRDIKTIKSLRVLRVLRPLKTIKRLPKLKAVFDCVVTSLKNVFNILIVYKLFMFIFAVIAVQLFKGKFFYCTDSSKDTEKECIGNYVDHEKNKMEVKGREWKRHEFHYDNIIWALLTLFTVSTGEGWPQVLQHSVDVTEEDRGPSRSNRMEMSIFYVVYFVVFPFFFVNIFVALIIITFQEQGDKMMEECSLEKNERACIDFAISAKPLTRYMPQNRHTFQYRVWHFVVSPSFEYTIMAMIALNTVVLMMKYYSAPCTYELALKYLNIAFTMVFSLECVLKVIAFGFLNYFRDTWNIFDFITVIGSITEIILTDSKLVNTSGFNMSFLKLFRAARLIKLLRQGYTIRILLWTFVQSFKALPYVCLLIAMLFFIYAIIGMQVFGNIKLDEESHINRHNNFRSFFGSLMLLFRSATGEAWQEIMLSCLGEKGCEPDTTAPSGQNENERCGTDLAYVYFVSFIFFCSFLMLNLFVAVIMDNFEYLTRDSSILGPHHLDEFVRVWAEYDRAACGRIHYTEMYEMLTLMSPPLGLGKRCPSKVAYKRLVLMNMPVAEDMTVHFTSTLMALIRTALDIKIAKGGADRQQLDSELQKETLAIWPHLSQKMLDLLVPMPKASDLTVGKIYAAMMIMDYYKQSKVKKQRQQLEEQKNAPMFQRMEPSSLPQEIIANAKALPYLQQDPVSGLSGRSGYPSMSPLSPQDIFQLACMDPADDGQFQERQSLVVTDPSSMRRSFSTIRDKRSNSSWLEEFSMERSSENTYKSRRRSYHSSLRLSAHRLNSDSGHKSDTHRSGGRERGRSKERKHLLSPDVSRCNSEERGTQADWESPERRQSRSPSEGRSQTPNRQGTGSLSESSIPSVSDTSTPRRSRRQLPPVPPKPRPLLSYSSLIRHAGSISPPADGSEEGSPLTSQALESNNACLTESSNSPHPQQSQHASPQRYISEPYLALHEDSHASDCGEEETLTFEAAVATSLGRSNTIGSAPPLRHSWQMPNGHYRRRRRGGPGPGMMCGAVNNLLSDTEEDDKC

SEQ ID NO: 85 - DNA, 153740 bp, Mus musculus
  misc_feature (1)...(153740): n = A,T,C or G
gtttagagactggtagaggacatgcctacttacatattcaacatgaagtggagggaggaagagaagatggaacctgcctgtcatagggagaaccagagcaaatgtgcctctgtcaggggttactggggaaagaaatgcatcctgggagttactacccctgacctgtaagaacaatcctcctttttctctttttgggtcttttttttcagagacacttgagttgtgtaattgttttggaaaatatcttctagtacttttttgtgttggggtggttaatgcttgagaaatatcagctggcctttggtataatctgtggcttagttagggtttctattgttgtgacaagaccacgtcaaccaaaagaaagttggggaggaaagggttaatatggctcacacatccataccacagttcatcatcaaaggcagtgaggacaggaacttaagcagggcaggaacctggagtcaggagctgatgcagaggccatggaggggtgatcctaactggcttgctgcaatcccatggcttgcccagcctgccttcttattgaacccaggcaggaccaccagcccagggatggcaccacccacaatgggttgggtcttcctcccttgatcactaattgaaaaaatgccttacagctggatctcatgggggcttttcatctctgggatgactgtagcttgtctcaagttgacacacaaaaccagcccgttcaatctgatccgttggagcaagttagagctccctgggttggcttatggcttatgaacactctgtgagacgatctggtgtctgaaacactgtgttagtcatcagaaggcttggtgagcatagaaaaacggtctgcaaggaaggtctgatatggtggaaatctgggtaagggctggagagggcatgctcaagtggcccaaaagagcagtagtaaattggtaattcgcctattgtcccaggtttaaatctgccctctgtactctgttctgtgatgacagagctgggattttgcaaaccagacccaggggttcccctttatgggattcctcttaggttttgactgcaggagacaagaggcgcagtcaaaaggcagaacaagacaaagtcatttttctgttccttgatattaacgtcactgctgcagatatggcaccttcccccagcggtggcatttcacaccacggtgccagtctgctccagctcctttcctatttgcagaacctcaatgtgccaactcatattgtgccagaagaaaccccgtgtgaactgcctcaagtgtcaagctctaatttcctgatgtcccctccccgcagcacttcagtctgatctgtccacttttgttctccgaggcatagggtggtaactactgtttgaagtttgtctttctcccagttagccttccaagagccgtgtgaccaattcttcataatgacgctcttcaatttctgttgaaatattcagggtggggcgggtggtgtctgctttcttctgactaattttttttgtgtgtgtgtgcaatgtgtatgggtgttttgtctgtacgtatgtgtatgtagcatttgcttgatgcctgctggccacagaggtcacaagagggccttggataatctagaactggagttacagatgtttgtgaagtacgggaatcaaacctgggtcctctggaagagcaggaagtgcttttaaccatggagccagctctctgccccctcccccactgacaacatttctttaaaatatttgttatttttattatttctgcatgtgtgtgtgttatatctctctctgtgtctctctgtgctctctctgtctctgtctctctctctctctctctctgtgtgtgtgtgtgtgtgtgtgtgtgtgtgtgtttgagatatgtgtgctggtgcctatggaggccagaagagggcattggagcccctggagctgggacacccaacatgggttctggggatgaacatttgtcccctgagtgagtagcaatcacccttaacttcagatgtgtctctttatgcattctgacttatccagaagtagagtgaacttaaaagaaaaacagtcaggagtctaggcaacaggtagccaaagacttaccaggaacagcagtatgagtcttctagctatcttccttaactgggatagtgacatacatctaccttccattcttgttgggatgttaggaaacacaccagagtagagatttagaaggacgctggttgcacattacctaagtttacttgtcacagttttagtcgtaagagggagcatactgatgttacaaggatgcagtgtgttgtatgggtcctggggcagggattgctgctctatcttgggaggagtgtaggactgggaactggaagaccaccaggatctttactggtatcattttcttgcaggttactgcattccttctcctgggaattttcttcctctgtctgatcccataggctatatgatgcagagaacatttctgcctatggctttagggttgatatctccttgaaaatgagaactgggtagaatttttctctgcttcattttcaaattttttgtaagacagcatccaaagaacagcttggtttagatttctattcacagtcttgtcagctatgaccctggaagcagagattccctaatgaaagcatagattcaggtggcccgccctacgtgagagcgagaacagcataattgtgcactgagaagacattcaggcctcggcctgtcaggcttggtcttagtaatggcgatgatgaagcttggagttggagtgaagaccagcttttggtatcagtgtttgtttcagattgattctataaagatatgggggagtggtgagaaccgagccttcagataaggatccaggacctgcagggctgaagactcagatccaggacctgcagggctgaagactcagaacaggacctacccgtcatctgccttagatccaggagcatagcctggatttctcatgaaaaatttcactctagctctaatcttcaatcaattgaagaaataaaggttgcccattcactcagcaacaatgtgagcactcctatctctccagtgctgctgacacgccatgggaagactttctccagactccattcctcttatattagtcaggcttctcctagagaaagagaatggacataatgactctgaattaaatgaggattagttagagtgacttacaggctgtggcccagttggtctaacaatggctctctctccatggaaaggtcaagagtccactagttgctcagtccacaaggctgagtgctcgactgctctttggtcattgttggaacaccaaagaagtaggttctaataacagtgaaggaatgcctcggtagcaggattggggaagttgccaatgaaactgggggcaagtaggcaaacagcaaactcttccttcttccttgtccctgggtagtctgccatcagaaggtgtggcccagatttaggatgggtcatctgacctctaataatacaatcacaggagtgcccaactctgttggttttagatgattccagatgcagtcaagttgacaacaagatgtcccaggatgcagtcaagttgacaacaagatgtcccaagcccctgcccaagtcactcccacaattcctcactggtccagggatactttgctgattttcctatttattttgttagcacaaatctcttcagtggttcaaaagaaagcattttgtgtaactggacaaaatgtcttggacatgaagggccttggagaataaagactccatctgtcagtgtaacatctgagccttccttgaagcacaggaccaggaactgtctgggaatttgagtgctactgaccattccacactggacatgcacacagaaaattaacacagatgctataaattcttttctgctgtgaagaacgttgaatattagaagcaaggaggtggtgttctggtggtaactctgggcaacgtgatggactgacctgcaaagaggaagatggtatgaaatccttgaattgagattctgtagaggacaacatgatttttttatacttatttagaagctccccaacccaagtgacaatcacagatactatccctgcatgcatcccagtgccccgtggacatagatgaggagagtcatgcaaatctctaaaggtaagcctcaaaaagtaaaaataatttgaccttatgaaattggatccaagtagatcagtggagactgttgttcctcccaacacactggaaaaaccccatccaggaagagtggcagctgagggtcttcacatttcacaaagagggttatggttgtgtatgcaacaagtacaccaaactgtgacagagtcaggaagacactgctgttcctcagactctattttgctgtgacagatacatgtgtgagatgctgggagataggtgttgctgagtgcaggataaagtacaaatgtcaggagggaagggaatcaggatacatacaaagctgaccatgagtgttgataaacagccaagttgttgaaaatgttgttccctgaagacgttttaaaataagctggtctcttagccaagggtagtgcagcgctccagccttatagccagaagaaaggtcatagtctttaggataatgctgcaaagcaaactgttccagcactttttgtaaccatcattttgttcaggagcccacagccaagttaaggttccgtgtttcttggttttgttttatttcacccttcatctctggaggtctgctaggcgagaaaagacaaagcagaaagcaaggaaagcaactggtgtggtcactagaatcagatgactgtccagtctagaggctctgggaaggtttgccattgtcacccaatgggcagagtgggtattgaacagtgtaagaactgtgacataagctgagatgctgccattccctggacaaaatcttcaaatgagctactgcttctcaggcccccctttccttatgtgaaacatgaggatattaatatctgcattgagtgaatattggggctgtctgaggactggatgaagtcatgtctgcgaaggcactctttaaactgtcatatactatatgtggcattgttctaaacgaaggctgttattagacgcgttctcacgcccggccaggaagaacgcaacagaccagaatcttctgcggcaaaactttattgcttacatcttcaggagcaggagtgtaagaagcaagagagcgagaaaacgaaaacccgtccctattaaggagaattctccttcgcctaggacgtgtcactccctgattggctgcagcccatcggccgagttgacgtcacggggaaggcagagcacatggagtggagaaccaccctcggcacatgcgcagattatttgtttaccacttagaacacagctgtcagcgccatcttgtaacggcgaatgtgggcgcggctcccaacatctccccctttccttttaataagagcaaataggccacccatattaatgagagtggagatagaggtcaaatccccagtgtgtaggtaaaggagccatgtacaggattagctcttaggctcacaggcttttacccagagcaaccctgacctgctcccgtgtcgttttgcctggagagaaggacacttggacactcaaccttcttgaaagatgacatgtctccctagaataggctcatatatgccgcagagcctttctactgcagtgcttagccgtgcaactctctcgggctgctgaagcacactcactctatcccgtgcaatgagactagcctcatgggatataagagctgagtggccagcgacctattgcctaagcatagataaccatatatcagggggagcaccatgttctagagctgcaagcgcctgggcaataaccaccttgtctctcctagtttaggccttaagcttacagaccaatcaaagaagcaacactaatccacagcaaagtgtatctccaaataatatcagtcccacccattctttaaagaagggaaatgttgaggagatccaattgggtaatcctttggtcagggacaggtccaagtgcgtggagttgacctgaagtctcaattcccgaaggatctgttcaaattcagccgtccaattctgtaacatatactgaaaaagactttttgacaaattagctgccctagtaaatttaacatactgaatggaaataacacacaatcccggaaacttttgttcacatccctgctgagttatttgtcataatacatctagttgtatctgaacaagatctatgagttgattaaccagcatgagatctccctgtatcttgacattagctgaggcctgtttatctatgactgtagtcactgaggctgacaaagtgttaatggtgtcagttgtctggacctgtccagacagagccaaggctgtctgaatcaaggctaaacccagttcctagttagtgtaaaaaggcaggagaatacttgagcattatacatcaccgtcattgggagtggaaatgtcgacattatcccccaacgctgctctctctttattattgacgccctggacatcaccaagacgagggacatcagtannnnnnnnnnnnnnnnnnnnnnnnnnnnnnnnnnnnnnnnnnnnnnnnnnnnnnnnnnnnnnnnnnnnnnnnnnnnnnnnnnnnnnnnnnnnnnnnnnnnnnnnnnnnnnnnnnnnnnnnnnnnnnnnnnnnnnnnnnnnnnnnnnnnnnnnnnnnnnnnnnnnnnnnnnnnnnnnnnnnnnnnnnnnnnnnnnnnnnnnnnnnnnnnnnnnnnnnnnnnnnnnnnnnnnnnnnnnnnnnnnnnnnnnnnnnnnnnnnnnnnnnnnnnnnnnnnnnnnnnnnnnnnnnnnnnnnnnnnnnnnnnnnnnnnnnnnnnnnnnnnnnnnnnnnnnnnnnnnnnnnnnnnnnnnnnnnnnnnnnnnnnnnnnnnnnnnnnnnnnnnnnnnnnnnnnnnnnnnnnnnnnnnnnnnnnnnnnnnnnnnnnnnnnnnnnnnnnnnnnnnnnnnnnnnnnnnnnnnnnnnnnnnnnnnnnnnnnnnnnnnnnnnnnnnnnnnnnnnnnnnnnnnnnnnnnnnnnnnnnnnnnnnnnnnnnnnnnnnnnnnnnnnnnnnnnnnnnnnnnnnnnnnnnnnnnnnnnnnnnnnnnnnnnnnnnnnnnnnnnnnnnnnnnnnnnnnnnnnnnnnnnnnnnnnnnnnnnnnnnnnnnnnnnnnnnnnnnnnnnnnnnnnnnnnnnnnnnnnnnnnnnnnnnnnnnnnnnnnnnnnnnnnnnnnnnnnnnnnnnnnnnnnnnnnnnnnnnnnnnnnnnnnnnnnnnnnnnnnnnnnnnnnnnnnnnnnnnnnnnnnnnnnnnnnnnnnnnnnnnnnnnnnnnnnnnnnnnnnnnnnnnnnnnnnnnnnnnnnnnnnnnnnnnnnnnnnnnnnnnnnnnnnnnnnnnnnnnnnnnnnnnnnnnnnnnnnnnnnnnnnnnnnnnnnnnnnnnnnnnnnnnnnnnnnnnnnnnnnnnnnnnnnnnnnnnnnnnnnnnnnnnnnnnnnnnnnnnnnnnnnnnnnnnnnnnnnnnnnnnnnnnnnnnnnnnnnnnnnnnnnnnnnnnnnnnnnnnnnnnnnnnnnnnnnnnnnnnnnnnnnnnnnnnnnnnnnnnnnnnnnnnnnnnnnnnnnnnnnnnnnnnnnnnnnnnnnnnnnnnnnnnnnnnnnnnnnnnnnnnnnnnnnnnnnnnnnnnnnnnnnnnnnnnnnnnnnnnnnnnnnnnnnnnnnnnnnnnnnnnnnnnnnnnnnnnnnnnnnnnnnnnnnnnnnnnnnnnnnnnnnnnnnnnnnnnnnnnnnnnnnnnnnnnnnnnnnnnnnnnnnnnnnnnnnnnnnnnnnnnnnnnnnnnnnnnnnnnnnnnnnnnnnnnnnnnnnnnnnnnnnnnnnnnnnnnnnnnnnnnnnnnnnnnnnnnnnnnnnnnnnnnnnnnnnnnnnnnnnnnnnnnnnnnnnnnnnnnnnnnnnnnnnnnnnnnnnnnnnnnnnnnnnnnnnnnnnnnnnnnnnnnnnnnnnnnnnnnnnnnnnnnnnnnnnnnnnnnnnnnnnnnnnnnnnnnnnnnnnnnnnnnnnnnnnnnnnnnnnnnnnnnnnnnnnnnnnnnnnnnnnnnnnnnnnnnnnnnnnnnnnnnnnnnnnnnnnnnnnnnnnnnnnnnnnnnnnnnnnnnnnnnnnnnnnnnnnnnnnnnnnnnnnnnnnnnnnnnnnnnnnnnnnnnnnnnnnnnnnnnnnnnnnnnnnnnnnnnnnnnnnnnnnnnnnnnnnnnnnnnnnnnnnnnnnnnnnnnnnnnnnnnnnnnnnnnnnnnnnnnnnnnnnnnnnnnnnnnnnnnnnnnnnnnnnnnnnnnnnnnnnnnnnnnnnnnnnnnnnnnnnnnnnnnnnnnnnnnnnnnnnnnnnnnnnnnnnnnnnnnnnnnnnnnnnnnnnnnnnnnnnnnnnnnnnnnnnnnnnnnnnnnnnnnnnnnnnnnnnnnnnnnnnnnnnnnnnnnnnnnnnnnnnnnnnnnnnnnnnnnnnnnnnnnnnnnnnnnnnnnnnnnnnnnnnnnnnnnnnnnnnnnnnnnnnnnnnnnnnnnnnnnnnnnnnnnnnnnnnnnnnnnnnnnnnnnnnnnnnnnnnnnnnnnnnnnnnnnnnnnnnnnnnnnnnnnnnnnnnnnnnnnnnnnnnnnnnnnnnnnnnnnnnnnnnnnnnnnnnnnnnnnnnnnnnnnnnnnnnnnnnnnnnnnnnnnnnnnnnnnnnnnnnnnnnnnnnnnnnnnnnnnnnnnnnnnnnnnnnnnnnnnnnnnnnnnnnnnnnnnnnnnnnnnnnnnnnnnnnnnnnnnnnnnnnnnnnnnnnnnnnnnnnnnnnnnnnnnnnnnnnnnnnnnnnnnnnnnnnnnnnnnnnnnnnnnnnnnnnnnnnnnnnnnnnnnnnnnnnnnnnnnnnnnnnnnnnnnnnnnnnnnnnnnnnnnnnnnnnnnnnnnnnnnnnnnnnnnnnnnnnnnnnnnnnnnnnnnnnnnnnnnnnnnnnnnnnnnnnnnnnnnnnnnnnnnnnnnnnnnnnnnnnnnnnnnnnnnnnnnnnnnnnnnnnnnnnnnnnnnnnnnnnnnnnnnnnnnnnnnnnnnnnnnnnnnnnnnnnnnnnnnnnnnnnnnnnnnnnnnnnnnnnnnnnnnnnnnnnnnnnnnnnnnnnnnnnnnnnnnnnnnnnnnnnnnnnnnnnnnnnnnnnnnnnnnnnnnnnnnnnnnntctctctctctctctctctctctctctctctctctctctctctctctctcgcagtgagggaaagagagtaaaacaaactttctggaggagggctcagcgctcagctctcatggccaaaatacgaaagatcagctccatgtgtgtgactcaactgtccaggaaatgagaatcgcaagagactccaaacctgacgttgtgcttatagcttcagctcgagtaagaaaaatgaggtggggggagtaccccatgacgggactcgagtctcagatgcaggagaaaggcaccgagaggcatggtggcaagaaggcaaaggagagctgcagctttaagtcctcctatggttatacatatttttcttctatgaatgggttttgctgtaaattatagctttgctcgtggtcccttgggtcaaaagaaatagtctccaaactgcaaacagctctgattggtgacttgccttcttccctccccaacccccttcctaattgaaagcaaatgtgcaatatattggatgctgggatccttggcgcaggcccaggaatcctcagaatgtgaggtctctctcaaaggcatcttgcatcagcctgtggatgtatgcctaccacggggctccttcaccggcaaagtggaaaaagaaggggttcccgagaaagtcttctgggttgggggaacctattggattataaccgtttccttctcttcaaacctgggcgtccctggactggaagtaagtgatgtggctccttcctccctgcccccaccttcgttttcttttctaaaaacgaaagctctaagtggacttctcttggtgtgtcaggaaaagttcggaaaagcggcagagggcagagtttgaatcagggcggaagggcagggagctgggctcttcaagactcaggaccgaggcagatctcatgttttggggtctggatttgtgtcagcgagggaagaacaggcgccaataaccaaagaaggctgaagcgaggtacaggactccatagcagctgcaagtacaataaacagttttagcagagctggaaatgttggcaggcaagacaggccgatcgcagagtcgggctgctggagagaggtgagccaggagctgtgttttcaggctttgagcactggggtttgagggacctgagttttggtgagaacgtggcctagtaccttttgtgatttaattgtgggaagggagactgtggctgcgggcttgggatgaggggtggcttcacctttggtcttgggtaaggttgggcgggaaggccagctgcctggagggtttgcagtgggtgacacgaagcaatcacttcccagactctccttctccccagcgttgggtgctgttctttttgttgtcagagggccggtctgttagcagttgggacccagtgttctggcctacccatctaagggacagagttctctgcaagtggcagacatacttaggtcagccatttgaggagagtttggagaactcaaggcagcggcgcctttagcaccatcttaactgttcagctttccgcatccttccctagtggcaattggagcgtggaaaggggggtctttgcaattgctgcggtctcttctgacccgttcattacacagatttcagacatgttagcacggccctagtgcctgttgcactccacgcttatgccttcagacttatttttaagatttaggagagacaatggggcaagtcttctccgggcgtttatcagctataaaaagatggtagaagtggttcatcagctggtggtccttggtgtgtgtgtcaatgttggtgtgcacgtgtgcacgtgtgtgtgtgcacatgtgtgtgcacaaatgaaacaaaaaaaattaacatttgagtccttgctctgaccagcctccagatattttcctgttatttgattcacggttctgtaaggcaccattcctgttttacaggaaagggttttaagacagagaagtgaaatgaattgttcgaggaagcacaactaatgtgcttaaaagttgttacatccggagtctggtcctccgactcaccgtgggcagttctcccgtctcccactccacacttggacttgcttacttctggagtcaaacttcatgtttcaccgggtgaccaggaggtacccatgccaggctaagggaacagtttggatttgcactcagagaaacacttgcccgggtatcagatggaggttaaattccaggtactggatgtctgtttagctttgtgatgcagagagcctgggacttttagagttggtagacccaggttaggttctgtctctatctttgactgcttcctgcacttcagcctctgtgttcactacatggaaatgagaatactcttgagttttactgttttagactcggacatgaatgcattctggaggctatgaagggcttcattaggtcagctcttatggttgtaatgaaatgtgaccgaatgtactggaaattagcttttgtcaggctgggtctggcagttggtgcagacccgtaagactgtgccaaactctgaaatggggagtggctctatcttcactcctatctctttgtgtgtgcatacctgcacacgtgcgtgtacaggtgcacatgtgcaggtatgtttgtgtatgtggaggcctcggtgataggatccctcagtgccctagtgctcactcagtaggctgggctggctggcctctgggctccaggaatcctcctgtctctgcctctgtgcatttcaggagactaaactcaggttctcatgcttgtgtgatttgtgtgataagtactttacacactgagatatctctccaggtcttcatgcctatcttctaacgggaaccatcctgcctcatggggaaatactcctggattttctctctaaaaattcccttgtaggtctggtttgtgtatggtttcttatctaaaatggagtgggttgaaggtcaataggttactcgaagcatctctggatctgcattgtctctgaatgagcaaggtttaatctggaggagcttcgtggccagctgaggacaggtcctgagcccagggacatcttatcactggcaagtgcatctcccttcatcttcctgttctgagcctgcagtcagaaaagttgcagttctcctgaagtaagagtctaaggctagcctgtgggggcctccacgtctgtttctgcttaagatccagttgcttgtagaagtgtcgcgggggcaaagcagaagcgctatccagagaaagtcctccattgtctcgcctccaaaaccttcccatataacttccttccaggcttacacagtcacttccgggaatggaagccatttgggtctgtattccccatagggaattttgttctaacctctccacgtgatagcatttttaacagatgttctaataaagacagagtgcttcccgcctatcagtgtcatgccacatacatttagctttaattcagatatccatctcaactttctttggaagatgcatcgtctggtattctatatcacctcaaacacataaggcaaatcagggcccagctaaaaatggactaccacgacatgctagtgcgtgctggctcacatcaatgcggacttgtctgcaatacagacacactagactctttatgtgcttggcctgctgacagctgtacaacatatgaattgcttgactctttccccaccaggccatgaatgtgcccaatatctccacgcatcccagagttgctctgaattcagcacctggattaaaatcctcacagtgtgtccttacagctgagaagatgatgttttaatagacttgctcagcagtaatttggaaccccaggtaggccttaaggacttctagaccagttaaataaaaataccaaaaggtggaaaacaagagtgggtagtttgttacccaggtcagaattccaccacnnnnnnnnnnnnnnnnnnnnnnnnnnnnnnnnnnnnnnnnnnnnnnnnnnnnnnnnnnnnnnnnnnnnnnnnnnnnnnnnnnnnnnnnnnnnnnnnnnnnnnnnnnnnnnnnnnnnnnnnnnnnnnnnnnnnnnnnnnnnnnnnnnnnnnnnnnnnnnnnnnnnnnnnnnnnnnnnnnnnnnnnnnnnnnnnnnnnnnnnnnnnnnnnnnnnnnnnnnnnnnnnnnnnnnnnnnnnnnnnnnnnnnnnnnnnnnnnnnnnnnnnnnnnnnnnnnnnnnnnnnnnnnnnnnnnnnnnnnnnnnnnnnnnnnnnnnnnnnnnnnnnnnnnnnnnnnnnnnnnnnnnnnnnnnnnnnnnnnnnnnnnnnnnnnnnnnnnnnnnnnnnnnnnnnnnnnnnnnnnnnnnnnnnnnnnnnnnnnnnnnnnnnnnnnnnnnnnnnnnnnnnnnnnnnnnnnnnnnnnnnnnnnnnnnnnnnnnnnnnnnnnnnnnnnnnnnnnnnnnnnnnnnnnnnnnnnnnnnnnnnnnnnnnnnnnnnnnnnnnnnnnnnnnnnnnnnnnnnnnnnnnnnnnnnnnnnnnnnnnnnnnnnnnnnnnnnnnnnnnnnnnnnnnnnnnnnnnnnnnnnnnnnnnnnnnnnnnnnnnnnnnnnnnnnnnnnnnnnnnnnnnnnnnnnnnnnnnnnnnnnnnnnnnnnnnnnnnnnnnnnnnnnnnnnnnnnnnnnnnnnnnnnnnnnnnnnnnnnnnnnnnnnnnnnnnnnnnnnnnnnnnnnnnnnnnnnnnnnnnnnnnnnnnnnnnnnnnnnnnnnnnnnnnnnnnnnnnnnnnnnnnnnnnnnnnnnnnnnnnnnnnnnnnnnnnnnnnnnnnnnnnnnnnnnnnnnnnnnnnnnnnnnnnnnnnnnnnnnntcactattttcccatgtattacttgggaaagtcctatcttcactgtagctacaatctccattgtcttgctcatccacttttattctctttgtttgggggagggtcagataaagtaatggaagctggaaagcattgtttatacaacaatggtaggtagggatgacctttggtttctttcataggaagctgtccagtaaaatttgctgaagcatttgttaagtcttttgtaaagacttaaataaaaaccctaattgtgtgtgtgtgtgtgtgtgtgtgtgtgtgcacgtgcacatgtctgtatgtaaacactgaggtcagagaaggtcactgaaccccctggagcaggagttacaggcagtgatgcactgcctgatgtatgtgctgggaaatgaactcaggtcctctgtaagaacagcaagagttcttaaccgcggagccacctctccaacctctgtgtttagggtcttaatggcctaggatactggaataaactgagatgggagaggaagtaatctagtgcttttcaattttcctttttaaatgtagtatattaggaatttataaaacatgaaacagctaatctcagaattatcttgtctaaggcaaaaagtttctcattagctttttcttcccaaatagtgttattctcaaaagccacaggtatattttatgaaaatgttaattgatgtacaaaaagcatatttctatctattataaattgtatagcattctggcatcatctaccctaattttgtttttctctattgatttagtaattcttcagcaaatatttatttggtatctaccctctaagttctacattttagtgattataataatttattatcatttatttttttctttttaagtgtatgtccatattcatgtgtggataaatctctctctcctcaagtaagctagtctggccagccagtgaactctagagctctgcctgtctcttcctcccaggaccaagaattgcaagcatgcacaaccatgccagtctctcattttataaaacatggattctgggccatccaacctaggtccttatgcttgtgcaggaagcactgtgcccacggggccagcatcactgcctggccctgcaggaagcactgtgccaacagggccagcatcactgcctggtccttcatggctttagacagtcattgttttaggttctggggtacatcacatggatttggactaaagctgacttggaaaatggtttttcaaagttaggtaataagattgtacattttcaggtttgctgaagtacgattaaataactcagcaataggaattcagaaatggttcccgtacgtgataggagagccagatgttttacaaaaagactgaaagatttgtgttttatttttcacaatttccttaagaaattaataggctttatattttatagcaactttagctctacagaataattgagaacagaatatcgagttctcttaaccttccactctctcacttggttgccccgctggcaacatcttgcattggtaatttttatttttatcaaccattcaatatgtacgtattaaacatttcatgtcctctgttagttattacagaaggataagagaaatatatcacatttatttctttgaaaccatgtataatgatacgtgttcatagtttaaggtcctgtttatttaaacagctgctgcgcccttagtacttgcccagcattgctagagctgggacattgtaggcatccactgattgtgtgatattaacaggtaaaggatctagaagccaaacataatctgtctttaggatttaggagacacagtcacacccagctgtaacagaagaaaatctcaaaagcaatacagagcagtgcttaagcaagggtaggggagacaggtatcagcaaaggcaagcaaaccactgcccacatgaccagtgtcttggctgggacgggcccagggggtgcacggagagcactatgctcctcctcatctctgttgatctccatcagcatcgagtcatgcttatcattccacatctgcatcaaagactgaagacaaaccacacagctcatggcaaggcaggagaaggtgtatgtgtgtgtgtatgtgtgtgtgtgtgtgagattgtgtgtatgcatgattgtgtgtgattatgtgtgtatgtgtttgtgagtatgtatgattgtgtgtgtttgtgtgtgtgtgattgtatgtgtgtgtgattgtgtgtatgtgtcatcattgtgtgtgtgtgtgattctggaagatctaaagcaccatcactcagatacaaatgcttcacatttcttaccgggagtaaaatgaattaggattttggtttgtaaaaggaactcataccctggcaatcctcataggagctgcatcgaaatgctttgccatcctgcaacttcatagacgctaataaaacttagagggtgggtcagggttacagagatctttacaggacaacaaccaatataacgaaacagagggtagaagttacattctctccagaagtgttaactcttactggtgaccaggtacagctctgcttgcttgctcattgttgagtcagactttgactctgtagcccaggctagcctggaatttaactatatagctcaggtagacctgaactcaggatgatacttctgcgtcatctttccaagtgttagacttagcgggtgtgcactgccacacctggctcagacacttttctaatcttaggatgtatggattatatagctttaaaattaagaaggtgatgataatgtaaaaatagcataagaggaaattaaagagaaacatagattgctgcttgctagccttggttgaatcatgatataccctttttacagaaatgaattaccttttcaagttaaaaattcccattcccaacccacgacctagcaagttatttggggggatatggagatcggctgatggtgaagcttacgtggagtcccgagatcatgcggtggtgcatacctgtattctggcactaggaaggccgagtcaggaggatcctgttcaaggccaacatacagtgataccccgcttcattgaaataatgtttctatggggagcatatagccagcatagctgactctatgttgatgaaggaatacagttgaagaggtggtaccttatgagtttagggttctctataaagctacagtaatctaggcagcacagtactagcaaagaacagtgtgtaatagcatggagagccctaaatcgaccaacacaaatacattcagagagtattggacaaaggagtaagagccgtacagcaaagacaaggaagtcttttttcttagcaaacccaaagattgtagacaatcactgccatccttcacagaagttaaagagtatcccagacccaactgtgcatttgaagctacatgaaggagataagagataagctacaaaccattaaaattaacttcctccttgttaaagacaatgtcaagagaaatggggatatcaaccagagattagggaaaaacatttgcaaaagttgttttctaagaaatacaaagaaagctgggcgtggtggcacacgcctttaatcccagcactcgggaggcagaggcaggcggatttctgagttcaaggccagcctggtctacaaagtgagttccaggacagccagggctacacagagaaaccctgtctcgaaaaaaaaaaatacaaagaaaagagacattcaactttggagcaaacagacaattgcttaaaaaaaaaaaaaaaacgatgaaatacttgaagtacacttcaagagagacggagggcacacacacacacacacacacacacacacacacagagtcagattcccataaagctacacacacacacacacacacacacacagagtcagattcccataaagctacacacacacacacacacacacacacacacacacacacacagagtcagattcccataaagctacacacacacacacacacacacacacacacacacagagtcagattcccataaagctacacacacacacacacacacacacacacacacacacacacacagagagagagtcagattcccgtaaagctacacgtgctttcaccgtaggctgtagcaaatacacactctaatatttgcttagatgaatggaagactttggccacacagaactacatgtgacttttatctgaatctagagtggccaagatagccttcagtccaagtgacacctccctcagtgggggacgctcctgtgaaggcaagaagcataggggaaacatcgcagtgtttgctcagttcctctgtaacccagagctgctctacagaaaagtgtaattaagaacatatccccccccccagcctgtaagtactaacactatgactctatctttagctcttttttatctgaaggaaagtattgtgatataataatagctgggcattatttttatttcaaaatgattgattatgtgcctttgatagcatcattgtagcagttgtattttaagattgaatagtattattttacttaataaagcaatgtgaagcagaaactttaaagattaccggttcaccgcaagtatccaagcgctccaggggatatttgataagataaaaatcttcttgccacatgacaactattacttaaatgaccatcatttacattattatagctatgacaacagacagataatcttgcttaatatcatcctatcataatatcctaagatgttatggttggaagtgcagtagaccaagggttaataggctgcaattctgattttaactttgcaaacttttaacagtgagactttgcatggctattgttcacgtctttgcacttgaaatgttcttttgtgggctggcagaatggctcatggcacgacaagtgaagttgcttgttgccaaacaaagaccactggagttagttcactgtgggcctgccatagcaaagggaaagaactgactctctcaagtcacctctgaccaccaccacacatgtgctgtggtccacatacacgcacacacagacgcatgcatacatacaatagataagcagatgtaaaaacgtaatgctcatatctagaaagaacatcacaaaatcccagttgggttctgataaacattgcctggaactagcacccacacccagagtcatttcacagtaaaaccttgagtcatatctgctgctctctgaatagatccctgtctccctgcacctcagctaaatagtcctcttcttaaagtgcaagcttcagtttcagtgttcatgcagctcagatcatatatacatatatatatatatatatatatatatatatagtgtgtgtgtgtgtgtgtatacatatacatatatatacatacatacatatacatatatacatgtgtatatatatgatgtacacacacatttttattaattacattatttacttacatctggatcgaagcttcctctcccctcctctcctccctgtctctccctctcccctctcccctctcctcactcccagctacccctcctccccttctcctctgaaaaaggggagacctcccagagatatcaaccagccatggcacgtcaagttgcagaaggactaggcacattggaatcttctcctattgacggtacgggaaaggggttcaaaggcaggcaatgtagtcagagacagattcctcactaggagtccctcatgaagacacagccacacaactgttacatatgtgtagctcagatcttatttattggaattccaaggattttttttccctaatttttgtcaggatgatccagttaagcaaggaccatatgtaacttaggtggtctctataaatcactttgagcaaaacccataaatgagttcttaactggctccttaaaataggctttttatatgccctccacagttctgacttgggaaatttcttggacaggagcaatgaaagcctctcaattctgtttttgagaacataaaagaattcagtgtctgttaattgctttcgctgtcagatcaggagtcaggtcgtgtggaaatgacctaagcactgaatgtactgttgggagctctgtggtcaaattctatttcttatacattgtaacagtcgaagaaagaggctggtgtcttcatgaatatgttaaaattattatagtttaaaaattaaatattataaaagtattaaaattacattttaataaaggaagagagacagagccttctcacaggttgacagaggggtagacgtggtttgtgagaaatattttgttaggactatcctcttgccatcacgacatgaatactgtgtgagtctagtttataagaaacaattcagcttcttgagtgatcagttattaatgtgctattaatacatgtataaatctggggctgcatagatggctggatagatggctggatagaggatgtgagttcaggtcttagcacccatatggcagctcacaggcagatgtaactccagtttgggggcttccaatgctctatgctggcctctgtgggcaccaaggactctcatggtgcatatacatgcatgcaggccaacactcatacagatatgataaaaacttcaaaatagttttggaaatgtataaatatgaannnnnnnnnnnnnnnnnnnnnnnnnnnnnnnnnnnnnnnnnnnnnnnnnnnnnnnnnnnnnnnnnnnnnnnnnnnnnnnnnnnnnnnnnnnnnnnnnnnnnnnnnnnnnnnnnnnnnnnnnnnnnnnnnnnnnnnnnnnnnnnnnnnnnnnnnnnnnnnnnnnnnnnnnnnnnnnnnnnnnnnnnnnnnnnnnnnnnnnnnnnnnnnnnnnnnnnnnnnnnnnnnnnnnnnnnnnnnnnnnnnnnnnnnnnnnnnnnnnnnnnnnnnnnnnnnnnnnnnnnnnnnnnnnnnnnnnnnnnnnnnnnnnnnnnnnnnnnnnnnnnnnnnnnnnnnnnnaatatgaaactaggtacttctaaatgcttataagctcatacataggtgtagtggctattccctggttgtcaacttgactatatttggaatgaactaccaatccagaattggaaggctcaccagtcacccttatctggaggcttggagatagaagtttctgatctggatcttggtatggagaacttgaggcatagtggctatggattccagaagactaaattctccaagttcaaggtcatccgggattaaaggtgtggtggaacacacctttaatttgggctacacctttcatctgggattaagggtgtggtggaacacacctttaatctggctacaccttctgctggagacaatataaggacattggaagaagggagtcttgctcttgctcctttgcctgcttgctgtgtgagactgagtaactgctagatctttggacttccattcacagctgcgactgaaccattgttgggaattgggctgccgactgtaagtcatcaataaattcttttactatatagagactatccataaattctgtgactctagagaaccctgactaatacagaagttggtaccaggagtggggtattgctgtgataggcctgaccatgcttttatttgaaagaatgtggattttgggactttggatttggaaaacagtggaatgctttaaatggggcttaattggtcatcctagtaggaatatggaagactttgttgctgggagtaatttgaactgtgttgacctggcccaagaaatttcaaaggagaagcatttcagtatgtggcataaagactgtttttgtggtattttggtgaagaatgtggttactttttgcccttgtctgaaaagtctgcctgaggctaaggtgaagagacttggattaattgaattaactgcattgacaaaggaagtttcaaaaaagcccagcagagactctgttctctggttaagtctcacaaagagaagtttgaacaagcatagcaagcttagaaaggccaaatataaaatatatggttcgagtattaaaggcataccaggaagtgaaatggagcaaaatcctgtgttctaggagatagcagattaaggagtgggaccttggggcaaaatcctacccagctaaattaaatccaggtatagtggtacacacctttaatctcaggagactggcatgctgatctctgcattcaaggtcaatctacagagcaagatccaggatagccaagcttaggcagtgaaggatttggaaaacagaaagccagtgacattgtaatagcacaagcaggtcatgttgtagttcctgcaagcagcaaaactctgcagcttcagccacgtggctctgtctctagagttaagaatggaaggaactactgggacaattgatgctggttagctggagctaagaaattagcagtgattaagaagagaccagcatcactgaggtgaaatcttctgggaagtgttttctgggaacacaaagaagctatgttccagagatagccaaggttgtacctcttgctgcagctggacttggtaatatgtaagagtcacccaggtggtactggttttgaaggcatgaagatgtaatgaagaacagctgaggcttggcactgtgagaggtcatggaaggccattggagaaggtgtagcctcagctgtagttgatggcccaggactgaaggggtcatgcaaaggaggctattggtgaagcctagttggagtggaataccccagtgtattggagatgtcagtaccatggagtgatcaccaagagctgcagctgtagtggagtggatcaacctgagcttagagtgctacagagggcagagctggagaagtgatgccagcccttaggaggagtctaaaagatgaagtggaatcccagacactgaaacaagaagctgtaacattgaaattgccttggagactcagagatgttaaagatgccagagccatgggatacatgctgaggaaagctgctaacagggagtggaaacagcccaggagaaagcagtttgttgcagtcaacaaagatgaaaaaggagtggagatctgaagatcgctttgacatcagccatggagatgcagagtttggaatttgcccagctggtttcctgccttgctttggggattacagttaattaagttgaatgaatctcagaagagaccttgaactttggacttttaacattgttgcgactgctatagactatgaggactttgaaagttggactaatggcccccatagactcatgtttttgaacaagtctatggggaccagggagtggaatgtaatggtttatatatccttggaccagggagtggcaccatctgaaggtgtggccttgttggaataggtgtgacctggttggaatgggtgtgtcattctgggtgtgggtataagatcctcaccctagttgcctggaagtcagtcttccactagcagcctttggatgaagacatagaactctcagctcctcctgcgccatgcctgcctggatactgccatgctcccaccttgatgataatggactgaacctctgaacctgtaagccagccccaagtaaatgttgttaagagacttgccttggtcatggtgtctgttcacagcagtaaaaccctaactaagacaataggtaaccataaagctaaaataaatttattattagtgcaagctaaggtcaatttattggtgcaatcaaatgattagtgaaatcagattcagttacgagcgtggctgtaatgggacagatgatggggctcggtgtgaatttatcatgagtgaggaagctagtggctggcactgaacagccttttacttgtaacttgggtttattatattatattattattataatacttatgcagagaaggcttgctggtgtaggcccattgaataaattgtcttagcctcgaggatttattaacttagaagacttggatctcaaccaaaatgcattagcagttaatggtcaattgttaggttttgttgttgttgttttggttttttggtttttttgagacagggtttctccgtgtagccctggctgtcctggaactcactttgtagaccaggctggccttgaactcagaaatccacctgcctctgcctccggagtgctgggattaaaggcgtgtgccaccacacctggccaattgttagttttaaatttgaccattgactaaattgctgtattatttacttgtctcatttctgtgaccaaatgctcccccctaaaaaaaatcttaaagaaagggctgtttttcactcatggttagtggatgcggaccatcatggcagggggcgagcagagcaggcatggtggggagtgtggccctagctgtctgtgcaggagtgtgaggtagccactgtagacattgggtccacagtcaggaaacagagatggatgctggtagtctgctttttccaattctcttttcttttttaattcagtctgggacccaagtccatggtatggcaatgctgtcttcaaggcaggattttcctccttagtaaacttctgggcattctctcaagggaaggtctgcagtgtatcttctaggagattccagtgaccattaagataaagtatcacaattgctaactcacttgacgacaaggttaacattgtggtgacattaaaactgggactaaatgtgcatttaaccccattactaatagaagctggacgaaatcattcaggtgtgtgggtttctgccctagctctctgtgtataagctagtacacgctgccatgtaagatttcagattccaaagctcacatctgcccgcagcagaacagctgtgtctgaatagattaaactgcctcatgtccagcagagactcagtttccccactgcttcttctctttccagattggtttgatctggcttttgtttgatgtttgcacgattacaaacacaaatgaaaagctaggtgctaagactgaatggatgtcgccacctagctatctcttatactaaaagtcaaactagagaattgaagatatagtcattttataaattctagaaatcgtgtgggcttcaagaatacattgacaataacctattacaagaaaactaatgtagggttctataatagctagtccctgtcaacctgacataagccagtaatctacgaagaagcaacctctgctgaaaaaaatctttccatcacagtgtcttggaagaatgtccgtgcagaatttttttggttcattattgacatgggaggacccagcacattgtgggtggtgccaccattgagtaggtagtcctccgttgtattaaaaaaaagcaggttgagcaagccatggagagaaaacaagcctgaatgcagcatttcttcatagcctcagtatcagttactgcctctaggttcctgccttgagttcttattctgccttccctcagggatggggcatgaactgtaagctaagcaaactcttcgttctccaagttgcttttggtcattgtgttatcatagcaacagaaaagcacattaggacaggcttggtactttccaggaagccttctttgatcttctttcaaatctcactaataattattaagtgctgctaataactgattagtgctgttgtgcattgtagaaaattcaagcacttcacataaggagtctctttgaaactgtcaagtatggcaaggtagggacttctgttttgcctcgggacatatgactcttagcaaaagtcaggcacagggtgtggaagtagcttacttagaatttgaacctgtacctttctcaccgcgttatacaaatcttccttatcctccagatgtcttcattatgcattgtgagtcttttattacaagtaggcataatgactttgtgtgtgtgtgtgtgtgtgtgtgtgtgtgtatgcatatccatgtgtgtatgtgtatgtagatgccagaggtaaaccttaggtgtctttctttaagagccattggttttttttgagatagcttccttcactggcctggagttcaccaagcagatgaggctgtggctggcctatgaacaccagggttccacctgtctctacctcctcagcacaccagtggacctgactcttttttttaaatgtggatcttaaatattgaacttaggtcctgcttgtgtggcaggcgatctattggataagccccactcgcgttcccaagcacagctgttttacaattaaccctaaatgtttttctttttcttttataaactagaccagcctttcatctggctttcaaacttccaatatgcttcagacttacccggaatgctttaaaaaaaaaaatatatcaggctttgctccagccaatgaataggaaatttccagccagtgtctagggggtcactatttgttttagcagtctccttcagacacacactgtgagtaaaacacctgtaactgactacagatgactcaggtaccaggactgacttgtctctttgcttgtttgttttgtggttgttgttaaaaagaatctgtgcttgcatattaatatgctgattacaaaatgatagcgatacaattaaaagaacgaaggaaagatatcgcggttgccaagaaggaaagctttcttgggatgaattttgttgatcagcctctttggactgtttagagacacgacacctgacacaccctgtctagaccctcccccctggagcaaggcaagaagctggtggagaagtggcagaaagctctgctctgtctttaggaaaattagaagaattctctgggtctactaagaggagatagaatatttctttttcttcctattttccaagactgaggtcattttaactataaagatctgttctaaatgcgtttgcgttctcaaaagaggttagtagtcctagtttttgacttgaagtgttataggctttaaaattgcacttgatcttagccaaaaggccgagaagcgatacaattgcacgtttaatttatagtcatgagacaaatgtggatcctttcttttgtccaccaagatactttccggatactttctaagtacacttgagaagcacgatgttttcccttcccagggttagtatggatcaagaaatgcaggaacctggtaaagagcaagacatgcaaagataggagagttggagtgggtgaatcgcctgttccacctcagggctgtggtgggggggaggctggaaggtaagaaccagaggaaattggagaggctgagacagcagacaggcagagctcagcagtcatgctgcacgggtggccagggtgtcagcagaagggcagcccaaggtgatgaggaactagctgggggagaatggaatgcctcgtaccatactgttagggcatcagtgagggaccttggttgttgcagagtttggaacaattcctttctgtgaaagcaaaaacagtgttttcttaagaagatgaacaggacagcatcttgtaagaagatgaacaggacggcatcttgtaagggacatggcaggagagaaggagttaagtaggggtattcattagaaagcttctttcagaggtccttgcaggactttgagtcctgaggttttagatcaggatggtgaagtcctagagcagacatggagggacctgactggatagagagtgcctttgctaacagagaacagaaggacacacttacattagccgaggctgagcacacagggacctgtggatggagcccagggtctttagcctaggatcagagctccggaagggccgcatggccacttcaccctttgctgctggcagtgcatgtggctctacttcctcttttccttcccttcccttgcatctcatggcttccttactaggtccctcacaaggaagactgctccatgggaacattttgcttgggatagcaaaaggaattcttgctaatgaggtttatgttgtccagagtacaacctttggaaaattgtgccatgttagtagataacaaagcaatggggtagaggtgaaagtcctgtgatcaagtgaacttggaaaatgccacgagagacttgataggcttctttcttttcaaatggtagcaaatgcattaccttggggctggggagatggcttaatttggaatgtgctgatgtgaaaacttgacaaccccggatttgattcccaacacctcggtaaaaagctagccatggtgccagatgcctgtaatcccagctctggggaggctgagccaggatacctggagcttgctggtcagctagttctagtcaaatgagtgagttccagatccagtgactgtctcaaagacagggtggagagtgatgaagaaaaacagctaaaaactgacctctggtctctgcatgcacctgcctgcacatatgtgcacatgaacatgcatgaacatcatgatacacacacacacacacacacacacacacacacacacgagagagagagagagagagagagagagagagacagagacagagacacacagagagagacttatcatagagggtagattgtagtatgtcacaagcttcctgaaccatgggctctttttagaaggagcatcccaggggaagagaaatgcacagacacatggcaaaatcaggcactgggaaagacatcatagaaataagcctcttaatgctggaagtttgtatgtaatggaaagaaacaagaggctgggatttgggtctggaatgtacaatctgacaaccagaggcaagtcactgggttcctctcaacctctcaaccccagtgtctgtaggctttttttttcctttctttctaatattatatggatcctcaaggtcctttcaaggggtctgagatcatgtgtataggcagaagaaggagtgatctgtgatttttctgctctgtaataactggtatggaaacaggaaggagaggcaatggggacagtgacaagatgatgagcaagatgtggtttgagcccctgagctgattacatggttgggcccgacactgctggctggtgtggcagagacaaagggagtctgtagctcgttcccagacctctgtcacaccactgtgccatgtgctgcatgggcaacatcctcgatgctaagacaacgctcattcccaatgctcactcacactgtctcagttttttgaggtagatgctgtgtgatcctggttagatcagccttccggattgagggttcttcatctgcaaaaataaggagcttaattttgggtcagagttcctgatgttttgtaagaaagaactgtttttaaatagttccaagactttcattgaagatataaagggtatataggtatttttcttacttagtgccagcagtggaccctaagaatgttcttggttttctccttctttggtcttctcacctacttcaaatgtttattcctgacttaggtagttaattcatccacgtagggacagcctcagactcactagattgccaggctcaatcttgtgtctctttacatgcaatgcctatctttttatctccataggaaaccaaattgtttaggttcaacctttcttcatgaacaaacccttcttttggttttcccagttacaaaaaagtaaggatcgtgtttctgatctcctgtaggctaggagctcaggctctgggacttcctccttccctctcctgttgctagtcatggggccactctcaactatgcctacattattattattattattattattattattattattattattattatactctacattatttcttgtttctgatgctgtcactaccacaggtcaggttctatctggttattatgctctctgtctctcctttaaagtcattcacatgccacattcagccccacagagcttccccatagcctttgttcgaaccactcaggctgccggcattcacagccctgtccccaccttgactgttgaccgtcttccagctctctcagttacttacctgttcctggcttctaaccatccatttattgatcttctcagcccacattctgtctatccagatgctcccttctcagcctttcatcctattcttttttgcctaaccaagtcctaggaatatctcaaaaggtagcttaaacaatgccttccttctccatcaacaaaccctcaatcctgtctggtgcctctcaggagcaatcacaatatcacttaggtttcttggcaagtctttgaagataatagttttagaactaaaaccctaaatgtgacagttgtaaagacaatgaagtggggctctagcatagagaagcccgggaccatggtcttggctgggtcttactttcttccaaagtgcttttctttctcttaattcttgtgcttcaaatctgtattacaatatcttcaataaaacctaaaccctgttccatacagtcttggcctgacattctttgctgccatttactggaattgaggtccctaaaagatgaaaggaagtccttaggctgctagggatgacagcatagtgccttatcttcatgtctgtcactgctgatgtgtgcagagtttaatatccgagggatccactgcaaacctagttaattgtatgagttggttcttccttagcttcaaaatcaggaaagttgtaagccagcaggattacccatttgtgatctttgtgctacagggaagcagctttcggaagcagggccttgctctcccctcatgtcaacatgatgttgatgagagaggattctatttgtaaacagccctgcgcacaggacccctgatcctaaggcatgcttaataataagccctgccatgaaatgacagacatctagggcaaagttttagctgtttctcagagttggggagatttcagctgtatgctttgttaggaaaccaaaagatgaagaaagctgtctttagctacgaagcatctattcttannnnnnnnnnnnnnnnnnnnnnnnnnnnnnnnnnnnnnnnnnnnnnnnnnnnnnnnnnnnnnnnnnnnnnnnnnnnnnnnnnnnnnnnnnnnnnnnnnnnnnnnnnnnnnnnnnnnnnnnnnnnnnnnnnnnnnnnnnnnnnnnnnnnnnnnnnnnnnnnnnnnnnnnnnnnnnnnnnnnnnnnnnnnnnnnnnnnnnnnnnnnnnnnnnnnnnnnnnnnnnnnnnnnnacatacatatgtagagcattcctagaaaacaattcagaacagataagcaattgcatccagggcaaaggatgatagtctgaggtgcccatgagacttttcctcacgtgagatgctatatgggatcccttcaagtcctcaaggttcattaggaagatccacatgataaagttattttcataacagtgccaagacatctcttgctgtctccaccctttctttctgctgtgagtaccacagaggagctttccagaggttaactgacatgtgatactacaacaaattgaatccagaagcagatatgataatctagttatttttgatgaagccagatgtttgtgatatcaaaaatgtaaaacaatgttgttatttcataaagctccctgggaagaatttattttttttgtagcatttaatatttatgttaacataattgtcatccaggagtatataataaattttaaatgctccattttaatttataagttaagccattttagcagatagacttgaaatccccttgaggttctctgggatgtgtccagtcccatcagaacccggggtgcttgggatctcatggatggggctgctaagaaggaacaaaatgtgaatgaagcaaaactttgcaataaaatattacttttctttccccctcccctcaagggaaatctacaagcaacctgacatttggtgctcgtgctctagagcattctaaggctcgctgcttgacttctaaagaagctgaaataattgaggaggagcggggaccctctgtttccaaggactctgttctgcagagaatgttctgcaccctctgatgtaagtagtcactcgctggagctctgttgcacatgacattgaaagtcagggtggtgccatgttgaaaatcatctgtcttggttaaagttggacttacccatgccagcactcatgggaatgttgggtccctgggtgtgattactaatattacaatctcaataattgttataaggtgctctatttcaacaatactttgaagtgactcacaaaaaaaaaaatgatattaaggaccaccaaaactggggtctagagcagtaatccgaactccagttttagaagagtaaataacagcaatatgtatctcagagatgctgcagatttagatactgagtcaggatttgagtcataaagagaagcatgctacattgcagagattttttccaggagtttccccattggccggacttcacttctggtctccatgggccttctcgcttcacactttgggcaggtcagatctcaccagtgaatctaacagtgtggcagcttcacaaatctgggtcttttctagcctagggctcactgatatcagaatcatgtcccctttaagccggagctgtatctccaggacctagcataggggctggcatgtggaggatgctcactgaagatgctcaaggtcagagccttggtttagacctgactctgagactttcctattcaggaactcactgaactaagatgtatcatttcctttgtgcctgcatcttcacctggcatgtgaagactgctcagtggggattgccttagacttgcctgtgtcccacactgcctctggaatactgttgagtgttgaatgactgagcgaagcaggtggaactgtggaataagtgattcctgaatacggggaaaattcagtgccccttccttagaccccacccaaggaaatttcttctgttgcactatgtacacttttctgtttctgatcaagggaattcctcactattcgttgcctccttgtggtgatgtcatagtttaatgaagtctttttgcagattgctgcatgagtcttcctcctgctcgccttgtttgttgttgttgttgttgttgttgttgttgttgttttgttttgttttgttttgtttttctttcttcctttgataaactcttagctggagccttcacatgggatggatgttccagaatgagtaattcatagctatacttagccactaatcagaagttattgtgggctttctctattccattagatttgccagagttattcacctatgaatcattccacgctacgtttcaggggctctgactgtggtctcacttcttctcttccatctgaaatatctatttccaggagccattatttcaatatggaaggcatgtgcacagcccagtgacctgagacttggtttgggtcgtgtgtgtcgccccccacccccaatctcttccatggcattgtacctgggagctatctcaagttcattggttctttcaagcaaaagccttttttgtcaacaatccaagttattttgagctgccagaaacaataagagggctattattgtgtgtgtgtgtgtgtgtgtgtgtgtgtgtgtgtgtgtgtgtgttgggtgggggaggttgatgttggggagttgggatagaggagagggatagtgcaaaagttagaatcaggagaaaggacagagtcagaatggaagacatggggagaaagtgagcagactgaggaagagagaggagaggcgagaggaaggcaagctgaccagttctaccgtcatctcaaagactacagttctgaagcagttgaccacctctccctgggagctctcatatccactgtggaccaggctctgtgctatgcagcctatgctttaatcacataggcaagcagagcgctaggagtttaatcgcccaaagctgcagttaacttccgctgtcagaatccactgtaagactgtcaaaaagcaggtggccacacaggtcaagctccagatggcctatgaacaactctttttcctgcatgcttcagttgggatggtggtcacgtggtcacggtactcataagtaactgattaatgttaaggtctaagcagactgaaacagttgcgtcctttctggttgataacctggccaacgagaatttgtttttgggttttcaacctcagcttggttttccctcatgacttagatgaatctttcccttcattcatctgtggtgggtggcagtggtcccacgtgtcctggaagaaatgtgctcaaggacataaaggcagcactgcccaagatattggaagtggctgaaggctgaatagaatcaaacctgggagccatgtgctggctactgagtacttaatggctgaggtaaatgagacaccgtgatcttatggatggcaagttgtgtcaggattagtttagaaaaggcgggatttggataagtaactaattagggaggctccaccactgtcataagtctatatacttatagagtgatgggatggactagaaacagaggcaagcaaatctgtcagaggggaattgaagtaaaacatgaccaggttgacttagacatttctggatgaacagtcctccagcagtgctcccacagtgctcccaaacgcatcagcttgggacagatgtcagcgacgtaagcaaagcactggcgtctgggagtcagctctgttggtgctgagattcaagaactttgaatgatatttttacttttaatgaaacaggaacaaaggttattgaatgtctgaggcattcttgggattatggacgtgagtggaagggaaagaagtagacctatgttagtaagaggcaattccagctaagtattcatgggcaaaaacaagggagggagagagaaacagatacgagagagacagagagagacacagagagagacacagacagagacacacaaagaaagtcagactgagacagacagggagagggagagacagagagacaaacagagacagagagagacagagaaatggagagggagggaggaagagatagagacagagacagacagagtcagagagagggagagagaaagagagagagacagagagatacagagacagagagagagacacagagagagacagagagacagacacacacacagagaattgcatatgctcaggtgggtagtgacaatggcatctgattctggaatattttagaagaactgccctaaggcttaaaggcatggagctgcagctaaacgttggtgctaggaagaactcccaacatgtagaagggagggtgtgtgatcggttgttattgttggagttggcttaggccacaaggacccagagagacctggccgggcacgtgaggtggagaagagaggaaatagcagtctacttggagcagagggtgggtggaggagtggtggataaggttgcagaggagaaaagctgccagagggggcagagccctgactgctggctggggtaagacatctggatgccatgttggggactcagcatttgtgctgtctttgctctggtggggagggggacttcaactctagacacctttattcctggtgtctgttctgttgagtgaaggtagttctgaatgaggtttgagatatcataaaagtaaattttcaggagaaagagtatactgggggtgggggtgggggagccaaaaatatatgcacatgacatattttggactagtgttttctaagatttcaatctgttagttttgctttgatctttaagaaccacccacaaactctgttgctctcagagcagaacatgggctgctagcgagacatattgctttcatagtttcaactctcagtcttagaagttttcatatcatattgaatattttagctcccatttgtgggctgtggagagtaatgttaagtgtcccttgctggcaatgttcactgaattgctaccggagcctgaacctaatcttagtccctgcttccgaggcacagggctcctgtttccttccttcaaacagatggtagggaacgaactaagaaggaatttttaatggaagtatgtttgggctcgatgggcataggcatgactacttgagtttgatctccagaccttacagtggaaggagagcactgactccctaaagttaccctcttgttttcacaagtatgttgagatatgtgtatgccagcacacatgtgcatgcgtgtgtgtgtgcgtgcatgtgtgcacacacacagagacacccacaatcctttgcatgggctcattatcacctgtgttttccattggagaagcagtgttagcccccgcccacttctggtctggcctctgggtagccagattcagatgtttccttcttttaatttcctggggaaaatcccaccacctgtgtcttatttggggtttttgaactgtgagatgatggcacccacacttcctagaatagctgcatccatgggccaagtgtaccagactgcacacaacaatggaagacaggatttagggcaaggaacagcagaggcgctgggaccaggcatctgctccacaaacatacagctgagtccggaggttgtgggaggagaaggcagggccccactgactcactcgaggatgtgggcacgctggctgctctgatctgcaagtcgtgagggtcctagcctggcttttcttcaagaacaaaacttcaaaggaggtaggcataggatgaagcagagttccctagcacccaggaggttttgtgtgggattctgtgagaatctgctacagccctgggtgttcaaatctcctccctaccatttttccccctgtctccatagcttagcactcaaatgattctttgagaaggtagggtaggcacaaatggaaagccttttcttcacttcagttctagagtctggcttgtatcttgccaattctgggagattataggaatgatttagaacttgtatggaaaactacctgacctcttccagggagacctcagggaattccttaaaatatttaacttttcttatgtctactttagtgctaaagaagaagatttcatcctactgatcccatggtgttttatgctgtggcttattcatttataaaccttattatcattattattccactgaaaaaatactagacctttgctctcatgtaggtgctaaagactgtaggaaaacttgatttcatcacactgtgtaagaaagactggaagggaaagcagctaggagctgcgggtgcctagatggatagcccaatgagagagcaagggggcctgtagccaagcaatgccaagcagaagagagaggaagaggttttgccctcactggagagtaacttcactgactctgggaggaacgaggcacagcctactgtggctacagagcaagggacagtgattgcatccaggagaagatgatgcggaaagtacaggccactaggatcaagaaaacaccattaatctttggttgttgttgcaaaattgtgctttccaaagccttggtcaaggatgcagaagcctcaggatgagccctgggatgctgtcctaggaaatgcgcagtggaattccccttcataaatcctagaggctgggagggcctctgagaagaggaaagagctgcagcactgcctggaagacggcagaacatgggcacgcaaggagtagccaaggagcgagagatggagagatatttttcctttcttaatcatggggaatatttattaagtaataaaaacctattaaaatagaggttactttcattcaataaaatctctaattctttctgatcctaaaatcatatacttttgaatatattaagtaacaaaaagtagaaatcgaccagacaagatctatgagtgaccttaaaaagaatccatactgttcaagaaattttgttttatgaatgcaccaaggggttgctctaaaaggagctggctttatacacaaagaaacttattacaacattttgtatatataataaaggaatgttgtaaattgccgattttgaggtcaaaattttatatgtgtgtgaaaaacctgtcaatcagtgatgctctcttggagtgtgagataacacaagacagtctttgtatttttagatgaaataaaaatagaagttaacaaagttatacaaaaagtacaaaatcaatgcatacatatgcccaaatgttgatgttctactttagttccccattgacataatacaaaactacaagagaaagcaacttgtagaggaaggaatgtctttagcttacaggttagagttcatgactgagagaagccagggcaggagcacagggtagaaacccggaggcaggcgctgaagcagaagctacggagggatgctgcttgttgcagctccttgctttgtctctaggctcgtgttcagctagcatgtttgtacctcataggaccacctgctctgcagggacactgctcacaatgtgctgggctctccagcatcgattagcaatcaagatgtccccagatatcttcacaggccaatgtgatggaggtaattcctcaggtgaggacccctcttcttgggtgtgtcaagttgatcattaagagccaccatcacagtgaagtgtgtttgcttgcagactaaggctaagggtgcatctttggtcctttacataattaaactgtcataaatgtgcatgagatattttttatgtgagaaaaagaatacataaccttatataacatttgaagagggggagatgttatgaaagtatcttttttctatctagagggattacttaaaaatcctgagaattttcttccttttttatattctgagaattttttttttaagattnnnnnnnnnnnnnnnnnnnnaacaaagttatacaaaaagtacaaaatccaatgcatacatatgcccaaatgttgatgttctactttagttcccccattgacataatacaaaactaccaagagaaagcaacttgtagaggaaggaatgtctttagcttacaggttagagttcatgactgagagaagccagggcaggagcacagggtagaaacccggaggcaggcgctgaagcagaagccacggagggatgcgggtgtgcaagttgattagccccacacagtaagtgtttgcttgcagcaggctaagggtgcatctttggtcctttacataattaaactgtcataaatgtgcatgagatattttttatgtgagaaaaagaatacataaccttatataacatttgaagagggggagatgttatgaaagtatcttttttctctctagagggattacttaaaaatcctgagaattttcttccttttttatattctgagaattttttttttaagattctgaaacatcttccttgttgaaagttaagttctttacatgtatcaatccgaccctagctaaacaacaacaacaacaacaacaacaacaacaacaacaaaatgcagggtttgtatttgtgctccactcaaacctatgggatgctctgtgacttccatggaaaacaagttccacactgcttggcttgctgtccacactgggaactgactcccagggaatctcagttactgctgtgcattgtctttaagattcgctattcccaccatgcccagcttcccatattggaacttgcatttgctcctcgggacaccatgttccctgggcatgtgttaagcactataaagtgctccaatacttcttacatcatgaccaggttggcccatctgtgtgagctggcagatcagctccttctcagaccatgacacacaatgtgcctgtacatcagagactctgaggatactcagagttgcccaatagttttacagaagaacaagccttgtttctagcttccccatccatacctcctcacaggctatgactgccagaagtgacattttcctcacttccacctttcagatgccacaattcctgacccatgtcccatttccttcttgattcattcccagtggtttcaattaacagtggccatgtatggaattttgaccactcaaatagactgttttctttttcttttaaattaaaaccatagcacatgccaagaatataacagacaatataactgggatttagaattcaacaccaatgggtagaaggacttaattaaatggtcttttagacagagatgcaatgtctctaagtctctcatcttattagcaacacagaaggactatgactttcttgtttgtctttctggaaccaagtactgtgcaaaacacatggtggacattccttaagtgtttgtaagatgaatagatgagcatcaaaggagggcagctttgctggcacagggctagtgtggactactgaaagggttcagtaccacagtggactgggtgatgggaaatggctcagacttaatcaccatgtacttagttcttccagctctttaaaagcatgtgaatgtgtgtgtgtgtgtgtgtgtgtgtgtgtgtgtgtgtgtatgcacgagcatggaggagaagactgggcatataagaatataagagtgcttccctttggatgatacacacttgcaagtccagatacttctactgtggagtaggaggctgaggaggagggatcccaagtttaaggcctgtgtggactatagagtaagttcaagaccaacctggatacacttgtgagtccctttttcagaataaaaagtgaaaggaagaccagggatatagctcaatggtcgagtgcttgtctagcttgcatgacaacctgtctgaatcctcaatcttgtcaaaaacacttttgccttaaggagactggatatatcctctgatacatgtcgagatctgacacttacaaagtatttcacttcctttagggttttgttattcttgttaaaatccccccacccccaagtcactgtcatactaaccttagcctaccacttaaaaattatataatgtgaactcccttccttggcatctcttctaatgctgcttgccttaaccttacagctccttgcgtgtccccaaagacacaaagattatagcaatgtgtgcatatgctattttaagaatagaaccatctctgcctctctttccctttccaaaccaactattgcttgaatgaaaaaaaattccatattgttgaagcaaaccattatttatcacctgtcaccatcaactggtgatttgtgattgcaaacatcattctgtgacctccttatgcacgtacacccataagccttggggaagagctgactttgttaacaagttatttgagttattctcctgactcataaacacaccatggggaaggagggcagagattgttacttcagttccagatgaagaaaacacagtaaacgcatgggaggagtagcctgcttgagacacaagcagactcacagctcaattgtaccagatccagatttcctgatcatttaaactgtggctggctcagagctcctttgatcccactccaacaaaaccacgagagatgttattgaataaatccaaaaccatgaggagaggggtgtaagcagactcttgcattgcaacctcctaccccaatctcaagaccaaattcatttgaaaggtatagttaggagcaaatacattaatggtgagaggggccagcagtggtaatgattgtcctgcaacggactatcccttttgcaatgtctccaatatggctcccaaagagtgtgggcgtggcttaggttgcctagcagcaggagatgtgcatactaaggaagccactcctctcaccctggagggaagtaggtatctgattaggatcagtcttaagggcaattctcaactggaagtaccagctttgtgattaaaattcacaggtgcattgagctgtcactcactcagagcataggagggaggctgggcaaaaggagaagaatgtggtgggaaaatcttagggagcctggggtgggactagggatgtgggtgagtcacgttccttgggtacagatgtaaagatgttaagaggaaaaaaaaaatcagaaaccaagataaacactactttaaatcaacatttagtgtatatcagtatatcatttggcagctaacaggctatggccaaaagcctctttgtaagtaagagtttacgaaaagtcaatagcagaagagccaagcttatgccctggtattaaaaatcctgaattaagcccagaatgtcagactcatgaaaccttagcctgagatctatgagaaaatatttctgaaggaaaagaacaatggatttgactgtttctgttatttagttgtttagagattctataacgagtgaccagaagctgagtgtttgaggaaacttacagcctcacaaatctggagaaaatgcaataccaagctgcggagcagagccaaggttgttctgtagatttcagggaggtagcccatctccaccctccggcttctcgtgcttcctgaacccatgcagttttacctgtgtggtcacctagcctcctccctgtggttgcctgtgtttgtttgtttgtttgtttgttttttctcataaagatccattggatgatatctactccagaaggtgaaaagtcagaacatctaccatgtccctgtttgcatggtaggtcctacaggcaggcagagtcaggactcgaacaaatctttcttgaggtacaaggcgcacctcaaccagctcgctattaggcagggacatttcacttcaaacttggcttgcaggagtggtgatggattggggaaacagacctttcataatttaaattcctaacgaaatgaaaggtaggtccattggggtgcttacattccagtctcgataattgacagcaacaggcctatgattctattagaagatctgatttccagtactcagctgataatgatcgggaaatgtttatactaaattatacatttcttttgttaacttttccctttgagtacaagcaatttattaaattattttgattactaccaagtgtaataaatttcagatttaaaaaaaatgtaaactcaccagctggggcaaaaatgtcctctgtcaaatctggtgctctgatttttagttacagcatgtggctgttgcacctgggaggctggttaaagcttctagaaacagtttgctttctttaagtggttcacgttcttcctgtaacctcatttatataaatgatttgctttctaaaaatttttttatagtggaaaggtaaaattgaattcagcttagcttaattcagattttttcttactgcatactaaaaataagcagaatctcaataaatatataatttggaaagttatttaggggactaaaatgttctagaatttggattaggtggatgcaggatattttgggtttcccattgtgggtgagaatttaaatttacttacatgcccaatatttatctactagtgttaagtctgaacttgtctagcgacagggaaatgaatggagttaactgagggtcttcagctctgagattcctataagagcccaaggtgatagaatcaaagaggaaagtatccatgacatttgaaagaaaagattatgtatttgttcttaaactataaacaaaacttatcattttctccaattaatagaaatcaaagacatttcataccatgttgtactattgtcactctttcaggaagcactcactggtgtttaaaacttgtagttttaggtccttgactggatcttgttaaatgggctacccacatcttgcccgtacagggcacatttctgatttttttttgatgattgcatttcggtttagttgattttctttgtagtctcatactctttgtgtatttaaccatattgttcctagcaagggttctaggtcttcattagactgcaagaagtgatcatggtagtctttagcttccagaagctccttagaaagggatggggtctcatgagcaccccttgtccatgatggtgttggaaggcacatgcgtgggttttgtgacagtactcatggctgctgtgtgcacatgactgtaaccttcatgtcctatccagacgagtgttccccaacactgctccgcatcctctgccacacacagtctgtcctcctcttccacaatgttcctcaattgagggggtgatgtgaatgccctgtttggggctctgcaaagagtatttttaatgaaacatattcatttctgtcttcttgcaaggttcctctccagggcaccgacctaacaaagtatgattgctttgtcagcccacaatcagtgcagaggcaggtcgtacctccgttcctggttcctttttttttttccataaaattagtaattccccattgttccttctcaggcctttatcgtatctccagaagattccgttccaacagtcttctgtatgtgctaaggcacatgagtgctattgtgaagtcaaccttacacgtctgcaatgaggatgtctgcaatgtggagttctgctgaagctccggtttcaaacagataatcatgaaagctaattatgtcatactttgtaactgttgctgttcttcttaattttcccacatttaaaactattagaattttggttagtaccttctgcattcattttcttattgctataaccaaatgcctcttaaggaaccactaaagagacggttattttaccttatggtttgagggaatagagtctattaaggagtagaaggtatgtgagcatgtggccctgtggcctctggtcaccttgcttttatactcaagaagcagggagtgggcaggaaatggagctgggctaccaaacctccaggtcttcccctgaagagatttgcttgctctagcaagactccacctctgaaaagtcccttaactttccacaatagctgaggaccaagtgttcaaacacgtgagcctgaagggggccttcacatctaagacacagctccctcgagtttgtagcttctaaaacagactctctctgtgaatgaaaagcatctgctttgaggcatatcttctccaccccatctgtgaaggtgaatggaaagaacgtacttagttgtgcatggttggagtcagatcatcaaagatgtgagctagacttagtagcaccggaaggaaagaagaaagtttataaggtgccctctctgtgcccttctgtatccttccaaggtttctaacctacttcccggaagtccttgtgcttgagggctgctcttgactttcttgcttagaagcttgctgttctcatactacattctctctctctctctctctctctctctctctctctctctctctctctccctttcctctgtctctctgtttctcttcctgtctcttcttccctcccttcctccttccttttcgttctctctgtctctctctgtccctctgtttgtctttgtctttgtctttgtctttgtctttgtctttgtctttgtctttgtctttgtctttgtctttgtctctgtctgtctgtctgtctgtctctctctctctctctctcacacacacacacacacacacacacacacacacacacaaatcccttactaggacatttttggatcttagttaatcccagatgtagtcaagtcgacaaccaagaatagccatcacaaccaccaccaacttggctaacacagattggaagacttcaaaggatagtggccgaagtcagctcggccgatgcctctgactctggttgctttagacaggagcaaacttctggctgcttcagttatcggttgatagtggctcctatgattaggaaggataagtggcttctctcggctttgccagaaccaagtggtcatgttcgcggaggagtgggaacactaatttcagggatttgactctggtacaaagcccgagggtgcgatgttgctctttccttcggccctagtaaacatcttatgctcggtatggtggttgaattgctggattgagtcttcggtttcagtgccaggaggttcacagtaaatgagaggtgtgggctcttggggaagagtggctgtggcctggcctcctgtctgcaccctgtcaataaacacacacacacacacacacacacacacattctgcaatgcaggtgtgcatcacagggaggggttttctagagctttgagagctgctaggagaaacgggccgaggtgtgggtccagggaggcaggaggtctggagaaatagaacagagccgagaatgaccttttagctcctaccatcccataatcccagctttcccacttctgcccttatttgtgccataatcaggacacattaatttagttccaggccaggtacacgcagggctgttcaagtttggtagtgaactagacacacatgaattttacctttcatttttttttaacctgatggattttaactttattccataatttattaccaaagacaattccacatagtttatatttttctaacagtggcaacctatctattacatcaatgtttattttttagcacagaacaatcaacatttaaacatttcgacattataagatgaggaattttacctttcatagcttaactgtggagcaatttgaatgaatagcagctgatcaaatcattagcacctgctcagtgtggggctgtgacagaggaagtggggagtggcctagggggggtccatccctgtgaccaactgccaatacttgtcctactctgaagtcagatcttttaagcatcctcttttcttcctctaagtctccttccttgcgcttctcatgctgccccagatttccggctcttcttttcgaagacctctctcacagatcagcccctctgactttatagtccccttaggcgcttgtcttggcagctgctggctggacacctgtgtcaaaggtagatcggtgaagcacgcactctccattgtatcccaccttccttttctgcctctgacaggtttatctgccttgtcaccctagttgtaggctttgtggtgtttggcttcccatttctgccatccatgttacacagtcacctccttcattcgtacctgccctgtgccgcttctctctcttgctgttcatgtctcaccagtaacattttgggggatctaggacactctgcgcagccgcagttgcagtgccgttctccccgcggttctctgttactctgcggctgtttctggtctctttagctcaggggattctccttcggaacctccagagctcacgatttttgtcttcagagcttgtctctctgtcactagtaactttccagcggattgttgctgagctctgcatgtagacatctggtttctaaacccggcactgcctgcctaactcctggttcacctgggcatgttcttaatcacgtgtgctgtggtcattctatctgtgaactcaccgtgttcctctcatagagcggtggcggggatgaaatgagtcagcgcatgtgcagtaaaaagtgtctgacatcacagcattccgtggtgcacttcctatttgtcttagggcttctagtgcagtgatatagcagcgtgaccaaaggaaactggaggagcaaagggggttatttcactttgtgtttccacattacagcccatcatcaaaggaaggcagagcaggaacccaaggcatcctaggatcctggagtcaggaactgaaggccatggaaggatgctgattactggcttgctttccgtgtggctcatcctgctttcttataccaggaccacgggcccagaaatggccccattcacagtgggatgtgtctcttcaatccttaatccagaaaatgccccacagacttgcctacagacagtctgttggaggcgttttctcagctggggttcttctttccagaggactctaacttgtgtcaagttgacaagaaaactagctcagacactgctaacaccttgcgtttttgcttttatgactgattactcagtatatttctgaatcgtttatagcattgctcataaaatagttttctggatccacatcatatcgctgactatgcttcttgcgacaaccaaatacctgcccgaaagcaccttaagtgaggtgaggattatcttgatcatggcttaagggaatccagtccttcagtggtaaggaaggagtgctggcaggtggctcgggtggtggcagctgcttgattccatcccatcagggctgttggcagaactggagcgggaagtaagggccaggctagaaacctcaaggcccactctctcagaggcccacttccaaggctaacccccatccctcataggttgtaagccctccccaaacaatgtcatcagttggtgtccaattgttcaaacatacaagcccaagggggggacatttcatatataaaccacaggnnnnnnnnnnnnnnnnnnnntttagccttctggcttgctaggcgtatagagtcaagatgtcctcagtaaggttaattttgttttgctaatatgctccgcacaaagcaggggtctcagttaggggcagaagagagctccttggctggacaggaagtggtagatgagagccagaaggaaacagcatggttgtcaggctttgggtttctttggctctccagctgccactgtcttgttatgtttagtaaaatgtgaggtttgtgttgtctctaggaggacagatgtacacttttctgatgtcctttaatgctgggtgtggcaagggaaatggagacaaggtattatctgaaccaggaaccctggcaaaactctgctctcccgagtgtgcccagtggccttatcttgagcaacagttggggccaccatggcagtaaaatggtcctactgctttgcattgtctctcctggcttctggaaggcctgtgctgctttttagatgtattctcataaggtgctgagaacttgcttgttagtcaccaaagtgactgtggcagattaggaatgtgtggagggtgccccaagtctttatttatttatttttagttctatatcatgatcatcttcatcatcatcatcaccactttggtatgtgtgtagcgcatgcatgtatatgaaggtatgtttgtgcaggtacgcatgcccacacatgtacccaaggataccagaggttgatattcgatattttcctcagttgctctccaacttattttatttcttgagacagattacctcactgaacctgcagtttactctttgggctagactgactggccagtgagccctccaccctcatcctcctgtgttccctcccagggctggccttaaagatgggtaccattgagacctgtgctctgttatgactgagatctctggtggagatgaggcagatggctggagaccagaaccagtggagtgtgcctaacccatcatgggggatgagagtgggttttgtattttgagacctccttcagcagttagggcctgagaactgaatctcaggatggaaagggaggagtcagagtagccccgtaagtattaatgggccggcactgtgtaacactctcgtgggtgcccttcctgtggttagggtaatcagctttagctaaccatctggtgttttcattcacagtcttttggaactgcaacccagtgtgcgtgtttccagggcgactcagttcaatggggggtnnnnnnnnnnnnnnnnnnnnaccttgcgtttttgcttttatgaccgattactcagtatatttctgaatcgtttatagcattgctcataaaatagttttctggatccacatcatatcgatgactatgcttcttgtgacaaccaaatacctgcccgaaagcaccttaagtgaggtgaggattatcttgatcatggcttaagggaatccagtccttcagtggtaaggaaggagtgctggcaggtggctctgtggtggcagctgcttgattccatcccatcagggctgttggcagaactggagcaggaagtaagggccaggctagaaacctcaaggcccactctctcagaggcccacttccaaggctaacccccatccctcataggttgtaagccctccccaaacaatgtcatcagttggtgtccaattgttcaaacatacaagcccaagggggggacatttcatatataaaccacaggatttgtctttctccagtcacatacacacaaacacacacattatgcacgtgtgctatttatatgctaaacacacacattatttgtttgtaggctttagtttttaatcagatcgacattttgatgatgtttctaaataaaagatttagacaagtctccagccagtctattattatgatgagatatgaactgcttttagcttttacttagtgtgtaagtgaatacacagcatgcatgccatgacacaggagtgtaggccagatgacaacctttggtgtcagcctttgagctcgatcctcttgagacaaggtcttttctgctgtttctcatgacatacccaggactagctggctccaagttctaggaatttccatctttgtcttccatcttgcagcaagaactcaaggacaaagggggctgtggcccgctggcgcctcgtgggttctggaggattctagtgtaggttctcactcctcttgctcagcaagaactttacccattgagccatgcccccagcccaagatcccctccaccagtgtgtgcttattcttatgaaggtgtgccgtgctgactggtttatgtgaaagtttgaagtgggcctgatctcagggcctctctgtcctgtgaaatgagcacactcggagacatgtaaacctcagagatgagctcatgggagcgatttctgcaatgaaaatagtgatgtgagggtgtgccagggacttcaggttcacagagtataattagaacttttttcaaatcactgcccactgtaatttcattgttatgtatattctttaattatgggctctaatagtccagtttagttctgtaattaggtataaggacattaatttcagagacataacaattggctcaaatgtacttctaaattctttcccatatcctaccttacaaggaaaattaatgcgccataaaattttgtgcaggaaaagagcttcccagagggcagcttcgaggagcctgggggcttgggttcagggaagacatgagactcttaccttggctccatttccctattgaatgtttgtctcatttctgataggccaagtcgagactatggtggacagagaagaacccctcaattcacattgaatctgtatcccttaactggaaaacttagtgacatcaaagcctgatgagtcccggggaaaggaaagaacagttagggcaactgtgcccatatacaaataaaaatcatgccggcctcatgaagctgaatgcaccatttttttcagcaagttccaagggaaacaagtgggcctgtttcatcttctacagtgtcttcatgtgtacccattgaccccattcgtaactctgcccttctcagcctccagtgaccccttttaaactctacaacaaactccttatttaaagcttccacccaggaaggggaaagtgcagtctttgtgcctgacttctttttattaatgtcttccagttctagctaggctaccttgaataacagggttccatccctatcatggaagagtattttattgcatgtatgtcctacattttctttatccatcttttcatcagtggacattggggctccatttcttagcctttggggtgcaatccattggagggtgtatagtgtctgaacacactggtttccttttttaagttttgttttctttgtataggtacccagtagagggatagatagctcaatcatgtggtagttctggttttagttttttgaggaacttctgtgatgtttccataagttatcagttcttatgaacacataatttataatataggctttaatatataacatataaatataggttagagtttaagctctgcttctgctacttactagtctaaaggtcaacgactgcagggcgctacacagaggtgatttttatttgctaattacattgcagtgaggattcataaatctactgtcagtgtcagaaaccctcaaaactcatttcttctctatgatcaacttagctgtgagagacaacgaacacccaagcatgttatcgtgtgtgctgtcgtagaaggaatgctgcttcctcaacaagaacatactagaagattctcatgactaaagggtcatgctgggcgctggacacacagagttcatagggtggtagagacaggcaggtagatcagtgagtggaagaccggaaccagagtctgacaccgcacttaaccacaggctaagtgttatcatgggaaacatttggtcagttctccagggaccatgatgatacatgagaatgttggccatgtcactgtgtacaggaaggtttctctctgtgtgtgcatgagtgtatacttgtgtgtgtgcacacgtgtatgtgtatatatgcatgttcatgcatctctgtgtgtgtgtgtgtatacatatctaacttgggaatatggggacatgcatgtgcacagcaggcatgaatgaaagtcagaagacaatctcaggtgtcagtcctcaggtgactcccattttttgttcgagacaaggtctgtcactggcctgggatttcaatgtgtaggctaggctaactggcccctgagcttctggagatctgcctgtttctgtctcccatttcactgtttctaggattgctagtatctaccaccatacttgtctttttatatgggtttaaggaatccagactcaggtccctgatcttgtgaggggtcatctccacagcttgagcccctggtaagcttactaggcaaaatgagagatgagcaaaaacccacagcctggagatgactggtggctttaaggaaccgcatcttccaggtctgttgactcatcaatggatatgtgggttatttccatttgcactggaaagcataagccaggccaaaggcttgcacactaggcacctagctgatatccatttaataaacagataaaaagggctgaaagaaagttaggatgttggaaggagtggnnnnnnnnnnnnnnnnnnnnctaaggctgcgtgtcaaagtctgtgccgctaccatttatgtccttaggcttccattcccatgatgcatcattcttagttctctgtttcctgcctaagttgacaagtccatgcatttctctttggaagtcaaagggcaccatactggttacaagggggactgcttcctctgtgcacaagggtttttcagtcaacctcacagagcaaaccaaaaccattatccgagaatcatgtctagtttgggtttgatccagccctggataatgtcagctgggcccaggggcacatgggaatgataatatctcacttgagacccattatggagactgagactctcctcccttaaactagtgcctttctcttttgttccccaagagttcagacaggatactttctatgcccggggaagccacgtgcaattatgactattacagggggggggggacttcaaatatgtctagacttcattcctttcagctccgtgttcactacgatggcaaatttaaacaaaagagcatggaccctccctctccagattgccttgcccaaggctaacattcaatgaataatttatttgttgaaggatcttagctgactgctcaaggcttaaataaacctcatgaatacatctcggttgatgtttttgggctcttggtgtcttctcccagtgggattctcacattcatgggcagcctaggagaaagaggaaaccctgaggatcctgttctacatgtcatatttctccccatctgacttgccaccagtctccaagttagatgattcatccacaaagtctttatttaacatcctggaactgaacagtacctccctaggagccttcaacctcatcaaccatcatcatcatcatcatcatcatctttcagcagcagcagcagcaagaatatggggctcagccctcttagagaagcctttgttaccagtgaactgtggtgaatgcagaaattcatgactgtataagctgctacaaatggtcagccataaacaagattcttatattatcccctttaagaccaagggagcactgcagaagaagggagaggggatgggaagaatataagagctagaggacaggaagagagaccatgaaataccagcttcaggcaataaactctaaataattccaggtgaccacatggggtctgcacaagaacagacccatcatcagctcagtgtatatggaggtggggcttgagaagtcctacctgtcactaaggaatctatttcctaccaacagactccaggaaaggagacgtcattaccgtcactgtgtgccaacatatgacattaccaggttccaatggagaattccaatcaaatggaaatgtagatggctctctggtcaaagcaaatgggacataaaacagaatcaaaggtcatgaatctgtcaaaggggccagtagggaggaggcggcgatggatgggtgataagagagggtaagggaggtttggtaacacaagtgcagtatagacatgtgtgaaactgtcaaagacctaactaaactaaggaaactcttggggtacagatttcagttctctagcggctctcttgctttttgagactccccctgtgctcaatatgaacttcaccggctcaccttttagctttcatacgtatttgaaatacaactattcatagtgcctggtgatttatatggtttctatacctaataagtcggtgcctctctaggctcacgggtttaaacactttatccccagttagtgggactatttggaaaagagttgacagtgtggccctggtgaagaaggcttgtccttgggagtgggcttcgaggtttcaaaagagaggttcccaaagacttctacaatttccagtgtgctctccccacctgctctgcctcctactttcaaatcaagatgtgagttctcagctgtccctttgctctaccatctaggactctaagcttccctttctacctccagttcctggaatgacaactctgagactaattatttactgttaaatgcctaggccataagctttggctcattccctgactaactcgtaacctatttaacctattcaaactattataactttaccatttgcttagttacctctccttcagtcctgcctgcttccttcttcatgtctcttctgcgtctctctctcagcatctccctgacttcacctacttgctggtttatgttcatctcctaggtctgtctctcctgtcctcacctgaatctcccgtttagactctcattatttcccagaatcttctcttttcctgccagtgtcacacctcctatttcctgccgcagctcattggccatcaactttttaattgacaggtggtgcttataggagattctctctacactaaccctccgaaactaagcctagctaaacgctttcttgcataagttgccttggttatggtgtttatcacaggaaaagaaaaagaaaccaatatggtgcctgaacaaagacttaaaagatcattcaaaggaaaccataaagccatgaagaatttgggtaacttgtaaggaagaggaggaataaaattggtgaacccccaaatcagtatatgtcactttggggagagacacagccatgtggacaggtctttctaaaaatcatggctctggagccagactagctgacagtcatgtgatttgggtcaagtaaacaacttctctgaccatagtttatttatgtgtaaatcagggatcttaagacccctgtcttagggctgctgtattaagtgaggccttgcatgtagaatgctaagaatagtacacggcacactgtaaactctttcaaatgggctattgttagcactgagatgctgcagtgctgagtgttcctgtgccagcaccctgctaataaatcctctgagtttattgctaaaaactgagccttgcagaactttgaactgggaggaagcggagagatagttttgtttactcctctttcctagatgaagaaacatgggcctagggtcacagagtaggtcgctgaagaattcaaaaatagtctctgtcgattgcctgggacacctttcttctcacaaaaaaacacacatccagagcctgtggccagtcttctagaggtctagcattcccctaaagacacctcctcacctacgagacacttttggctaaaactctacagcgttgaatcatgcccaaagaccagctaggtggggagactgtctcctgttctccaggctgggctgggtgcagagcaagggcatcttgaggtaacccgggcagaaggagaaacatgcgtatttgccggaacacacatggacagtgtttaaagacaggagtgtggacatgtttctcttaggctggttcttacagggctgagatgtgtcagagtgacttgtatcagcccattgctgatggctttattcactttcaatggcctcagtggccttaggcacattcatatgggatgccacacagaccaatgaacttgtttacaaaaatgtgtacaaacaaacccaaacctagagaaggctttactggtggcaggggaagattttgctcacagccaggaaacccgatgcatctagtcatcttctcttaacacactgtgtttgcaaaattgagaccaagaaggcaagatatttcaaaggaaactcaaggtcacccggggacttgttgactaacctcccggaagtgattgagtcttttcgagggacggagtcttgtgttcttcccaagtctgcatctgtttgcttttgtgattgaggatggaaggatgaggagaccagaacactgtctgcagccaagaggtccagactgaaaccagaactcacatctgggctctgcgtcccctcttgctgggtgaccttgctgtcttaaccttcctggatctggtatcgaaggactgcctatctgctcgcttaatgtgcaatctgtgctcagggaaatgttcacaagggtcagatgtcactatatgaattttgtttgtgatgtgggacagatttctatgctgtgagcagactgagtgtctggctgagtttcctcatgtgtaccaccaggtcctgcctctaccctctaatgatggacatcactttccagaccattctgaccttctctctttcacgagtttggttgctcaggcttatgcaaagactgtgttcatgaagatggaatggtaggatagcattttcctttggctttgttgttataacaaacgacctagatttgtagccaactgacaacagaaatacatttttttccccatttctggtggtatcagtcctagattgaagtgccaggggacttgatatctagtgagatcccaccttgcctcctggttgaagatacagagccctcaaccaggaagaaggtctccggtttcccgttttaatcttattcagcggggctttgcccctgtgcccctcattgttttcagaaggctgcagctccagtatcttctgttgcagatgtgcttcgagagtgtgaacttgggaagggataaacactggagtgaagtacgcgtgggtagcacgggtctgctttcagcagaggagagccatgaattgtatgcggacctccgtgcctctcctctgcgtcatcttaagagctgcttcatttcaagggaggaaaggttaattttgggtcctcttgaaacatgcaggcaatgcctgccaaatccaggatagcttagagccacaacctcatgaggggcctggttgggtctgtgtgtctgctttggatcagccccaaggccttgccctgattcctgtgtgagctcctccctcctctttcctggagaaatccacagcgaggcagtgaggcgagggggccagtgtttattttggcctctctggagctggactctgctgctctgtttgcctaggatgaagtttggtccctcctttttttatttggccagagactcaacctcaatcatttggtccgttggtgattttagaccagatgttcaggctctttgggacagggagaagggcacaggtattactcctgctcaaacctactaggaataccaggtagttatcctaaaatccatggctgcaggcactgtcaggcctggagaatggaccttcatttttctttgaagtggggctggagctcagtaagcaggtggacctatctgggcagcatatgcctagctcaagcctgcttgctggctgtcttgggctggccaagtgactagatgtaagcaagggctctggagccagtctaggctaagggttcactgcttcctggatgttaaacttgaaaatgattttagttctctgaatctcagtttcccttatgaaatgattgtattttgacgatttgatttgaaggattaaatacactaatatgtaaaactgaaagacatgaaatttgctttcacttataagatggcaaaggttaatagaatgctttaaaaatgtgatccagctacgtgttgtatatgagaaaagtctttgagctataaggttacaggtatgttggacaaaaaggaatgttttgaatcatataggtattaattaaaagtcttcaataaatattagcaaattgaatgtagaaagagattgaacacattcagagtgttcattccaagcatacaatattggctaaatataaaaattatatgaccttcttaaatgattcacaaaataatttgccagaagtcaaaaatcaatcattggaacattcaatgaaatctctccttaagtaaagagtagaggacaattacttgataaagagcggctacaaaagtctacagctcactttgcatatggaaatggtgctttcttcctaacactggagtacaaagacacctgcctgtgttttctttccaacacagtaccaaaagttctaggcattataaacacaagtaaagatctatgaagtaccccactgcttgagctgctaatgtgctcagaaagctaaaaaaatcaatcgtaagtctatgtctctggtgagtctaagtcacttgacattttctgactcaacttctcttctaccagaagaagccccaccctcttccttcatcctttaagagtaaagaactctgcacaccaaaacacttaatatgttgagcaaatggggctgtgccaatataggggaatgccagggccagggagcaggagtaggtgggttgtggagcagggggcggggggaggagataggggatttttctgagaggaaactaggaaaggagataacatttgaaatgtaaataaagaaaatatctaattaaaaaaaatctagcttttccccccaaaggttaactgatttactgactgtcattctaaggaagaactttattggaaacgcttttgtagaactactcattgtttttaaacctgtgcttagaaattagctgctttgtgttggggagagtttgaagaaggagatgggggtatacaaattgtattttattatatatatgtgaaattctcaaccttaaagaaaaataaacaaaaaaagagaaaatattcaattttaattcagtctaaatttagactgctaatcaattaaattaaaatttcgtgccaaaaaaaagagagagaaaagaaaagaaaagaaatgaaaagaaaagaaaagagaaaaaaggaaaagaaaagaaaaagaaaatggggctgtgtaaatcttctgaagtcagatgccaaggacgttggcatacattttcatttcttttttcctggctgatagtggcaaatcttctactgtccttcttgaagagcatggaccatggggtttaattttagagagctgccttgagaattcctgaagactcaaagttcatggcttggctaggtaacttctgagaatgtttggaaacaagagagtttatagcaatttaagggaggctcaaagatgcttgtttctgcttgtgtgggcaggaagatcttgaagtgatccaaaacaaccagccaatcatgtaagatgtcgacaaagataacgacatgtaaattcatagtatgtgagcccttaagatcttcaaaaaccacaaaggaatatggaacacacacacacacacacacacacacacacacacacacacacacacacacacacacacacagctagctccctcagcaccagtgctatcttctgaggctactgtaataaatacttatggttaagatcaagcgaggaaacttgaagcttaaagctacagcaatctctaaatcctcaactaggtcacactcacgaggcactatagcaaagtggttagaagtatggatttctgctggagtttagatcctactttcacctttgttagtgccgtccttgacctgttgtttaactgtttcctgctttggtttttggcctcaatatcattatgttaactgtaatatctatctcataggattgctgggggaaatctaaagaagtcagctatactcagcttttatgcatgaagcagaggggatatatgaatgcaatctaatctatttgtatgatgtatggcgggggtgggtgacttttgcttttaagtactgtcttcataaatcatgtcatgatgctactgtgacggtgcccatcccccttcttttagtcactgaaacgtaagtatgtctcagggccaattaacagaatgatttataatccattagattcgtggggcacttcaggccttgggtctcctcccagggctcctagtaacaaggtgtacagttatagatccgtgaactggtgtccccgaaccccattcccatctacatattgaggaagttaacgggtgcctgctgaggtcctttgtttcctagaaggcagcatacttctgaggtggagaagcagttttactgacagggacaccgttgggatctcctaggaacaaagtgtcctctgagaacatttcagcagtggacagttttctaagccctttccattaatgaaccattggagcaaatggtgatgaaggcacatccccatcctcacttaggaataagggaaactgaggcagacagaagctgagttgcccaaggttccctgatattaaatggcaaaactgggatttggtgtaccagaaatcctgttctggaacagacgggtaagcaaagtgacgggtaaacaaatcaaagggccaggtcctaactgctgcgtttcctctatggtcctgtgctatccatagctctgctaggtactcagctgacacttagcatcctcaatgatcatagacatgtgtttagctaaactgattttagccttctggcttgctaggcgtatagagtcaagatgtcctcagtaaggttaattttgttttgctaatatcctccgcacaaagcaggggtctcagttaggggcagaagagagctccttggctggacaggaagtggtagatgagagccagaaggaaacagcatggttgtcaggctttgggtttctttggctctccagctgccactgtcttgttatgtttagtaaaatgtgaggtttgtgtcgtctctaggaggacagacgtacacttttctgatgtcctttaatgctgggtgtggcaggggaaatggagacaaggtattatctgaaccaggaaccctggcaaaactctgctctcccgagtgtgcccagtggccttatcttgagcaacagttggggccaccatggcagccaatgctttgcattgtctctcctggcttctggaaggcctgtgctgctttttagatgtattctcataaggtgctgagaacttgcttgttagtcaccaaagtgactgtggcagattaggaatgtgtggagggtaccccaagtctttatttatttatttttagttctatatcatcatcatcatcatcatcatcaccactttggtatgtgtgtatcgaatgcatgtatatgaaggtatgtttgtgcaggtacgcatgcccacacatgtacccaaggataccagaggttgatgttcgatattttcctcagttgttctccaacttattttatttcttgagacagattatctcactgaacctgcagtttactctttgggctagactgactggccagtgagccctccaccctcatcctcctgtgttctctcccagggctggccttaaagatgggtaccattgagacctgtgctctgttatgactgagatctctggtggagatgaggcagatggctggagaccagaaccagtggagtgtgcctaacccatcatgggggatgagagtgggttttgtattttgagacctccttcagcagttagggcctgagaactgaatctcaggatggaaagggaggagtcagagtagccccgtaagtattaatgggccggcactgtgtaacactctcgtgggtgcccttcctgtggttagggtaatcagctttagctaaccatctggtgttttcattcacagtcttttggaactgcaacccagtgtgcgtgtttccagggcgactcagttcaatggggtttgttttggaaacctagactgagactgactcagtggctgagttcagcattacgactatgaaggccgggaggctgtctccaaagcctttgccttgggactggttctcaggggcttttaggaaagggagcacttgaactagaccttatcagaggtgttctgtgcgcggtggacagtggttaaaacagacatccgtatctgattagagtgtagagagtgctcagcttcatagggagtgtctgtatcctccatgtccaccctggctcagaggtcatctctgaagaggggatggaaagattgtaagagccagaggttaaggaggacaggagggaaactgtatcccagacatgacaggatcactgcattcatgaatgcacagtagctctggttgcttgcacaagacccgcacaagaccaagccactcaacattttagcctgaatgctcacacgctcccagagatagctgcggagctatttacagttgatggtttcagagggagagagaactagattttttaaagggtgtggtccctgctaggttggcccatgctctggggaatggccgcacacctagaggtctatgggccatataaaattggacttggtaggttattaaagaaaacacaaagagggcaggaagttgggaggggcgagaatataaaagtcttgggagaattaggggtagaaaaacaagggaatatgatcaaaatacaatgtatgaaattttgaaataataaaaatagtctatgaaaatgaaataaatgagacagtatatttcacagtggaaatattagcatacacaaatggctgtccatttgttctgtccagtgtgacacttcttttctgtcttttttcccccttccccatttgtgtggatacctttcccaaccagtgtaagtggtatgccaagccaacttgtctgttttctgggtactgcctaagtgtttgcccatgttaattcactcaatactgcaaacaccatgtgtggtaaaatacaattgttatattttattgatatggcaaccggagatatgattcggttaaagatctgcctcaaaataaacaagaagatcaggcaagattggaaggcagctccaaaccccaggctcttaaccacaaacaacactggccccataaattctctgagtttattgattttaggctccgttagctggggaacatttacacactatctctattaaaaaaaatccgcgtgggttttcaatctgcctgcaaggagactgctatgactcaccgaggaggggcaccagggtgcgtcagtagacacgagtcccatagctgtcctgggctgaactgggttgttgcttatgccagagctctggctggagaagtttcggggaagtaccaagtgtgcaggggtagcatgcgagtgatccctccacacttgcctgcccgtcttagtttggctggatctggatgatgtcgtcttatgccaatggattgtaataagtcatttccactgatttcgaagacttggtcccctagattaccctcaaatgttctccaaataatagcctctacttctgatgtgtggcccaggttccataattcaagcctcttgtcacaggactttattccagtaactagtgttggctttgttagttattggtacatctcttcagctcggggtcaggactgcatgtggattcggatggtggccctggctctagttgtgatgtggtctgttagggtgaccagtcaatcccaagacaattccactctccagcatgcagctggatttacggaaactcacacgacctctcgaggctgtttattatgctggcgacggctaatgcttgcacttctagcaagtcaccagtgtttattccttgccatgaccctatggggttactgaaagttccaagtctcatttacagtcaaagcagcacaagtgaagagtgaaagatatgtgtatttcgtctgataagaaacaaagagatgagtcagagcttaagctgagggagttaaggtgtagactctgcgctcctgactgccaggctggctcaccctggtaggcagttggggctttagagtgcagacaaagcactttcctaaagagtgtcttgttgcatttaggttatttacattttcagtagactttggtttttattgaagttgataggctactagaaaaaaaatgcaatgccatgcataagcaattctccaaggtttgtctttagattaatttttcaaggggtttagcaaggacacaggacacaggatgtagtcccaccttgtcatatgttctgactgcttccaagggggcaaccatcttatggaagaagaaatcgaagttcaaggatgttataaaagccacttagagccatccagctggcaagcagggggctgtttggggcagtctggctccagacaccatctttctaattgcccattcttctctccagtgggagggtttctgggcttgggtttgggacacgaaggccaactcttcctgaggctgactcatgcctcttcatccatttatccaatagctacttctagcagacctactgtgtgctagagcttgttagttctggctatttactactgtgatacatgtatgctccgcctaggttcttccagatctcattgttggattttcagtttctgcctctgtaacagataagcatgaaaaacagatgagtagttctcacccttttggaagcccgtgcctgtcttatttataaagatacctataaacgtagcttatgccgtccttaatgtttttctgcaatttccaagtaagtggcttatggtgactaaaaataaaatgagaacaattctgatgttgaataatttttgtttgaatcacacaggccctcgtctctctcccactctgttccccatcacagccttcattcttttcattaagaagccctgggtgctattctcacgctaaaacaaagggatctaccgttatagctctaactgctctgagccgctggggttgcgtctgtttaatttatattcattctctcacccagtcctggctttggggactgtgcagcaaataaagcattgctcatttcttttactgaaaacctcatcccccccatgggacactggtgatgggaatcatgtgctttggagccatctgacatttccccatcctgtttggggagtgtgcagcgagggacatgcccaggactctgacacagcaggcccacaggctctttgctcaagggccttatgagttagatgtgcttttggcgctaggaaatgcctgggctgtttctactctagactttcatgggaaaggctgcttcacggacctcttagggacagcagatggcttataaatatctccggaggtctgggcttctcacttagtaacgtgtaactccatgctgttcttgaaagtcttcgtagattcacttgtaaagtatgaggagccaatcaccatggacggtaatgagcagggtatactgattgtattgcaagaggagagagcaggggcctcatgattatcactagaggaattttttaacctggctttttagcttctttaaagacttttttaagtgtgtggtgtgttgtgtgcgtcgaggggtgtgtggacacacacaggagctagcgcacgagggaaggcgcttgtgtcgtctagagaggggattgattggatccccctggagctgaagttacaggttgtttgtttatgagtgcctgagatgggtgttcggaactaaacttgagtcctctggaaaagcagaactgctgagcaatccttctcgcccatgcctggacttttaaaaacagtgcaatgagttgttaaaaaaaaaaatacagtttttataaacacaagcttctccacctgtgctccatttcctgaataatgactcagaggtttattaataattataatgctatgaccttaagcttaggctctgccccccccagcccccactagcatgtaacgtacgtaactcatttattatagtctatgtctgccacattgcccgttacctcttctcagtttcatgcatctgacttcctcagagttctgggcgaatcctcccacctctctctagcgtgcagaataccaaaagagttccatcctctatttcctgccttttgctaagaggccatcagctttttattggtgatgcttccatacagtacacaagagagtctctctatgaattttctcaacaaacactgacataggtacatgttttgtgataagcatcaagagatgggtgatgctcataactggggttatgctggcaatggttaaagaatggatcctacagaagaggtactcagccctggtgtgtagctttcggcaaatctcctgtgtgcgtactctaatcatggtgatttgaactactgtcatgatgtctgctgtctgccagaatctctgaatatataagaatcattacttaggagcctgtaaaagctggtcctgaaccttcagccagtgtttgctttcagagacagatgaacagatagaaagtttctccaagggccagtgacttgcctatgtggtgaacacatccaggtggttcagactaacgcagctgggttagtaaggaagaattctagggagagggagacagttacctttcaaaacagtctctctgccttcaagccaagagaaaaggcgttggactggtttcaaggttcctggcagaccagctacatctcaccctcctaggttcgttcccacactggctgatacaaaccttctacgctggccagcccaggatgttgtgtccagtcctgagcacataaacttctcttgcttccgaaggctcctcattcagaagatgctctccctccatctccatctccctgccttgttcagccttcctgtgcacacaattcccactctcagacatgaaaggaaaagtgacacagtggactgtagtgaagtgaaccatttgggttcatcacgttactgttaaaatgggaaaggaagatggcgtaatcaggaggtatggatggtcctccattcaatacgggcctgggttcaggatgaccaagaactctcccaaccacatatagacaagagtaagggagctatagagtaacaataacagctgtcaataagagtgaaaattggtacagtctttccataagccttttggtagtatttattaaaattatgcatgtacacactaattgttcccttatataggtaaaaatatggcacgtgtgttacctaaaggtttattctagactgctccttcatatgctgtcattataaggattccaaattgggaaaaaccatatgctgatctataatagagagtaagtcgtggactagtcacaaggtggaatgccatacagctttgaggaaacattgagtgtcatgctatgtgatattatgagtgtatctcacagatgtaattgtgagtcagaggggccagactcaaaagaatacaagtgaaaatttttgtatgcaaaattgtctgcctgtctgtctatctatctatctatctatctatccacatgtacatgcacacatacatatacctatacccatatatacatactgtttgcctgcctgctcactgtgacattagttttaccccagggctcaccttgggtgctgttttcatctaggaagctactctaacaaacacttctgaggttggtcagatactcatgggctggcagcatttccccagagttacctccttatatcattctgtaattacttttctgaaccttccactctactctaaagggctgaacgggcagtgactgcatcagtttgtattctgggtatttagcacagttcctggccctgagggattgatcactattaaataattgcagagggaggtctctgtattgtgtgagagatgaagctttcaatcacggtgaggtacgagagtgggagaaagttaggtaggggcttgtcacttgtctgaggtgtctttggaagttcacttcaacaagtttaactgagttgtaaagacgtaagcatcagatactctgctcatagccaccactcactgagcaactgctacatgccagatctcaaactgctggaagctgactgtattgtttaagtctaatgatcatcatgaggggtccacatcgtcatcctatcttgcaggttaattaaggctgagagagctcaagtaatttctcctgggtcacacagcaggtcagtggtagcactgagctaatgaacccagtgcttctggcttgaaatgtaccagagcacatgtctttaggttctacatctctcatattgaaagcatatgagctaactcattctggaattatgcacatcttccttctgcttattgctgtagattatggatacctcgtgcatccattgtcctcctgtgctgtttaaagggcaggggagaaggggatggtgaattccatggatccagcagagcatctgacccacaggggacacggaaattgcatcgtttacagcaggcaacactaacataggcttcacttagcagaagttcacaactgaagcactcggaaatgtgggcatggcagtactacactgggcaaatgatgaccctgtagatggactgagcaggaatatctggccacccttccctgaagtccctttaccctctcaggcctctgggctcagagttcacaggctgagggtgtgtttgcttggctgtgactatcccctcagtttctctttctgggtatcttatttcataagctgagcctgccacagagctctgggattctgctggctttagtctgagcctctggctttcattgctgcccttctagccagatctgggaaagggtttgaaaaatgacactgattggatgcacatttgatgaaggtgatggatggtcaggcaactctgagtccctagacccagatataattgacaggtgtaccctcctgatgggagccaagacccagacttcttaagagaggccccctcccactcctctccacccacacccctactgtttgcctagctctttctgcagagacccaagggagctatgggcctttccctgcccctggtcctcactcagccacctctgtctccttggtgctgaaaaaccccgcctgtgttagtcttctatttggggctgcagagtctcttcccatcccattactgaacacatgccttggctttgtgctggggacctagtatctccattgccttgctatgtcggacccctcttcttgtgccttcccgccttttccgtggatcttccattctcatggagcattttagctagatcttgaattaaggtcttattaggggagcttcagagcacatttgtgacaactctttctctgttttcgaatttcagagatttcatgggttggggttaaccagctagaagatgcatgtcttggaaagggtggaattccagactatttgaaagagagccaagacctgcccccagcagtttagagaacaacccaaatattgggtttaactggtctgctagagaagtcataagatccaggtcctaagaaccccttggcaggcaaaagtgaaactctatagagtctcccaacagcatctgctgacagtggaagtattccacgtttctaatgagtgtaggcttaaacatacttgggaaaataagtcccggtaagagattactctgacagctctgcatgctaacgtggactgcttcttattagagcagagggggatgggctttctgtttgtttttggtgtgtttgtttctgctgccaaggtgtgttgtaatgtcaaggttgtttaatatgtatgagcctccaccatgtatgagcgagaatcagagtgcatttgctgtgaaatgagattggttccagtcatttaaacagctccaggtgtaataagagtcgacaagaattgatgccaagaactgctttaaggattaactcatttagtcctgaggctggtcctttcaggcaggactgccattggcattccacttttagataataaaacttaggtttgcttacaataatacaggcaggcaaggctagaggtgacattgaagatgagctatcatgttctaaagcctgcatgtcaactgctaacttaaaacctgtgacgtgttgttgtaggttcagatggtactggacttgtacattctaaccccgagaacctacctttattgataagagtgacaacaactaccaatgaaggacatcctctttgagaccgaaaagagaactcgatggtttgttagtcactgatgtttgtaatttgtccacttgtttatctgcctgagactggtccttcttaaaacactgctaatgaaacaggatgctggcatcaacgaaggaggaaaatgagaagggagaagagtaggaaggcagagtgatcaaatggcagaggttggtgggataaagcgttcaagaagaacagaagctgtccaagtggatgctctgctagtcctgagggttgttagtcctctgctgctgctatgtgcacccttgaggctggccaggcatcaaagatggcggtgctcatgctcacttgattctgtcttactcctggataaatactgctcctacttccccatgtcactcaagtaagaaacacagtttactctgtcccaaaggcctggctccagcagttgtcttaattgatggttttgaagactgtagaggttttgctgttggtgagtgttgtaagggtgtctgtggttctgtgatctggcctctgcaaactatccatctggatgatgtataccatcaagctgttctctgtattttgttaaaatgtattttcaattgcttgtaagttcatttcaacttccttcctgaaaaaaaaaaactcactaattattcctataaacaccatcagttgtgtgaaagtgaaagcctgtttgagtcaggccggtggcacaggtctgttttcttatccacgtaagaggcagaggctgatggaccaaaagttcaaaggcagaagggcgagctcagggtcagcctgggccacttcatgtgacaccatctaaaaatgaagcatcatgaaaaactattgtgagtgttcaagggtggtatgcttacctataacaaagccctgagattactcagactaatgctgaggatgagagagagagagagagagacagacagacagacagacagacagacagacctaggcttagctccataatccacacataaaaacatgaaagtcaaacttctctttaaaattcttaaacctaaatgccgagagcatgcagtttgcacacatttcatttaagcaagcctcagagagaacccttcactccaattagcttaggtaaggtgctctcatggtaaggttaacatgtcctgtcagtttgtttgaagctgttgggagagtgacatcccatctaagccttaacctgagcagaagcctctatgcgctctttgcaaacaatcatagctactcaggcgagagcttcactccacagccataggccatgcagaggtgttagccattgtaggggcagtgaccatgacatttgcctagagcacatcccttaccacatttccagtgtcatgaggttctaaccatgtgatcttcagtcctgttttaaggcccaacccacctctcacttgacattttacatatcattctgtataacagaatcatttgccatgttgagtttgccattctcctcattgctgaatcttatcccttggctcaggtcattataagcaccatgcctaccaggctactgtagactctagtctaggccctatttcttatgctacatcccctttcaggacgtagggtcacacgattcaactaagcacccatcatgtacaggtgaacttctacacaagagggtgtgcttgtctaaaagcgtgggagttgtgacagttctcttgccaaacataccaaaatgcacactctaaccaaaattctagaagaagtgggaattgagacgtgtactgttgagacttggggtcatggcaaggcataagaggaaatagtactgagaagacatgatgttgtgttaactgaccctaggaagcacttctagggcacagtggagaataagcatgcccagctcatgccattaaattgtttatagctagtgttaagggcagagaaggaaactttatgccttgcagctagaccaacgttttctcctctgtagctgatcactcagtgtggggtggtgaaaagaaaccagagaagccctgagcagcgtggatttgtgtttcaatagcattcaacaccccgatgaatcatttaggactcacggagttgaggcacagaaaaggaagtggaaagatagcggcagtttaccaatgtgcttgcagaagaacacagaggggacgcagcacaacagagagggttagcttgggaacattaaatggcgtcattacacatggctccttttcactgtccccacatggtacagcatagtgagaggagctctatggggtctccttatgatcttctctattaaggttttcaaatggaggtcttacagtatagcccaggctggtccccatctcccagcaaccatcctgtcttagcctcccaagtgctgggattctagctgtgtatcaccacccctagttttggtgtctcttaagagaggattgaaagagtccttattatcttttataaagatgccaaaagatctctgtcacaaatggggtaacaggctccaataccattgcatagtggggccagtatttcaccatgaatttcagagtcatatatcagcattcagcaccgtctatgagacctctgaacagcgtgctctctattgtgaaccaaaaggctttgtcctagcttctgcttctaggtctaccacagcttcttgaagacaggccctgaggcacagctcagagagagcaagtctccaattccaagccttttggcgcttgttccccccacacccaccctcattaaggcttgctctactttgaagatgtctccaagacccagaggaagcccttagatagctttgtttctgtggagatctttggctggacttttgctgtctctcccagaggtgagaggccgtggttcccaaagcctcgggtttggcaccagctcctccctggtaagttcagatttcaaatcttactctggccacggcctcctctctgacctagagtgaccttacaagccaccaagcagacagactcttagcctttaccattggtggttttcattccagacaggagccaatgggttttagaaacggaatgagtgggtgcctctcaccatctccactctggcctgggtctggcagagatttcctctgtggcctgggcaaggaataactgatgaaaccaggctgtcccagtgctttgtagtgtgtcgagcaggcaaagttcttattactgtcagatggcatgcacctgggctacataggaaccatattcctcctgagttggggacggctctgctaagctgtggtgggtcctatacgtgtttggaaccatgacagcatggggaatatcagcaaccttggtttgagaagctcagtccccagccccaatggatagttgataatgcagatactcataactggtcaaagtgataaggataagtgacagttgagtgtccatctctaaatgagatatctctatcaagatgctcctcaccctaggcccagggaacaccacagaagggaccaaaagcatctaagcggtagaggatggagggagtgctatgaagtatgctcttgataggacatggctgtcacacttatgaacttacaacagctggggtcccctgaataaaaacctgcattagatcaagcctgtcagcatttcaaaggaatgggggagggacttgtgaaacccacccctggttgtagttgatggctgtagagggctgtctgttttggaagggtttagacaatgataggttacatacactccaatagatgcacccaccccaaaccacatgcatgtaggagcactaatttgtctcaatggctataaagaaagaagagggcattgaggagggtggggtgggacaagggggaactggagaaatgggatggtggggtttgggtgcaataatgtcacattgtatacatttttaagaatgttaaaaataaatgaaaatattactttaaaattttagagcattggagctgagagacagcttggaatccatctattctcgtttagcccaattcctttagtgaagaggaagctgggccctttatgggaactgcaccactgcccagtctgggtggggggtggtgattatggtagagcccaagctagcgctcaggcccatgggtgggtttgctggtagtttctctttctgtcctcgctggttcaggatcctttagaggctgtgaacaaaatgagaaagatgtataccaagcctaacacactgcctggtatttagcaagtgctcaattagtgtttatcattactcgaagaaaaacttagaggaacaagatatccatgcctttgagaccactgaagttttgttgaggactcacaagactcgtggtcatacatgcacacaactgggaatttgtaaggtacaggttaccgtaggtagggttatctgctgagtcaatgggttcagcaatggaagagatatgttatgactgcctataaggaggaaagaacctcatggaagaagcatgtgttctctgtnnnnnnnnnnnnnnnnnnnnnnnnnnnnnnnnnnnnnnnnnnnnnnnnnnnnnnnnnnnnnnnnnnnnnnnnnnnnnnnnnnnnnnnnnnnnnnnnnnnnnnnnnnnnnnnnnnnnnnnnnnnnnnnnnnnnnnnnnnnnnnnnnnnnnnnnnnnnnnnnnnnnnnnnnnnnnnnnnnnnnnnnnnnnnnnnnnnnnnnnnnnnnnnnnnnnnnnnnnnnnnnnnnnnnnnnnnnnnnnnnnnnnnnnnnnnnnnnnnnnnnnnnnnnnnnnnnnnnnnnnnnnnnnnnnnnnnnnnnnnnnccatgatgatcatggatcaaacctttgaaactgtaagcaagcccccacctaaatgcccagatgtccctcaacagaggaatggatacagaaaatggagtactactcagctattaaaaacaatgaatttatgaagttcttaggcaaatggatgtatctgaaggatatcctaagtgaggtaacccaatcacaaaagaagtcacttgatatgcactcactgatatgtggatattagcccagaaacttagaatacccaagatacaatttgcaaaacacatgaaactcaagaagaaggaagaccaaagtgtggatactttgatccttcttacaagggggaacaatatactcatggatggagttacagagacaaagttcagagcagagactgaacgaatgaccatccagagactgtcccacctggggatccatcccataaacaaccaccaaacccagacactattgaagatgccaacaagattttgctgacaggagcctgatatagctgtttcctgagaggctcttccagtgcctggcaaatacagaagtggatgctcacagtcatccattggatggagcacagggtccctaatgaagaagatagagaaagtacccaaggagctgaaggggtttgcagtcccctaggaggaacaacaatatgaactaaccagtacccccagagctccctgggactaaaccaaaaaccaaagaaaacacatggtgggacttgtgtctctaactgcatatgtagcagaggatggcctagtcggcggtcatcaatgggaggagaggtgcttggtcctctgaaggttctacttcccagtataggggaatacctgggccaggaagcagaagagggtgggttggggagcagggggagggggaaggggatagggaattttcagagaggaaactaggaaaagggataacatttgcaatataaataagaaaatatctaattttaaaaagaaagagagagagagagagagagagagagagagagagagaaagagagagagaaaggaagaaagaaagaaagaaagaaagaaagaaagaaagaaagaaagaaagaaagaaagaaaggaggaaagaaaggaagaaagaaaggaaggaagaacagcctgaggggtagagggggcgtcaagtgtgccacccagaggtcaaaaaaagtaatgagacctggatcagatgccacttctgaggcctcaagataaaggcagtttgtcacctacctcaagagtctttgcttgtcactttcccgtttgactccttcaccctatgacctaagtcctcatgctaccttgcaaggccacaagcaaactggtgagccaaaacccaggcaatattaagaaaatgggcccttcagtttgtgacaggcaagctttacctgtgtgactcgttgcggttactctttgctttacactctgtcacctcaaagctcagtgagacaaagccacagcaagtgtttttctcatggcttcgctttggtgacttggctcacctgtctttgctcaaggcctaccttgaagtttctggaagccgctgtggtggggctccactggacggtctcctctctccaaagtgggagagtggaatctgttgtcccatgggacctcagcttggatggtcagcgggaacacctacctagggcttctttttgtggcctggactttgtcacagcatggtgcctggcgttctaaggcagcagtcccagggaagagaccagatattgttccacaaacatcatttttttcacctgttcattttgttagatgtggctccgttgagtttatattgactcagttcagttatatacagtgaggcgctagactataacaactatctgtggagacactttaaaactaccataaaggtttccctagtaagtattctgctggtttaaaaacacacaaacagtcagacagacagacagacagacagtcagacagacagaacctaaagattttgtggatggctctgcattttaggaaggaagatcagagagctggactaggagaggcagagtaacagagaaggactgctggactagataactagaagtctgaccatgcctctggtgccccagagaaaggtcgtgtaacattgggaaagacaaggtctccggtctcttaaagcttttactgttgtggttctgtggtttcggaagactagaacattccttgtgaccttccaagctctcatgccaccatcccacatactgaccccgccccctgtggcccaggccttggagagacagccctccactcatgaaggccagaggagctgggataggggtgcactgggtaaacaagaaaggctgggtaggtgggagattcacatgtggaatcctgtttggaagtgtcaggagagagagagagagagagagagagagagagagagagagagagagagaggaaatatgtgtgtgtgtatgctctgaatgaagttccagggcctgttgaaacccagcaaggtcatgtctaaggtattggcaagccaaaggatattgcattgtgtgtcatgctgaccactgttgtgtgtttggaaagagctctacttctatttagcatttatgccatcttcctcttcctcctggaaatcctctggcagcatctaggtttaacatcccaatggggtataatatacaatgaaaataggtgagtgatattatatggtgtatggctggtgcccactctctgcccaggaagagagtgcatcttccacaacagtggattcactttttaccatctcctgttcttcgaaggggaatgaggtaaggcaaggcatctggatcgttctttccttcagctactttacaaattctagttgtctccattttacagatggaaagacagaggtgaagggaaacaaattcctcctctgatgaaggcagaaggagcttttgctgttctgtgcaaacagagctggtaaccccaggtcacctgggtcacatctcaagtccttaagcatatgttgggcctctcaaggtttttggctcagggttggggacatcatgtagagaggaaaaggccaggagacccagggagaagttaggagtgaagaagactttgacatatcctcaggaatcaagataagcatgaagatgtttgggaggctctgttgtttgtgtgtgtgtctagggacctcttacccaaaccaaagtcatttctgcatatttttctgctgaatatgaaatactccaaagattactcttcttatttgttaaattcaaaatgactcagcagagaggaaaaacaagtcttgaatgacctccaatgtcctctgaatcaaatccgtgaatgagatttctcctcaccaaagtgtaatcatctgcacatgtacacacgagtgccacacagttatatctgtacacatgtgtcagcatcagcttgtcacacatccttcgatttcatttctagtcattccctggcttttcatccacaccctggacagagctgactggccaggacagcggcccttcatatgtggtccttgacataggcttcaccgaggccctcagaggaaatctatagacactgattcttcatcaaatccagcatcatgtcaggttgtcctcagctatcgggtctgggatgatggacagtctgggaaaagggtagcctgctaagtcggacatgctgtatacctgagaagttggttatacactggattttagtgcactgagtattatttcgaatgcacttagaggatttctgtttaagggtgccaggtcctggatccattagcaatgttggctactcattcaatgattcacaactttgataagtagacggaacacttttaaaacaccaaatgccattttaaacacactatgcgggatttgttattcaaaactaatcagcaactttttttttgttggttttttttttttttttttttttttaaagaactagcctgtgacggggataagaatgtaatggttttcacattaagtaagatcaggcatttcataaggagggatgtatatacctccagttctacttcagagaaaaagatgagttatactaacgttctatatgaagatacaaaggaccctaccatctctgggtttagctttctctaaggggcttgggaagaacagagctgttaaaacttcttactcactaggccagaagaccccaacagttgcctggacttcctactttttgcattatgacagactgaaaacaaggggttactttatttttttatttttcatttatttatttatttatttatttatttatttatttatttatttatttattttgtttttcgagacagggtttctctgttgagccctggctgtcctggaactcactttgtagaccaggctggcctcgaactcagaaatccgcctgcccctgcctccctagtgctgggattaaaggcatgcgccaccacgcccggcttcaaggggttactttatatatatgtatgcatatgtatacatatatgtacatatatatgtatacatatatgtacatatacatagtttctaaagaaatttctgattataattgtatgcatatctgtaccatctaaatcagtttatttctctacttgtcttctgcatgccatctatcttaatttattatctatcttctgtcattttcatccacttatcaatcatatatcatctagcctttctcatctacctttcatttataatctatcaaccatttgtctattttttttacccacccatcatttactaattattttcctatcatcaatcaacattgatccgatctatctatctatctatctatctatctatctatctatctatctatctatctatcatctatctaccatttatctatcattggttatttttctatgtatatatctattatctgtcaatcaacatttatcatatatctacctattatcttcctgtctgcctacctgcctgtctctctatcccccatgtattcatctgtccatctatccactcttccatttattatctatcacatgcatttaattctatagtgaagaatagattttccagtggggtttgtggattggtctgccaaagagtgtggtttcccactaacacagagagtccaaccttgctctgagattatgaagcatgcgcattagatgaggtagtgacattagctttctgctcacttagaagctcaatattaatgtcatctttgtctctcaaggttctttctctctcacctattcactactgtgaagcttgttcccagggaggtactctgatttaactaagacagttgtaagagacaggtaccgttataggggcgcatagcccttgagttcaagagccataggactgaccaagagtgaggcatcttgtgagaaccttctgtaaaataggcttgacctttctctatgaagtgactttactgcagttgagagaggcttttgtaagttcgtcggagttcagaggtaattagtaagaagttgaactttccatactcttgtttttgttccctgctgaagagttgctcatttttgggtgtggatgccacactcctggctgaccttccatttttcttcctgatttcctagcatgtctaaatcctggtgtagacctacctgaggtagaaagtcaataatcttctataagatctcatagagtttataggaagtcctgagctgtggcttcttctatgttcacctaggagtgtccattgaacacggggaaggggaggggattttgagttgaagaaggggggagaacggattctttactacctattctctttgagccacatgcccattgatgttccttgggaagtgttgagctgtgggcagagaagtaccagccttgacattagggtcactaaaatcgatgttaactgtctttcctcctaacttcatggtccagggaattaaaatcaaccttgttttgaggcagggaaaacaagatccctaatcttagatgagtcatagtctgacttggtagacagacagacagacagacagacagacagatgggttaagaagagaactatactcatagtagtggatgggaaaaagtagctggtacaggtgagactgtccagggtgttaatgaagcaactgtgctttctagatctgtagaaagaagatgacaatcccccctctacatgattgtgatgactgtgatatcatacatttgaaagatcctcaacattcaaaactagaaagacacaaggtgattctcaaccatttttgtgctcccacttgtaagatgttttaatcaatatggtctctgagtagtccaagtgtcttttggagatgcaggccatgttgccccaacacctcccattctggaacatgcaggattgcctggaaagcatcttgagattctgacagccttatgccaagaataatgttttcatttttttcagaaaagttattataagtgacattaaccaaaaacacattcccctcttaaagatcaaacaatgaactaggaagatggctcagtgtataatggacttgtaaagattggagtttgggtctccagaactcacataaaagccaggtaggcaggtaggtgtggtagcctgctgaagtctcagtgtgtacagggaattcctggagcgagctagctagccagactagctgcatcagagagctgctgttcaacaaaacagtctgctgctgcagttaataaagtgaagaatgacccaggaagacagtcaataccaacctctgttctctacacacaggtacacaagcatgtacgtacgtacagcacatacacacaggcacaaaaaaatagaattactatgaataaggcagtctccataattgcagtcattcacgagtcctcttgccaaaatctgcactctctctaagatcttctgctctgagggagtcattgttaccagatcatctgtgaatatataaatgtgtgtgctcatgaaaacatatagaatgctccaaaaagactttgcagccttcttgttcacctaaaaacatgtcacaagtggcaagctatgtgaccgcgcatagctgtaactcactgtttttattttaatgagttatttactttatgtgtatgaatggtttgtctgcatgtaccacatatgtgtagtgcccagagagaccagaagagagtgctcaatcctcctggaactggagctatagttggttgtgggttgatatgtgggggctaggaggcaaactgagtcttctgtaagaacagccaatactattatacgctgacccatctctccagcttctggaattcattctttttttgccatcaaaaagtatttctatagtaggaacagcatagtacttagcatcctcctgttgataaacatcttcccaagtttttgttacttagaaaatatactgcagagcacttgtgtgtacacatatgctgtatgtacctgcaacctgctctctaagatacgtaacatgtgggcagcatggtgcatttttagctgtggagcatgcatttcacaccattgtcaggtctcacgtcatcaagcttggatagcttgtgagaccaattcagcgactactctggtgttttgtttttggatttttctgagctagaatgctttcagatgcaatatactgtcccctttgttagatgttctttatttacttggcccatatttctagtggctttttacaacagaagttgtttcacttcacagtttcaaatatttaactttgttccttgcttatctgttaagtttataatatctttcttgttccttggatgttttgaatttttgtggggaaatgttattatcactatttttcttctatggagtttgctttttatgtctttttcatgcaagcctttctttagtttatagcaaattcttgtgttttcttgaggtcctttcattgttctgtctttacattttgggctctatatttttgtgtgaggtgtggatatgccttggcttttgtttttgaaaaggctgttgagccactggcactgtcattgatgttgttttgttattttaatgcttatttatcaaatgcttgtttattcgtgaatggcttctggctgcccagcctctccactgttctgcttatctgcctctgaaccgctggcatgcttagaggatttttactgtacggctttcctgggacagcgtatccacttctgcagtcttcaatcttgttttctttattgtttacagcttctcctcacatgccctaacatcttgtttattacgagattgaaaggggaagaaatgatttagagcatttggcctgtcagttgctgtctctttatctttgcatacttttatttttaatttcattttttggggggggggtatttttgtttttgcttttgagtcagggtcttttactgagcccactgatttagctagattccctggacagtgagattaaaggatccttttcttgtctttgtctccctagtactggaatttgtagctgtgtcagtatatcttagtgacatggattctcggagatcaaactcaggtcctcatgcttctgtagaatacattactgcctgagccactgacccagcccttctctgacatttaagatgtatatataccacgtgaatggcatttcccaaacaattgctgagtaaatgaatacaaggcaatactctgaccaggcacattttcattttgaattttattttattttaagactaggatgaagtgtttgttataggacttcatgttgttagtcacaaaaatgcacagaggaggactctctcaactgctcatcgtgtttccatgattgctctgggctctgtcatgtgccacatgggtaaatactgaatccttgagaccattgattcagagggttttgtctgctcattggaatccttgaggaaaattccttttagggcaaaacatttcagattagctagatatagtcactgagtatttgggtctatgatggtatttatcaagcctctctgttgagcgttttgaacacagtagcattgagaataaacatggagcttacagaaaggatactaaatagtcacggtgaccatacatagttgaaagcatgatccttactatatgaaaagctatgttttcagtgcattgagcaattgagtcagaacacttagctgcagaaataactattgaataaagggggcaggtaaggaggaaagagcttgccagaggtccataggcaaaagccaatagaagaaataaatgagaaacttcagtagaactgagctggagagtaggggcaatagaatagaatagaatagaatagaatagaatagaatagaatagaatagaatagaatagcagactaaagggatgatgacaatgtcagtgaccccaggcagactctggagtcatgcgaaccccaggcccatgtgcctgtttgcttctttgtgctgtaacatggggccacttgtttaaaatcagattagctatgtaaattatttggaattctttttcatggaaaatgagctattctccctcatttgtttattcagccattcatttacatcaacatggatttgtggatatttatttcatactctgagttataatctaatactcctctatttgttttgttgaccaaattgttccagctttcattactgggagaactttcagttgactcctatgtgcttttgatgtatttcatcgtgtgtgtgtgtgtgtgtgtgtgtgtgtatacacacttgcaagattgcatgtgtgtgcatacaacatatattctaggcttatcttgtgtatttcctgatccagtgctagactcaaccagtttttctaaagacctctggttcttttattggaagatgggattagaagccaagatctgggcacttggtttgcactgacaagatgctgttgtctctaggcctttcagctaactgagtgaaaggacagtgcatatgtagtatattcacttgtatacatacaaataactacactatagatagatagttacaatgtaactctgtatgcctctattaagctaaatctgggtatatattgatatgtccatactgtatctaatctgttgtcacatgatcacttggaggaaaccttaaaaaaagaaagaaagaaagaaagaaagaaagaaagggaaaggaaggaagaaagccaaaaccaaagactcaaatgtcacttcaaaactaatggatcaagataagtgttgatttatagagatttaaaaagattaaagttactgaatgtttttcttgggttaatgttggaattaatgttgataatatgaaaatattagctgccatcataaatatacattttactttgttactaccgtttggtattcgcgtcggtaatacattgctacctgtgtgtagttctgttgatttttacttccaggagtgagtgtttaatccaagagagttggaaaattcttgcacttaatgatccctgggtgggatttgaggctttaaatgtggaaataaactttacaagagtcccagattgtctgtgaagatcgtgttcccgtgtgctggtgaaatctgcattattcacttctcttccttctctctttccttgcattgtcggtgggctgcagactccagatccaactccgtcttctgaaatgatcccgattcccagaatgcccctggtgctgctcctgctcttgctcatcctgggttctgcaaaagctcaggttaatccaggtaacacagccactactcagctgggtgctgaggaccaggtgcctgcacacacctctgccagtggttatcttagaaagagctctgccaagaaaactccactgtcagttctccctgtgtggtgaaccgtggccacgatggtcagaaacaggaagttgtatcactccccctctccttatataatgtgttgggtattatacaagagattttacgtagaccagagccatttcaatggcattaaaaaagattaggaaaaggaatggctgtttcatgttgtgtattttggggaaaatgggaaattagagatgtagcagacagcttcatttggttggctcatccattggatgtcttgggtctggattttaattgagtgtcctgttatacttttgggatgctaattctgtgggatgccgggttcccaagatctcaggtaagcttttgttctcacaggatgtgactgttcaaaacagatgtgaggtgactcttttaagtcaatatttttggattgttttagttcatatatctttaaactttaacctaaagtatgtgattgtatcaactgtctgttacacaacatgttgcttaacgattgtcaatagctcagtggcttaaaaacatgaatgtttgttttgctcataagcttatagtttgatgttttatctgtcttggcacatttacccatctggtaatattggctcatctagggtttctttggccctgatgaagggcactttggctgttgctctgtggattcctctagcagactagcctggccatgttttcgtggaaattgcacaagagcctgagtagaagcagcgtatgcaaattcaatccagtgctcaaattatgtttgttaagactgtgtaggccaggatgagggctgtaactgaagaccttgtctggagggatgcgggctggtgcttggtagtgcttgtccactaaggagaccctatttcaattcctagcactgagcggggggacctcattggtcaaagtaggtcacatacatgtgctcagagtccatagaacaaaaagaatgtgtatgataaagagataggtacaggttgtctggtttttttcagtgaagaaataaatctgtgggctggagagatggcctagttgttaagagcacttgctgttctaccagaggctctggctttgattcccggaacctacatttagttcctatcatggtgggtgtctcagaactgcctctaattccggctccaagagatccagtgcactccttgactaaatggaactccatcatacccctcagatcttaccccagaaataatcactccccgaatgtattgtatatcccacacatgtagattttactaaaacaacacatagctggggatatagctcatttgacagagtacttgcctagtgtgcagagagtaccatagaggactgagagtggcgtgcatacctcttgccagtcgtggtggcacatgccagtaggataggtaaagattttaagtcattttaaaaattcttcctcaaatacaaatatatgaaagtacacatatcttagtgttcagtttgatggatttttacaagcccaagatatccattcagacctgtctaacttgaagcagagtctaactatgaatgtggactaacacaaattgtacacttacataaagcatgagggtttttttttccccattctccttggacacaccagaggagggcatctattacagatcctattacagatggttgctgggaattgaactcaggacctctgggagaacagccagtgctcttaaccactgaaccatctctccagcctgtgaggtttgtttgttgttttgttttgttttgttttgttttgttttgtttttgttttttaatgtgattttttttgattgtgctgcttctcaatgtgaactttgtagatgacaacattgtgtggcaatatcaaagattggacagccctggcagtgagctacccttcatatataagaaacagaggcatcatggagagctctcacctacctcgccctggtgacagcaattatgttgctctctagcaagaaagatgaggtttccctgcttgtattttatataagtggagacacaggatacatggacactgtgcctagcttctttaactgaacattttctgtatggcatttattccatggctacaagtactagctgactatccttgctgtggtataatattacttcgtgtagttcatttatatggtctagtacagatgggaatttggatagtttgggcctactgtgaagaaatcttccatattcttgtatagagtttgtggtaaggacatatactcacttttctggggtttatatacagaagtggaattccttggtaacttgtaacatatcatttagtgttcttcataatgccatagagttttccaaagtgtttttttttatccacttagcctcccacaatagtatgtagagttcaattttccaactagctgtaattacattatcaagggtacatccatcttgtctttgtactagcataatggtatatttgtgagagtgcttcctcccaccaagtctgtgtccatgggctattctttatgtccttagtaggaaacatgatcaaaactcctcaaataaaataaaataaaataaaataaaataaaagaattgttgtttgagtggattcagtgcctttctcattattataataagcttagtgaaggcacctcagatcttaactccaacagcttttagtatttctgctgtgtattcctcttatcctctaaagtttggtttgtctcctctgatggtctttctgctctaagctccaaagaggagggggaagggtgcacacagttgtcatggagactggtatacccaggcccacttaagcaattaaaccaagagaaccagtttctagttagaatagaaccagtttcttgtgttagaatacaagctgtagtttttgagtaggaaacgggctgccagaaggcgatttcactccctgtcttgctattaggcattttcgttggatctttctgccagcacaaagaaatggacatcttaattttgaaccatgttcctaggcatatgctaccaagtgaagggctgaccattctctttgccacctccttccatttaccagttaagctggagttgaggatgtagagcagacaacaatttttccattccagctcagttttaaatggctgtctaggaacttggggctcatggagctgtatggtttggccactacttagtgcagagtagatacataataaatgctagctgatttagaggagacgcttcaggggttcctactggtgtctcccaaaagactgaggcaactgaaagtactgattgttacagatgttgctcagggacaagcagttctgggcttttaggattgttcacacaggttagccaaactgtataccagagagacttgggttataagcaaatattatatgatcaactcttagaagaagttggtttaagaccattttagaaggtatcagaaatcctatcctaattagttataagccaaatttattgctttttgttttgttttaaatctttttaaaaatttatttattgattatgtatacagtgttctgcctgcatgtatgcctgcaagccagaagaggacattagatctcattataaatggctgtgaaccaccatgtggttgctgggaattgaactcaggactgttggaaaagcagccagtgctcttaacctctgggccatctctccagcccgccaaatttctctttaatgattgtttgaaagaaagaaagaaagaaagaaagaaagaaagaaagaaagaaagaaagaaaggaaggaaggaaggaaggaaggaaggaaggaaggaaggaaggaaggaaggaaggaaacggaactcagcaattcaaaattttaaggccatccatctacaatgagacagatatttttctataagagtagaaaagttggtaatccagtagaaacactgcagttcataatatgcttgttaataattgtctcatggcttcaggcaccatctttggcactgtggagtctggcagcctgtgcagtgcaaagtgcatgtgtcctgcactaaccatcaaggtcccagtgatgctgtgcactgcaacatgggtgagcacagccagaaacaccccgctgctacacatcccagtctgagctgatctttgtcgttgaactttcaaaaaaatgtttgcaattcctgtgttctgtaacccccacccccacctcaagtatgagattgtgacccacagtttaagacatcaggctgtaacccatctgagttttggcaaaggagttggtaagtccagtgacgatactgacatttgcatagatggcggtgttctaagtagctagagaggctgtggagcaggccctgggagtctccatgaaaaataccgagatgctgcttgttccagttctgcagtatggctagtgtgctagcaaccgtttagttccaccagtgcactagagtccaaacctaacaattgccaatctgctggaggaagtaatggaaaggctgagggtagcattgtaaagcagaggtcatgattcagaagttagaatgaatggcaacctgcacccagcaaacaactaaactgccagtctctccaaggcatctttacaagccagcaagtcaatttaggtgggattagaaaattctaacgaacaatgtgaagttcacttagaaaaagtcttagctttagtgtttatttattctttcatttattatttatttaattagcttataactacaagttgattaagtttgaggttcattttgaagccaaaacaatagcataaggctaagagaggtacagagaattcacacttggaaacttagtctctttgtcgaactaaatgaggaagtcctaaggcagaagacctttggggctagttcaccttggcaaagaaactgaagtactgggtatgttctgggtcccttctgtaacaagttgccttcttacttccatcaagactgatgtatttctatttccaaattggaaaattattatttacctgggttctcactattcaaatttcaagagaaatgctgagagtataatactctctctctctctctctctctctctctctctctctctctttttctcctttcctccccctctctctattgctctcttgctctctttctctggtgattggaacagatccctgggagggaatgatataaaaaagcaagacagatacgttcctggatgaatttctctcaaatgagctatctagatgggctctttctttcttgcatgtttgtttgtcaagtatagccctggctggcctctggtaccctttcttccagtaaaagaatcttcctttggggacaacagaaactcaactgtccctgaactcttctgattacaccaagtaaggaaaaagaaactgttcgttgaagagctcattgaaagcatcaagtgatattcaaagatcatgctacatgttcctggtactgtattaagtcgtactaataatgtaatcttcagaatgtaataggagtatgtagtattattattttagttttacaggggaggagtggggccccacaaatgtttggtgaaaattaaatgttatagaggaatcagagtagcctagatgggatcctgtctagtactatgaggatgatagaccttgacctctgagctccactgcctcctgaaggtagtgagacaactaaataccaatgtataggagtctgtgagtcatgggccagttgtgtgggcatagatactagggcctaagaagctactgcagttgaatctcaaaatttgatttgtggaggcaaaagtgcattttgtaaaagaaaacttctctgttactagatatttgaaggactctgtggccagttctcagaaagttcaagaaagactggtttaatctagtcttttacaaatgaggaaactgagtgttgtggctgtatcatttctttggttatagtgaaatgctccgaacaaaaggaacacaggagaggaagtttggtttgtagttgtaggttatagtccatccctgaaggaaaatcaacacaggaactcaagtaacacccacagccaagagcagagagaaataaatgtatattgctgcttgcttttgctcagctatcttttttcactattatatagttcagaaccccctgcctggggaatggtgccacccacagtgggctaggtcaattaacaaacaagacaagcccttgcagatatggcaaaagaccagcctgacttagacaattcttttatgaggctatcttcccaggtgattctagattatggcacactggcacttaaaattaattgggacacaggttcacagagacaaaatgatgggaggaaacacccattaaaaaacatactgctaaatctacctttgtacataggctgtgtcctgattgtatgaatgagcatggcagggttttcagcctttgtttgaacacactcagtcttctcatctatcattgctaaccacctacggactattgcaaagaacaagattatgcatgtaaaggacctggcataaacacccaacacatgaaaaaatgcttaagagataccaggtcttctggccttaatgtatttattgtattatgatgattgcatacttcattaacaatttaattattctacactgtctcatgtatttgaaattgtgtagaatatactttgtgtgtgtgtgtgtaggagttcatggatcttacatcttaggatgaaggagctccaagtgtaatttcttgacaaacagtattttatcccaagtatctggtagattcttgtccatgctctgaagttttgcttgtattttgttatttttttatttatttatttttccttttccattttttattaggtatttagctcatttacatttccaatgctataccaaaaagtcttccccatacccacccacccccactcccctacccacccactccccctttttggccctggcgttaccctgtactggggcatataaagtttgcgtgtccaatgggcctctctttccagtgatggccgactaggccatcttttgatacatatgcaggtagagtcaagagctccggggtactggttagttcataatgttgttccacctatagggttgcagatccctttagctccttggatactttctctagctcctccattgggagccctgtgatccatccattagctgactgtgagcatgaacttctgtgtttgctaggccccggcatagtctcacaagagacagctacatctgggtcctggtaagaaggacacatgctccactatgttcatagcagccttatttataatagccagaagctggaaagaacccagatgcccctcaacagaggaatggatacagaaaatgtggtacatctacacaatggagtactactcagctattaaaaagaatgaatttatgaaattcctagccaaatggatggacctggagggcatcatcctgagtgaggtaacacattcacaaaggaactcacacaatatgtactcactgataagtggatattagcccaaaacctaggatacccaagatataagatacaatttcctaaacacatgaaactcaagaaaaatgaagactgaagtgtggatactatgcccctccttagatgtgggaacaaaacacccttggaaggagttacagagacaaagtttggagctgagatgaaaggatggatcatgtagagactgccatatccagggacccacccccataatcagcatccaaacgctgacaccattgcatacactagcaagattttatcgaaaggacccagatgtagctgtctcttgtattttgttattttacactcttgagactaaagtctcaagctttcaagaatcagacagttgttggagtacaggagaggatagaacttttcttccagtggtcatggagtcagaatgcttggagacttaggctccaagccacagtgccaggagcatgatcatgtaattgccatcagaataccacttcaggttcctttcctgggcctcctttctttgccaccaactgcgaactcaggttcactttgttgagaggccaagagaccacagaaggatcctcaatcctgccaggaacatacaaggtgtcagtgtctccagtcactgagggccttactaaattgcttagactagctccaagaatgctacatagcccaggctgactttatacttgggatgtacctacctcagttaggattatatgtgtatactgtcatgcccggtttatttatttgtatatttacaattatgttcacacggtgactgagttgtcaaatctccagtgtcttgctggctgaaatgctaagatatgtccgtgagctacaggtcaggtgacaagaggaaggtgatgcatttgagtgcaaggaaaggtatggaggcacacatgaagaacaaaataggaagataggaatagttgccaataagacgtcacaaaggcaaagatgtatacaggtggtacaataagcaggcgaaacataattttgaaattgttagtgtatgccaaatatttaatgaccacagctcttatctgcatctaggactaagatccacgatggacccctgactgcaggaggcaggtttcttgtgctactacatttcaatgtctctgagaccggggtattgttaagttttaatcagtaatagccctccttaagctttctttccagattgttcttcttcttggacatcttcctggccttcgagatcattcttaggacagtgtgtcaactatttgctattagcaatgggtggagagagaggtgaatagatggtgactgtggaggtcaaatgtcaagattccattctacatctgacataggtcaatgttatgaccttaaatactaaagtaaatcttggtaccacactttaatcaccagctctttgttggtataatgaaatgcctgaggcagggtgatgttatgaaaaacacatgtctgaactcacagtttcaagagcaaggggaaggacatggcagaagtgtgttcaaaaaaaagagatgaacagagccaatttcagtcttcaataacaaccaatcatggggtcctgagagagtgactttgctttctggaggtgggaccctcacctaaggacttcccaggagtcctcaccttttaacattcctccagtttccagattgccacattggggacaaagtggacaatgtggacctctgaggaacaaacaaaactcaaacaattgctcaattataaaccttactcagttataaggtggagaatgtaactttactatttccattcacaagatcacctgggggtgaaggtggggaactctgggagacagagaatgtattaagtcaaggacttgggaaagttacatgcaaatactaaactgccatttgtgactttggaaaaagaagggaatcaaaataatctagacaccccacatacaaagtttgtatcaagtagataacaaggtaggaaatggaaatacaagtgaccctgattttgcctgtagtctccaagaaagacttgagttgttagtgggaaatgagacctctgccagccctgggctgtagtcatcctgaccccaaagtgacagagcaaatgtggtgtatgtgttctagggtagagtgattgttgatttagcttttgcttttagaagtctctgaagagccaaataagcctttcagagtttttggtggtttggacacatacatagttaaaataaaacaaagttacagtcgttaaatctttgaggtttgagtgtgtgttttatgggcttatgtgggtggtgataaattgttaaataacatgcaacgtttccttctgattgggagatgtttctggctttggcctttatctgtttttctgtggtgatgatctcccacgcactcatgtccatgacgagtgcccgttgccatgcttggcttatgaaggcaatcagtaaatacttgagtaacaagggcagcgagggtagaaatgaaagtcaaggaacgtttaggcccatctgcgtttttctccaaaggggaaaagtgtaaattgtatcatgcgaaccttcatttcgagaagctgttggggaagctgaagggggtgggggcgtgggaatgggattcctccaacagtgagatgctaagtgtagagaaagcaaatcagaaggaggcagggggttgagggtgagctgaggtctcccagctgtagctaattcccagtctcctcagctctatgtggagacacccccttcccaggtggaggggtggaacaaccctggccacacaggagtgagatacccaggttccccctcctatggtatacaggatgagaatttggagtgttacaggtaacagagggcgtggttgcatttggtgtacttctcttactcttggcatttgttatggctgagttcagactgcccctttcaaatgttacaaccacagtaaagatcaaaggcgatcgaggcctccctgtgtcttatcactaacacatccctggtgtggaataagccccatctgttgagatggggcaaatggaatttacaaaagtatgcttttttttttgatgaatgttatcttgtactttttaattttcatactttttgttctttttttttattacgtattcttctcaatgacatttccaatgctatcccaaaagtccccccaaaccctcccccccacttccctacgcactctcatttttttggccctggcgttcccctgtactggggcatataaagtttgtgtgtccaatgggcctctctttccagtgatggccgaccaggccatcttttgatacatatgtagctagagtcaagagctccggggtactggttagttcataatgttgttgcccctacagggttgcagatctctttagctccttggatactttctctagctcctccattgggggccctgtgatccatccaatagctgactgtgagcatccacttatgtgtttgctaggcccctgcctagtctcacaagagacagctatatctgggtcctttcagcaaaatcttgctagtgtatgcagtggtgtcagcgtttggaagctgattatggggtggatccctagataaggcagtctctagatggtccatcctttttcgcagctccaaactttgtctctgtaactccttccatgggtgttttgttcccaattctaagaaggggcacagtgtccacactttggtcttcattcttcctatctccttgtactaaggtcaaatctaagtggatcaaggaacttcacataaaaccagagacactgaaacttatagaggagaaagtggggaaaagcctcgaagatatgggcataggggaaaaattcctgaatagaacagcaatggcttgtgctgtaagatcgagaatcgacaaatgggacctcatgaaactgcaaagcttctgcaaggcaaaagatactgtcaataagacaaaaaggccaccaacagattgggaaaggatctttacctatcctaaatcagataggggactaatatccaatatatataaagaactgaagagggtggactcaagaaaatcaaatagccccattaaaaaatggggctcagaactgaacaaagaattctcacccgaggaataccgaatggcagagaagcacctgaaaaaaatgttcaacatccttaattatcagggaaatgcaaatcaaaacaaccctgagattccacctcacaccagtcagaatggctaagatcaaaaattcaggtgacagcagatgctggcgaggatgtggagaaagaggaacactcctccactgttggtgggattgcaagcttgtacaaccactctggaaatcagtctggcggttccttagaaaattggacatagtactaccggaggatccagcaatacctcttctgggcatatatccagaagatgtcccaaccggtatgaaggacacatgctccactatgttcatagcagccttatttataatagccagaagctggaaagaacccagatgcccctcaacagaggaatggatacagaaaatgtggtacatttacacaatggagtactactcagctattaaaaggaatgaatttatgaaatttctaggcaaatggatggacctggagggcatcatcctgagtgaggtaacccaatcacaaaggaactcacacaatatgtactcactgataagtggatactagcccaaaacttagtatacccaagatataagatacaatttgccaaatgcatgaaactctaaaagtatgcttttaatttgtgacgttttagtaaatttgatcgacatttaagattgataatagagtttgtgttaggacctttctcaaagtgatagattagttctccctcccgccaattaagttaatgacagccccacaattctatctttggctactggtgtgtttctttccctttgtctttctgggttttttgtttgtttggttggttggtttgtttgatcttgacttgtaggaccccaagaaggagcccccccactcaagtctcgggatgcagggttacccaaagaaacacgagagaccttcttgttgcaaaagcacgtggcagctttaatggcggagctctgggtcgatacgtatctcacgcaggagacagaggaatcgaccctgagactcaaaaactcggggtttttatagggtagggtttaggggctaggaagaattggcacatctggttaatgttcagctttcaactatgctctctatagaaaggggggtgagcaggaggcgctgggctaccagatggtcaatgagtcagccaagatagtcagaaccagttcctgcattcctccccttatccttacgaccgggtgacctagcttcaagacggactcgggcatgcccgggctttttttctttgtagtctcagtcccaggcctttttagtttaaaccttttattttgtttaattttctttcattcccctcttcttctgtttagactaattctaatcatagaattttagagattggtgtcccctaactacctgaactacaggttgatattgtctctgaagaaccatgagttttactgcatcgattctactctggatgaaagccatccctttatttattatacaagggccgaaaactaaagctaagcatatcataaggactggttcagctacagtggaaatcaaagaagtcatccaagatggttgtgactcaaaccacgactcaaatcacccccgttgagcatcccattcccattaccttcgctctaatctttctctcagtttctgcatagaatctctaactatccctgtatgatctgcatagaagcagcactcttctttaagggcagcacacagtcctccttcctttaggaacaacaaatcaagacctctactgttctgcaaaactacctcagacagggaggtcaaagatttttctaaagcgtcaatggacttctctattgccgctaggtcttcattgacagcatccctcaaagactgaattccctgtctcccttctatcaaagctgacactcctgtccccactcctactgccatacctattcccatgaatgtagccagggttaaagtaattggttctctttttgactgctggccagcatagctttcttctaaactggatgcagggtgataatatacgcggggtaacagctggatcatgacacaaaaatcatgagatgaattaaaaaccttagttgatacacagggagtaagtcctatattgcaagcccaccagccaacctgggaaggtacaagatagtaattagcttccgtcctggacacggactgaatttgtctgcataggtgtttgtgggtggaaggtggggtgcctatacagagacctgtactcctcgcggatacttcagtcagggtcagtttttgtcctattccccaagagcaggacgtatggctgctggttctgttgaaatctccattgaaggcaattccttcatagtaaggaggacctgaggacaggcatagccagcagtcctcagtagcacttggatcagttctattaagggcataaaaggttcctctcactaggttaaacatcctctgtcttgttgaagggattgtggaggtaatagttagaggtacttgaagagtgggaggttgggtgagagtgaccatattaagggggtccgcaatcaccggagtaggctgagtaatggtatgggtaaggggtgtggacttggttggagggcctaaaggattgtagagggtctctatttttaatctgatagtgaacaataatccctcatcatatctttccttgtaaatcctaagaccccaggtatacccttttgtccatcccagagctcttttccctggttcagtgaaggtgacaaggagtggatggcaccagtcagtacactcatctaggtcaaatcctccaggtacttaagacgctagggaatagttggctgttactctaatatagtcccagcttgaggagggcttccagcgggctgtacctgaagtctcgcaaccccagctcttgcaaaagaagtcagtcttacttccacatgttggattgagggactgacttcggtggggcccggggcagacatagaagtgatgggtttgaagcatgcttctatccctttggttagagcaaccaccccatgggtctctcaaatgtttttctacatatggagggggtgttaaaggtgccctctgaatgtcagagtacccctccaagtcccatccaggaggggctactatagccaacttacagatgtcagggaaaagatcaggccaccaagtccatacggggtgtaccttggcaattgtccatacagccctacccccctcattgagtacctccaacatttgttgaacaggactgagggggttgaagtcctttgggattgctcctacaaagcaggcgcaacttaagagggttagtagtcttctccaaaatccactcatcatggctgactccaggggttgctctcttgacgtgggatgcgtggacccaagtggggattccttccactttgaccacagtgggcgttgtcagtagcaccaagtagggtcccttccacctcggctctaggttccctgctcggtgtctcctcaccaggactgcgtctcctacttcaaactggtgcggcacctgtgtgtcaccagcaacataggtttcttttagctgttccaagacttcttttcttattattttgagagcttttaatcgagccaaaagactagaggaaggagagaaagacacatccgggcgattcttataccctatggtcataaaaatgggcgggggcaccccatacattaattcaaaaggggttaagccaaggggtccagggatattttgaaccctgaacaaggcataagggagaacggctgtccaatcacttccgctggtctccagggctattttagttagagtctcttttagcgtcctattcatcctttctacctgtccttccttctgccagccttaaggcttgaattagtgtgataagttccgctttttggtcttatataccctcctgcaagctgctggcccatatgacagactttccatccactactgctgcctcagccctccgcttaccttctaccacgaagctgctaccattggtgaaccaggtcatcgcccctggccatggttggtctgtgaggtctggccagattccagtttcttctgccagtatttcctcacacttatgtgcagaggcctcgtcagcctcaggtagtaaagtagcagggttgagaatggctgggggtgcaaaacttactcgctctgccagtaataggctctggtagtgcatcattctggtgccgatcacccagcggtccagtggttgcctgacgatgctctcaagagagtgcagggccactatggtaacattctggcccatagtcagtttgtcagcatctcttactagcacagccgtggctgctatcgctcgcaggcaggagggccatccgctggccacagagtccagcttcttttataagtaggctaccaggtgcttccatggccccaaaacctgggtaaggacgccccttgccactccatttctttcatcaatgtataggataaaaggcttgctcacatctggcagggccaatgctggaacctgcagtagcgcctgtttgagagtttgaaaggctagctgatgttctctggttcaggtgtactctcctttttctttggttaatgggtacaatggggctgccagagtggcaaatccgggaatccagagtctacaaaacccggcagtccccaggaactctcttacctggcgagcagtggttggggccgggatctgcataacagcttgttttctggcttctgtgagccaccgttgtccatctctcagaacatatcctaagtaggtcacttctttccggcataactgagcctttttagcagagacccaataccccagcttacctagctcgaccaggaggatttgagtcccagtttcacagtccttgcgtgtttctacagctagtaggaggtcatctacatactgcagaagagtcacatgtgggttactggctaggaaaggggcaaggtcttggtgtagggcttcatcaaacaaggtggacgagttcttgaatccctgaggcagcctcgtccatgtgagctgtccggctgtccactctcagaatcttgccatttgaaagcaaacaaaggctggctgtttgggtgtaacctcaaacagaagaaagcgtctttcagatcaaggactgtgtaccatgtccgagcaggtggcaaggtgctgaggaggttataaggatttggcaccatagggtgtatgtcttgaaccctcttgttgacttctctaaggtcctggactggacggtagtcacaggtccctggtgtttttactggaagtagaggagtgttccaaggggatttgcatggaccaaaatcccttgttggagcagcttgttgatttgggggcatataccctcttgagcttctttgctcatgggatattgtcggacccctataggggtggccccggacttaagttcaatcaccacagggggaacctgtttagccatcccattcctcctgtctctgcccacgcctgagggtatcgattcaaacagtcctgtaatccctcagggggcttcactttattttggtagagtcgatattcttctcctagttgtaaagttagctctagagtctggggcgctttcattccccaggacatctctggtaattgagaggtaaaggttatttgtgcttttaacttggttagtaagtctctccccaataagggcataggacactctggaatgactagaaacgaatgagttactcgatttcaccctatgtctactatttgggatgtggtccatggatatgacttttgtcctgtggccctgatcaccaaggttttttcgtttttcttcacttttcctagtggcgtcttgagtactgaaaattctgccccagtgtcgactagaaagtccacaggagtctcctccacttctaaggttaccttaggctcggggaggggggccgagccccattccccctagtcctcatcttctccaagagaaagcaccttcacctcttgcttcttttttggacagtcgctcatccagtggcccatttccttgcaatatgcgcattggttcctctccaggcgctgtctgccttctctgggtctccttggtccctgctatctcctgtctcccaggttccctaactgtctacctcttctccctttatctctttcttttacttcggccagtatcctagtcaaaaccttttcctgtctcctgtctctcctatcctcatcctcttttctctttctaacttttcatcttctgtttctctcttatgatacactttctctgcctctctaactacatcccttatggtataatcttgcaagccctcaattagctgtaacttctttctaatgtcgggagccgactggccaatgaaggccataatcactgaggccctttgaccctcagacgtggggtcaaatggggtatatcttctgtaagcctccatgagccttttgaggaagactgaggggggatcagtcgctccctgcataacctctcttaccttggccagattcgtgggccaccaagcagcacctctgagaccggccactagggcccagcgataattggacagtcgttccctaccttgtgccgtattataatcccatcagggccgggttagtgggaatccttcatctatctcagctggagtttggacaggctgcccagcctcatctcggacaggtgtttttccgagcctcgaggaaaatcctttctctctcctcggtggtgaataaagtctgcagaagctgctggtagtcatcccaggccggctggtgtgaatacattagtgattcgaccaaccctgtgtgtcctgcagggttctctgaaaaaggagggtgattagctttccaattatagaggtcggaggaggaaaaaggccaatactgtaagggctgcagactatcaggatcggcagggagagccccaataaccctgagggggagtgccacggttgaatcagcaggcccctcagggggcaactcctcgccggctccttgttcctgtggaggcaccccctcctccggccggggcctgaggcagaggtcccaagggagctgaaggttggggctggggagcatatggtggggattgaggggtgtcgggacactcagggggttcttcaatctctggatagatcttggggggttttgtcacttgtgtgctatgttcatcatctcccccgagcggtggtttcagtttctctttctcagcattttcccagatggctaggatcttggtgccagggcagagaggtgggaagaatgggcgaacccacaggggttagtagcgtgccaagtcctcccataccgtgatgtatggttgctggtctgtatgcgaccctggcccttcctgaaaaacaatggccttcacagcccttatggtgggtaagtcaaaagttccttccagtggccaacccactccaaaaacagaaacagaaagtcatccatggctttttcttcactattactgacaaatttcgtcctctagccctaatgtttgtccaatggtccttagtcaaaggagtagacacggtctgtcccatagttaagaataagaataaaaacaacacaatgacagagatggaagacactaagacatctaaacacactcgtctgcgtctggacttatacaaccagccaaacgctacctctgatggagtgggattccgtgtccactccttcgctggcaggaagagcactctctctccttcactctgccaggcaacagccaggtcctcctgactgttccgtaccctgggcacaacctccagggtctccctttgaatgtcttccaggggtgcagcctgcgggccttagggcatctccctccgcagccgtgggtccttacggtcctcaacggcagctgccaaaatatcagactccgaaaaacaaaggcacagactcagtggctgcacaaacacaccacacacatacaaaacgtacctccaaggggtatttcgagtccttggggacccctcaaatcccggacgagcccccaaatgtaggaccccccaagaaggagccccccactcaagtcttgggactcggggttacccaaagaaacatgagagaccttcttgttgcaaaagcatgtggcagctttaatggtggagctctgggtcgatacatatctcacgcaggagacagaggaatcaaccctgagactcaaaaactcgaggtttttatagggtagggtttaggggctaggaagaattggcgcggttacatacgattggcccattcaaacatcagcaacatgattatgagtcagcagagtagtacgtgcaggccggggcgtataaggattctgaagctgggggcttatctgagtcgacattgtatctggttaatgtttcagcttttaactatgctctctataaaaaggggggtgagcaggaggcgctgggctaccagatggtcaatgagtcagccaagatagtcagaaccagttcctgcattccttcccttatccttacgaccaggtgacctagcttcaagacggactcgggcatgcccgggctttttttctttgcagtctcagtcccaggcatttttagtttaaaccttttattttgtttaatttcctttcagactcaagatcaaactatatagctaagactatcttggaatttgctgtgtaactcaggctggcctcatattatgaatcatcatcatgtcttggcctccaaagtgcttagagtgtaggtatatgccaccaaataagtctgtctgtctgtatatatgtatgccactcccccacctcttttgactctctcctccctgcatttctttctttttgactgttttgctacaggctctcctattgcctggactgggattgaactttccctggagctatggctgcccttgagctccggctcttccttcccctatcttcaccctcccctggggttatggatgtataccgaggtgcctgcctctgttttgtttcttgattaaataaaagaaatgcttaacttctgccccaagacagtagctttttggtagttagtaatgcttgaacacagaaaacacagttccttagactttacatcttaacaggttacagtacccaaaagagtggactggaacctttcccttggcaagccaagagtaaggatttaaacacaagagtaaaggatttgggtacatttctgccccttattcattatgactagttattgagaaacctgtggtgtagtagtagtagaactggtatggcctgcttccttgtagagctgggctggctagctcttgaagcatgctcttgtatctttggcttctgtaagaggctgtgaactcaaatccagattggctattggcggagcagttggatcttctggtatttggcagagcgacacatattctgtctgcacagttggtagggtataagctggaattcttggacactgagagtatctccagaccccctgtgagttttctccctggcaagtcttgagtcctttggcttccacactcctgcttgacttggcccagcatcgggcacatggctgagtggaagaactttgtacacagctcccttcagatccttatcagattgctagtttccctcatagaaacccctgcaggtgccacaaccagcatcacccacttgtccctgtcccagtctggcggagactgaaagggactgcaagaattctttctcctgagactgctctcttctctaaggtcttagttgttccactctctctgcctcatcaataaagcacttttgagtagagcatttaccaagtgtatccagcctttccgggtgcttttggaggaggggtagcattgattatcacaagttattctacctcacctggggacaggtatcaaaagttagcatctccttcggttgttactatgattcctcttcccccccccttggtttttttccatacagggtttctctgtgtagccatggctgtcctagaacgcactctgtagaccaggctggcctcgaactcagaaatccacctgcctctgcctcccaaatgctgggattaaaggcgtgcaccaccacgcctgacctcttttttttttttttttaaattaatttattttatgtgagttcactgtcactctcttcatacacaccagaagagggcatcagaccccatgacagacggttgagagccaccatggggttgctagaaattgaactcagtacttttaaaagaggagccagtgctcttaacctctgagccatctctctagccctctatgattccccttaaattctaatattccacttaacatatactttattatgatgatgatgatgatgtgttcgtgtacacataattgtgtgtgaatgtgtgtgtgtgtgtgtgtgtgtgtgtgtgtgtgtgtggtgcatgtgctatgacacaccacgtagaggtcagagaactttgtgaatttgactgtctccgtccactttccaggtgagttctggggcttgaactctgggtcaccaggcttgcacagcaagtgctttaccccctgagcccatcgcactgggctatttcactttttgaattgacttctaaagcagaaccagagtgaaaagctctcaccagtgaagggggtaatgcagagtgttgctggggttggactcagcgttagaatgccttccttgcatgcacgtgaggccttgatctaacactgcaagagaaaacacagctttggatactaactccacctgattattatcccagttctctttcccctcctcttattttcttacttatttgtttttactctatgcaactccctggaggtcagttgcaatcctttattaagaggattcataataaaaataaccagagaagaattaaaagcacctaaatattactaaacttcattgctctaagtttggaagaatgctaactgactgttttttttttaacacatctccataagaagtaccattattatgattaagcagagagcacaagattaaacggtcataaaatttccatgttacttaagaaaggatgcatgtggtattcagaacacactaattccctttctccttctgggtatcatctattgagcactattatatcacatagaacgtgctgtggtttgtattttaacaatttctgaaacaaccctgcttattattaaggatgaggattattaaggattgttaaggaaacgttgcttatttttatattgctgggactgatacccaataaaagcaacttgaagggggaaagaattgatttttggctcatggttttaaaggcacagtttataacagcgaggaaggcatggcagagttgctggtgaggggaacgtatggaagaggctccttgtattgtggtggatcaagaagcaaaaagctctggctggaactagaagttgattctgctttcaaggttgaacagcccatgtctgctaactggaccacaaagttctacaacttaccagaacagcgccactagcctgggaacaagtgttcagatataagagcccatgacggacacatcacagtcaaaacatagcagaggatatggaatctaaagttcccaaagggatgggatgtagtagccagccttgtacttccatattagaaggacagaatcaagtttgaaacatagaatttttttttatttattcttcttccatatattacctcctgactgcagttttccctccctccactcctctttgtgtccccaactcctcccttccccagatctcctcctcctccatttcccttcagggaagagcaggcctcccagagatatcaaccaaacatggcaataccaagatgcaataggactaagtcaaaccgtcatgccaaggctggatgaggcagcccaatgggagggaaagagttcaaaagcagggaaaagagtcagagacagacccttttcccactggtgggagtcccgcaagaacatcaaactacacagccataacatgatatgcagaggacttagacccatacaggacctgtgattgttggttcagtcttcgtgagcccctatgatctctggttagttggttctgtgggctgagttctcattgtgtcctggagccctctggttcctacaatgcttcttccccttcttctgtggggtttcataagctctgcctcatgaaatatagaattgttacatgctgaaccacaagctgtatctcctataacttcacagcccgtgttatttctaacccagttgttttttgtttgcttgtttgtttgtttgggtttacctctttgttgggacaaaaagcttgctgttttcccatctactggttcatgtatgtaaccaggaagagcatgccatccaatctgtaactccgtaccctaaagcccatgcattcagattttctttcctgtctttaatatttgtttctggaaactatctattcctaagaggatatcgaatgagggaaagcagtctttgtgaaatagacccatgtgtaacaaacccagagcctgaagaaaatgactgacctaataatagtcttgcttgtgcactgcagtgtgtggggagcaaggcccaggtgacaccgttgactgggcttcttctttctagaactggaagaagtaggttgaggtggcctgagaaggaccagggctgagaacactggatttccgtcatggttacgttggtcgtctgtgagtttctgaacgagtcagttcacctttctgaggattacaggttctgatatcgagtatggaactctagggttcagtgagttaaaatttcttccctggatctaaaattttgtagtcatagatatatctttagatcattagactggcttatgataatctgaccctgataatctccctctatcaaacgtgtacctggggcgagccaggggtcatacttctgtgcttagacctttcatgtgccctgtgttttcctggaagccgcatatagcatactcagtgacaggcaggccatgggctggagctggctgtcgggggtaaacatcttggaacaagcaatgctttcagccttacagccttggctcgagagtatgagaagtaagccttgggaagctgggacctggtggcagctgtttctcctcggtctgcttgccaaccctactggagcttgggatggacagagttctcagctgggcctactgtggctgatgctggtagttttccactctgggaaactggaagagtccgttggcatctctgtcaggagattggtgggtagcggaagcatccggaaaccaccaagacaactcagcaagcatttttttttttcctgcagtgacttttgcttcctgtgacaggctgctctctgtacatatttctttatatctcaggatatggactgaataggggagtgtaatccagggaacgggcgcgggggattggaagaaaggagtcctgatgtctaggatttgagccaatgttgcagttctgtatcttcccaaatagctgagatcccttccaccagttacccaaaataggcacattcaataggaaaaccacaccggggctgcagagaagcgccacgttgggttccctgggccaaggcttcttctggttccaacgacccagcgggatgggtaaggctatccaagatcagctcgcactcttcctctgcccttcccgtgaggcccctgggaacactgaatcatggagaaactctgcttacttattttatgttacattgctgctttatcaactcttgtctctgacctccctgtcttcaaccttgtagtcctcggacctggtttctagatcaccagcccaactcccattgttgtaggatgactgaaaagttggtcattctttatctggggttttgcatcccttggtttctttgtgtagtcaatcacagtctgaaaatattagatggacaaagtcaggactaatttataaatcttaaatgtagtgattgggactgaaagaactaaatcttgagccccccccccctctgtcacacccagtgcttgtcattcactgcactttatctctgtatataagcaccgtttcgccttctggaggcaagtgggtgtggttcaataagatgggagagaggctggggagatggctcagagattagaagaccttgctttgcatcatgaagatctgcattcagatcccagcacccacagcaagctgagcatcccacagctgcctgtaactccagcccagaggcattaaacactcctttcaggcctcagtgcatgcaagttcacacatctgcatacatatgtgtgtacacagacacgcacacataaacaaaataaacagttaataaatatgtgagagctacattcacataacttttacttgggatatcataattgttccattttattattaagcattgtttatctctcactatgattagtttctaagttaaactttattatcggtatgcatatgcagggaaagacaaaagagcttgtagagggctttgcactatcagctgtttcagccaaccatcagaaaatatccccttctagtgaatggaaatctacagtgacccttgtggctcagcacctactctgacattgaactgtgagtttacatcatggaacagaacaagattcttgtcatcccttaggtcgctagtcactggaggctcttctaaccaaacacccaaaactcttcctcagtcgatctttgtgactagttatccggcagtgctaaggtctatgctgtggcttctctttgtctcctacacataatgtacacccactgttgaactaagtcactgcctgatgagagacagttgggcaagctgctgcctcacaaatacttgctgaaccccacagatgacaactcacttggggggttctgacctagaaagcctctactgcacttgcccttcaagatctaacatgtgaagtgaattgtttccattcttctgtctggacatttccatctatctacctagctctccaccttttcctacttagctgtttgtccagtgtatgttgaacacctaatcagagttgtgagtcagcaaggctgaaagcggccaggaatccaatatgatgactatgctctggaaggtcaagagatacaagtgtgctagaaaattcacagtgaaaattatttcttagaagaacctgtcacttgcatcctgacaccatattttagtatttttgatactttgtcagactctctgagaccatgatagcaactgtcaaataggaaagcaactgtatctttttgatgtctgaatacctgttgtctaccatttgtctcttggaccataatggaggtctaggagagaaatcattttatgacttattcactactgactgattgtataaatgcaagaacactcactaatgggcacatttgttaatgctatacgtgaatggatagattgcaataaagtaagcaattctcggatttatggggaatccttttctatttgttatctgcgtgactcaaggtttcccttggatgaattcccaagactacatctttaagtctctgggaagaactcagcagtcctctgacactgcatagcagagtcctatgtggtctttctctgtcactccctctgcctgcctgtcaggcacacttctgatctcgtttacttcatttttctatatctgttaagtaggggaaaattcttgcacggagccaattacaacatgacagaaaaaggattcctagaaatacaaccctaccgagatgcattgtagtggcagtggcagtgtcttggttattgtcccacagaccagcaggccccacgatgggaagttatttatgatactatcatgactcaccttgttggctgttcccaatgcctggcttacctcatgtgtcccagaggacagaggttctcgttacatttacagccccacatctggacacatgtgatggatgggactgtggatgttctatgctgcagctgtcagcagggcccctgagcgtcattctctgtccaggatggatgggatctgggagcggacctcagagcccaaacccacagcaggataactgcatcttcaccaacatgcagctcctgggtttagttttcagatatgctagagttacagtcgcaaagatcttcacatgtaggcagcaatcaggcaagagtctcagggccaaaatggaacaggaaaagcaaagatgggactaactcttgctctcagtgaggtgtgcttttcattgtcagttgttcagagcacacttcaggttcttcaggctttggagatgagggtctctcaggccttcagcctcctgcgggagctgtagtggtggcttctctttgcgttcatttgctcacgacctggactgagcagcccctagttctcctctctctgcctcctgcagatgggcccggaggtaccattcagtgtcagtgtgtgcgtgtgtgtgtgtgtgtgtgtgtgtgtgtgtgtgtgtgtgtgtgtgtgtgtgtgtgtaacatgagggtccaatttctctcttggaaatatggatatccaatttttttcagcaccttgattgacaagactatgctccccgccccctgtgtattttttggtacctattttgaagatgggttgaccttatatatgtgaggttatgtctgggctctccattccattgcattggtcacatttttaagtataggactactttaattactacagctttgtgatatattttgatatctaaactcctaatacctctaggtctgttctccttttaaaagaatactctagggttttttatttgtttgtttgttattttgtggttttatatttctggaaaaatttctggctttccagaaacatccattctttcttttccttcgtcgtaatgattccatttcgtttcattttcctactcatcttttatcgcgtagactatggtgacttccgagtgtttatagttacttgttttgtctttgtaactctggaagtccactcaatcttgcctgagctctcactcctttgctgtaactgggcgctgtcggggcgttgctggctcctttgtttcccatctctccaagatggtggtccattgttgtctggtgcccattgtttgaaagctggattatttcccatagggaatttcatacgctctgtcttattctctttgttgaaagtgaagcccatccctgaaactactgtttctaacaggaccagcatgctcagtactaacacgggacagtggattgagctgtttcacagtctcatacaatctgctccttagtaaaccagagtgcttctacccatctagggctacctgatggctacaaggataatgctacttttaggaaattgatttaatatgtaaatctgatagtaaggaactaaggctgggactattggggttattactcaatacaagaagaaatttgcacattaaattatattacattagtcagaatttgggccaaaatgtaagtttggctgttggttaaatcttggaggtatttggatattaggattaggaaaaagctctgtagcatcagtgtggctggacttgggtcatagagggatctaggaagatttcaagtcccctatttcctgttctgttaccagtttcaaccttcttggggactctggactaaaactgaaagcacattctctgttttctctctgtttcctcgttccagccatatgccgctatcctctgggcatgtcaggaggccacattccagatgaggacatcacagcctcaagtcagtggtcagaatccacggctgccaaatatgggaggtgagatagctttgtcaagaaggcctaagtgccagggggaggggagcagggggaggagggaatggctacacagccacaactcaagatgctgggggaagggctagtgctggtgagagcttgcaagactggaagcgagatgtgaaggggtttgtgctgcttggaatgtttcagagagaggcgaagccttggctgcagtcactggcctggaaacctcttcccaaccacagaggcctcagaaccacaccacccactgtgaatggggtcattgataggcagtggatttgctttaccggacctcactgtgggccgttgtaggagaaaggccaagggcgcaggtacagagaggtgtagattatgtaggacactggcagtgagtgatgcctgcgtctcaggaggtatctgaaatgccactgggcagagtgtctatggtcaaaccagacactgaggtttccagtaagttcttccttccctcaaggaaacctcacacagaagggccatcctcatctataaacagagcaaattctatgtggagtatgtaattcccaaggtccctaaatgaacagactcccaactcagaagctacgctgatgatcggacccttttcttcctgctagaacctaattatttgatgtaaatttcgtattgattttgttaaaatggaatcacacatgaggcaatcgacccccataacctccctcatcatacctgtcttagtgtttgagaggagagagtagtgtggagttatggggggaatgagaaatgagtgggtaagctctgcgaggaaagggagtgtactagggaagagggagaaaactcagagggtacttcaaataaaccttagagtgatttctcaatgccgttcagtggcggtctagcctggagtagtaaatgaacccaggttattggtcattccctcacaggctttccaccctcaccttcaccatggctcccatggcttttgctgggttgccatgcccattctgctggctagcattccaccatactgcatagcccacactgaagacctacctttcctccctactccttcctccctcctataacttgatacccaaaccaggaggagcctgctctgtgagattgtggctgaggaatggacgtggacagggtgaaagaattccacagaggagcatgggtggaaagggtttcatttccctagagttctctaaatcaagattaaaaggctacatgtgctttggaaggccccagctccattgtggtgactctccctgggctgtgtggtgcttcagagacaggaaacgaaccacaaatgggaatggttaggacagacagacaccatggggaggtcccccaagtccctctggactagactgctggttttcactctctcctcaggcgcagggcagctgcctactgtgagctggtgagtgtctcttgtttcacagttgctccctctcttccctacccttcttctcaaggctggactctgaagaaggagatggagcctggtgtcctgagattccagtgcaacccgatgacctgaaggaatttctgcagattgacttgcgaaccctacactttatcactcttgtggggacccaggggcgccatgcagggggtcatggcattgaatttgcacccatgtacaagatcaactacagtcgggatggcagtcgctggatctcctggcgtaaccggcatgggaagcaggtaagaagaaaatggccacgctttgggggaatataggactcaatagttgtcaatagttcaaactgtgtatgttcaagcccgatatgacattgtaaatgtggcatggtgtcagttcagagttgacacagaggatctgttagctctgctgagagagttgagtgactatattctgctcatgaacaaggagcaaagtgtccatcaaatgcatgattcatgaagaaaggtgaacatgattttaaaggtctctgctccttctcatatctctcctaggtgcttgatggaaacagtaacccttatgatgtattcctgaaggacttggagccacccatcgtcgccagatttgttcgccttatcccagtcactgaccactccatgaacgtgtgcatgagggttgagctttatggttgtgtctggctaggtaaatctcgaccacagagaccttctgaaccatagagaaacttccaagccccaagaactaaaaaccaccaactcagaaagggatgaaatcactcccctttggaatgagattatttccttttggttaaaagagaagaatgagccacacccatctacccagggcttggtgccctgtggtggaaatgacatattcagagttactcaggtaactgctgttgtggtgagcttcccaacagtgctcaactgttaacccggattgaaacccagtggacatgatggacaagctcatacttccttggaagcttaagtagctccctaggctaattggttaggcagcaggtgcatctccttatcacaaacgctgaccactgtgtttcctttggcagatggcttggtatcctacaatgctccagctggacagcagtttgtactccctggaggctccatcatttatctgaatgattctgtctatgatggagctgttgggtacaggtaaatactaggagatttaaataaccaccagaatagaggaaatggccataacaaatattccatcaataatcaaagagtcagtcaatccaccagtattctgcacatgtgtgatacacggaaataacttagatgtagttatttctacatctacatatataaactgcatggtgtttatctccattttgaagttgacttttggaaaacaaaatagtaataccgtagacaggagaaaaattacacaaaggaatagctaaactttgtgatatttttataagtgtgggagttatatatcctgaaatgaggatgtatattccaatctaaaggctaacttggctatagatacaaagtaagaaataagattggtcaggtcacaaagttaagaaacaatgaactccataaatatagtactttagaagctgtgaaaagaaggagctattaaggcttgcaatagataagagaagctcttaggattagatgttaatgaaagcaggaaacagtaggtagaggagtggagaggaagaaatggaggaacattggtctaattatggcagaaacgggtgagagcagcagagaggcctgaagtggacagatgaagagctgtggtagaaaaacatcaccagacacattggggtacagagctgggaaagacatgtgcctatccattcaatcattacattcttcttctggtccattgctaatccttgtctttcttagttcagtgtttatctgtaagaatattgtgaaatatcgatccaacaataaagtttctaggggccaaaaaagaaacatattagtgagtctcaggaagcagattgtagaatgacagacagcctttctactggctcaagggtggagagtgaactatctccttcatcagccagcccctgggtgaagtctcaattcatccagtcttctagccttacttatttcctttccatctgcttagtcagtcacttctctccactctcttacatcatcttcacattgtttgactcagtcacaccctagctagcctagacctaaagcacacaggaaatgagataccaattggatctttgctagtcagttgttatgtgtgtagaagttggctaggtgttgtgggtaattaagaaaaatgaagccatgggtctcatgcttaaggcattcatagtttgggtcaatggctatgtgagaagattgattattctatgtatttgttgctttttttcattgctatgaccaaatgcctgacaataaacaacttggggaaggaagattccatttagttcacagttcctggcaggagaaggtatagcataacaatgttcatggtggtggagacttgaatgctaggagtagtaagaaggatatcaagaagtcgggtggggatggagcagttttccttttagcacagtaatttccttttaatatagtaattcattgatgatttttaaagttacggaaggatgtgattggagctgagcttcaggcagattaaacaagtagctgacaaagattagatgtgagttctagtggggcatactttaaaatcccagattctatgatgtaaatatgaactagtagccaaggccacaatggtactcttggaaataaaatagggaagaaatgttcatttgggggattacaagcatctaaatcaaattaatattaccctaatgatctctttccctgaatcaatggagaactcagtttcacatcaacaaatgttataaaataacgagtgtttactgcattagcagaaaaaccattgaagtgctgttttattagtttgtatgacaagccttcgttttccccttgtgtcttttcctatatgtattaatatggtgtcttggtataatggttcaccattatcaatggcatctaaattagttcattagtgggggaactaatgaagaacatgaagagcacagcccttgacccatcagtgaccaatactggttggacgcatttgcatcccttcctggactgcacaattcagaaaaggaaaccactagataaggtgcatttgaaagatttctcctaatccctccacctctatagttatcagctctttcaaaatccagcagtgaagcaatgggctgaaaagttcttctgtggatgtgtgagtaactccaggcttctctcttctctcctcttcccatggcctgagcagcatgactgaagggctaggccagttgactgatggagtatccggcctggatgattttacccagacccatgaataccacgtgtggcctggctatgactacgtgggatggcggaacgaaagtgctaccaacggtttcattgagatcatgtttgaatttgaccgaatcaggaattttactaccatgaaggtcagtggtagattctcttcaagaacctcaaaattatcgtgttggggggaaaatgcccgatgtgccctgagctgatgttgacagaactagattttaaaatatattccactactacaagtatagatgaattcagagtaacatcacttttaaaggttgtttcttcatttgttaactctgcacaacaggttagacccattgttattgagttattctcttcttccctccttccttccttccctcctttctttccttccttcctttcttcctttctttccgtctttccttccttccttccttccttccttccttccttccttccttccttcctccctccattctttccttcccaacatcagagccaaacattttcatccaatcagacataacagttatttcatcagtacataactgcagaacagttaagtggacattggtgagtggtaggatggaagccaatggcttggtcaaggctgcgctagaaggctgtcatgtgatgggtcacctcaaatatgaatatgtggcaagatctgaagaaggaattttaagtcctagatctcattttgcctgaagtaagaccctaccagggagccaaatccttatgccacccttgataaggtctttgttataacataaagggtttcctggtatgttgtttaaatcattattttcttttgccctcattctatccttggtctgttttagagagaagggcatgggaaagaagaaaagttcatgcaaaaagtaactagattggatgctaaatctaaattgtagggttagggaaaagtagaggccaggggtgtgaaggaaagcctttgtgttcaatgtaggttgaggctgcaggatcttatatggtttgtatataaactcctaatggtctataaaagagaatgaggaaacctcaataaaagtctcaggaaagggtggacaaataaatttggtcttccacgtgcatgttcacctatctgcccctttttcatatttatattcatgtgtagtagtaatctacaaacttggtaagccttcctcagtagtcttcagtctatagctgtttcctgggttaaatggaagagatcgtaattatactatatatttaaattttatctgtttatctgtgcttgttttggttccacaactatatttggagcacagcatgctagattctgagtaaagaatatttcctatcttgggaaacattggtcacaaggtcagtaggaaaggcaccattaattttcaaaagaatgcatgcgggataatatgggacccagaagaaggaaatatacatcagtcattattaagggttctctctagggcaaatattttattccttacacaaactaggcttaaaaaaatacttgtcttttatattactctcagatgttaatgcctatctcttaaccagattaacacttattcattaaatgaacaaaacatttaagatgaggacagaaggaacaacatatgcccactctgttggtttgttgttggaaggtctttggcaagtgtaaaacatatgggtgtgcaattacatgtaacacattattcttcagagatttttgtagatatgaagtaggaaggggcaaaggaaggagtatgcatagcaacaaaaatattcagtaagagaaaaaattatttttgtattactttttaatatacctgtgaacatacacataaatttgtaagtttatacatgttggggaagatttgtagtttaacaaataattaaacaaattttaaaactatctgggatcttataacatctcaccagcaaactttgatcttcctgaatctccagaactccttttagctcattacagatcaaaatgattcaagagtttagatcaagaagccagaagtttctaagtaggagatctggggcagcctcttcaggcaaacatatcctccacatggtttaattttcatggggaaaaaaaagtgaaaaattactttcagggaactaatatcttttatagagcaggtttctttctgaggcaaattactcctcatctcttgctttgaagaagggttaaaataaaccattaaagcttactcatgcattcaaagtatattattttaataaataaatatgtaagcccacattggaatgaaatccattgctatttatttgcgttccagaagaattcttgaaccatctgtaggaaagattattaccttccctgcagggtacttacccaactctttgtagatttcagaacatctgaaaaacctattgaagctggagatggtatttctttgacgttttttgcccttagcctcagtccatcgacttggggtcaataaactaagatgattacttcactccaaggaagatattaacacatgggttcatcaataaaacctgtggagaaaaaaaaaatcccaatggaaaagttaaggtgactgctacatttctatgtggtatgagggcattgtaccagatgtttagggctctccttccaattgtgttgcggactggacataggtcaggaaaacacgtgagtactcctaccttgtcagtacatagatgaactagaaggtttctacacccttcagtagctctcatgatctacccttagaatatcccggttccagttctctgccgtgacgtctctttcttcattactcttccttcttcatctaaaaagtgaattcagcctggtagtcctgcactgcctacctagaggacttacagagttgcacacagtacaacccagggcttaagcaggcctaagaaacgggaactacagtccatgaatgacagtcacgcctttctaaccagtgaaattcttgagggacaatggccaggaaagatctgttttccccattaagactgagtcagagcaaatggaaccaaattgctgtaagggccttgagtcagttgctaatatacacattacactttttttgtggggtactgaaggactgttgtgaaatttctgctcttgatgacctcacaagccaaaaaaaagatcccgctgaaaggtcatgagtcaggagagtaggtgctagctacctcccacctgacttcttgtctcatctcagatattatcagtgacaaagatctgatgctcccatctgagcggttgtaaattaaactaaatttaagtctgtgtctctggctgaaagtgtcagtccatggcattccaagcgagattgtcataaagaaagatgaaattgaatttgcttgaatattattttctttcaagtttcccacattgccttcctgaaaaggaatggtctgccttgggaaggtacctgggaggaagcaggatgctaagttggctcaccatctcagatcagaatagctcaaatatgggcagatagcacgtatgattaaaaagattacagagccaagagaattcctgttgggaacagacctgggaagatgctaatctagctctcacttaacaggtggggctactacagactaaaactgtgaaccaggtgaccagagcacacagttgcaaattggaaactgggttttagaaggtctgacctgggtatcattgccactgtccagaagactgaattatgggtagtgtttagagaaatgggcaggactaggatttcctacataacccagaagggccagcgtgtctctttgacctccctctctctgccaggtccactgcaacaacatgtttgctaaaggtgtgaagatttttaaggaggtccagtgctactttcgctcggaagccagcgagtgggaacccactgctgtctactttcccctggtcctggacgatgtgaaccccagtgcccggtttgtcacggtgcccctccaccaccgaatggccagtgccatcaagtgccaataccattttgccgacacgtggatgatgttcagcgagatcactttccaatcaggtagaaaaacctcgggggctccacagggaagagagtgggttgatgcaggaggtaggaagtgcatccgtgctgccccctgcccaggtctctgagaggaacgggtttcccagatgccttacaggttttggaaagagagaatcctttgtgtttcttgttttatattacgtaattataagaaccagagtggaacagtacaaactttattagactctcttacatgtttgtctagaaaagatttatggcaaaagattgttaaaatgtgccaaaagctatacaaattaagactgttaatgggaagcatttaagtactaccaaagaattcaaataaaaatccctagacattatgtacaaaagtaaagacaacaatggactcccatctctcacctttattactaatcattgtcacctttgttcattctttcttgctgtggtatttgaaaacaaatctgaaacatatttaggtttattactagcactttggaatgcatctaaggaaatattttcttgagtacaatgtcattataataactcaaaatatttaccagtaacttctaaaaatgacttaatcgtctttgagtaaacagtagggttcatggaaaccctgtgctgcgccatgccttgaaaagttaaatgggatttatgacttcatctatgccattggattttagtttggatgacaaaaaagtggctttttagaattaatctaaagtaccaccaagcctaaccaatcaggaagagcaaggaacaaaacgatgggctttcctacatagtgacaaaggcgtgatgctgcatccggcctgaaagaaaagtataagcataaaataaaatgatagggagagagagaataacctagctgtgggttagaagataagatcctttctgccttgagtttttgtcttaattttggttgtgagcttagcctttaatgattgagccatctctccaaaccctggcttgatatgtttctaaagaagaaaattccaagatggtttatttattagcctatgctaataggataagagagtgtgtatatatttagaaagcactggtgcctacatgctgtctatgccaatgtaatttaaaagcaagcagactaattagttcatgtaatatattcagaacagaactgtatatgctcaaaagaggcgtgcttaaattgtaaaaataatcagaagataaataaatactatccctggagatcatctgggtgaaagaaaacacagatgtccacctactggtattcttggctattcttggcagagcaatccaatgaattctctctacatattgttgaatctaggtccttctttccatgcatattttatgatgatctatgaccacagctctctgaaacaccatgtgctaatgttttatattctcataatatctaatatttacatttgtcttattttggccaagcacagcttggactaagttttagattccttgaattctcttaagcttcaaactgtatgtcttggtaatgttattttcttctcgattcttaagaacttaaattaacacaaatagttgatgccagaaactccttatttgtataataatgctaagaagaaaaagtaagatttgttgaaagaatatcttgtagaagacaagttcatattttaattattgacaaatcagaggtaaaaaaaattgattaccagtgtccatatggcaattacacttttgaaagccagagcctcacagtaaagggcacttcaaagacagttttctatctctagggatggataaagccttaagctgagagttagagcaatgaaggacaatgaaaaatccctttagaaaacaatctaaattgttccatttctttattgtttaattgattcaattcttgggaggaaagactgtcttcatactaggttgatttcatgcccatatatccaatgaattctctctacatattgttgaatctaggtccttcgttccatgcatattttatgatgatctatgaccacagctctctgaaacaccatgtgctaatgttttatattttcataatatctaatatttacaacaattgtttttgcactaggaaaaagtatctttacttgtacaggtagttatactttattaaatgtatttatggatttattcttactttgtttttcatagacattatacatttttgcatttacatactgcagtaaaatgagttgatgcatgtataatttttaaaaacactatcggtaacccagtacattgacttttacaatgtactatgtctcaggctacgttcagatgtgccattgcctggctgtctgttcccagtctctaattcactcttgttctgtgacagatgctgcaatgtataacaactctggagcccttcccacctctcctatggcacccaccacctatggtacgtgtgattagtacttgtacaatagtaagatgaagttacctcctggaagacaaagaagggtagagattgcaactcttcactgtgtgtgagtggcttgattccatgtgactctgaatggatacttgtgtggtaaaggaaggacagtccacccccaaagtgaaggacccaaagttactctcatttgtcaccatccatgagttacttcagctgagaggggcaggatctagagtgttacaactcttccatgaatgattaagaagcttgggggtggggggggaggacaagtaaggaggcattcctaaatgagacccatcacaatgatctcatgaacaaggagtccatggaacaaaatcttttctatctcgcagtagatgaatatgcaaaggtacattctttgcttggagaagtcactggctataacagccggcaatctggaaacatgtttgattgggtttcttctgagaggaatctcagctcctttgacccatctccaagaatgaagagtgcaactcattcctcacctatactttcatgagcattaagaacctattccaaaccacagagacaaaatgtggggatgcgtatgaaaaccgctcactatttagtcggagacacagagagagggaaggcggtgacccatggaagaagattgtaggaaataggagcaaggtaataagcaggagccaaaaaaaaaaaaaaaaaccataaatatgaggatggaaccttctggaattctcctgaaagaccagggatggtctccatgctctcctctattccccactgctctcatttgccctaggaagtgaatcttttctctgccttctctaattggtcacagatcccatgcttaaagttgatgatagcaacactcggatcctgattggttgcttggtggccatcatcttcatcctgctggctatcatcgtcatcatcctgtggaggcagttctggcagaagatgctagaaaaggtgaggatttgcagtatgaacaggaactgtgtgtcttagtcagggtttctattcctgcacaaacatcatgaccaagaagcaagttggggaggaaagggtttattcagcttacacttccatactgctgttcatcaccaaaggaagtcaggactggaactcaaggaggtcagaaagcagaagctgatgtagaagccatggagggatgttacttactggcttgcttcccctggcttgctcagcttgctctcttatagaaccaagactaccagtccagagatggcaccacccacaaggggcctttcccgcttgatcactaattgagaaaatgccttacagttgtatctcatggaggcatttcctcaactgaagctcctttttctgtgataactccagctgtgtcaagttgacacaaaactagccagtacactgtgcttccatttcctgtactgccatgacaccaggaacaaagggcaaattctaaaaagttataattggctaatgagttctctgaggtaaccgagaagcatcggtgtggaaaggctgttgaagcgagcccagaaagggattagccgagtctagttcctcattttcagaatgaagattgtggaatctgccttaaaatcttaggaaagcgtttctagtacattaaacctcatcttgggcatttcccatgaagagtcaggtttattggttttagttagggtgcaggcacctgtgtgtgttttcagtatggcgcagttctgacggccagtcaaggttggggtcactcttgatcctgttaccctttttgaccttttctaaacttcttgttcttttgctttttaatgtcagattacttacttttcctggtgctgtgacccaatatctgacaaaagacaacttaaggatggctttattttttatcacgacttaagagaggagacagtctaccacggcagggaagggatggtggtaggaaggaagcagccgggtaccctgtgtcgacagctggggagcagagagagatgaatgctggtattcggcttgccatctccttattcattctgggatgccagtctataggatggcactgcctccattctgggtgggtcttccttgctcagctaaccctttctggacattccctcttacatatgcataattatgcttctgaggtaactctaaaatccatgaagttgatgatggagcttaaacatctctctctctctctctctctctctctctctctccccataaaaataattaggttcattaatacccaagtagtttatcatcatcttaatcctatttctttatgtatttgaaggtcatgattatatgttcctaaattcctcaaattactgagccaaatgacatgaagttttttattatataacatattttaaagatatgttatataatattttaatatgcaaagccttatttctcatgcttgttttttgtttggtttttggggcagtctcctggtatagtcctggctaacctggtgttgtagatcaggatggccttgaacatgctatggttctcctgcctgtgtttttcctgagagttgtcatcataggcatgtattggcacattcagttcacacatgttattttatatgagactctgagtaatggttgcatggattatatttagcttgtcctaatgacataatacatactcacagggcaatctgtgttctatcttatggtttttgtcaactgcccaaaattgatacactttcccaatgatgaggatgaggacctataattctcccagacttcttaatcattaaagaacttcaatggacaatgctactgagtgactgtccacctttggatctatcaaaatgtttctggctttgaccatttctgacaagtgggttcaatggctttgggctgtgagtgtctgcagtgactacaagggagtcattgacttcagagaccaagtcttttaccaaatgaggggcaggacaccatgagaagggtcttgaatctctagacttccttgtttatagagtataagataaagggatcacttcatttgagaggaacaatctagcaagtcacctgtggtcctttctgacctgctccacatccaggtttcaacattggttttaaggatttggcgcaggaatatttcatagaagagaaaatctctttgtatctcacaacgacttttaacatcagacataaaacacaaaataaagccttcagtccatcagcagaatctaaagagttgcaaagcagactacagagcatcccctcaatggcattcatgtttcaaggtgcaggtgggaagtgctaagcattttcctctttcagaggtggaagcacactcatatctaaatgggtagctccatcgtgaacgtagcaaacagggagtttgtggcagaagaaattgcttgactaaggtttcattcagctgcttgaggctaacatatgctctttgaaaacatatttgtgttagttccttgagaagttgatgtaatgtgttttgatcatttctatctgccttacttctccctgaacttgtcctagatctaatgtcacctctcctacccctcccaacttcttatttttcttttttcttttcttttttttaaaaaaataacctactgtgtgtttgtgttgtgctgctcatgtagtcatgggtgtgggactatccactggagggtgatgaacctagcagaagttataaccttcaagaaaacagactgactctccctgagaggagtatttcctcagttaggggtggagtcctagtgtatgctcctactgaatagtcaagtagggctacattctacttgaaggaaaagagaatctacattctctcctctgggctctctctccctctttatttgatctagagtttatcacacttctctgggtctttcttctgaaatttgctggaccgtcttccttgtctgggagaccaaagctcatctgggaagcagaatttccctttgggtctttaactcagtcttttgagaaactctttctaccactgtgtgtagccgtatataattactcacagtttcctggaatggcattctggatttcttgctaggataatatcttttttttttttggtctgtgtggaaaagcttatatacacataccaacagcattactaaacatatttttagtccataacagtttttgttgacacttttgatggtgtcttcagcaatacttctttgagaaagtcaacccatatttagggagaacctactatgttctgggatccatgttcgttctgagtatgttactgcaacaaaggactgttcaatctagtagaaagacctatgattctgtctacatgtatttattaaaatggagcattttacatgttcagactcaaatactacatccattagatgctagcagttttcttttgttggagcaggcagttacattagacacgatgccactgcagctggttatttggtgctttctcttcctgtattagatgtaactcgtcattctgtttgcgggttagtaaaatctagcatgttatgctaaccaataatactagggtgatcagatacactgttaatttagcatgttttagaactcccaagttaatgggtgttgcagtttatgtttacacagatcagagggttaaagcacaagtcgacaaaacccattatttactagaactcacacaactctaaaaaccagagaaaatatttgactacttacaggatctcattgcattgtgtaaatgatgctgacaagtgctccgtggaagcttgtgaatgttgccgacacaggatggttaaagtctgccatctaaagaggaagctattgctaaatttctgcaacacaggaactcatggcaccagcctgcctctctatcagctccggtgttcctggggggttgaaggtatgaaccaagcaggagggctggattttagagggcaagagtgacgatcctctctattcatgactttcaggcttcacggaggatgctggatgatgaaatgacagtcagcctttccctgcccagcgagtccagcatgttcaataacaaccgctcctcatcaccaagtgaacaggagtccaactctacttatgatcgaatcttcccccttcgccctgactaccaggagccatccagactgatccgaaagcttccagagtttgctccaggagaggaggagtcaggtgaagatgaaatcatgggtgaattgagggagaagaagccttggtttatatgatgtaggcataactcttgctacacgttaaccaaatccactaagtctgggccagcctctggagaagtgtacagtctgtctgtctgcttgctgctgcttctagtctattctgacactcttccttttattcttaacacaagatgttcagagggaccccccccccacacacacacacaaagatgtcaaagtgtcactgaggtgttatcagaagaagctgagcagtctcatccagataaccttcttgtcctgtgtctaatgggagagaaggcccattctgtgctcacttgagaccagactagactggaaattacaatgggaggagaaaagagacatgaagccaaaggcattctatatctctggatagctctctagataattgaatggcttaatttgttgacttctctttgataaatactcattacactaatataaggttttgtttttatagtaaatgtgttttggcttttctcaacaaaagtattgaataaggtgcataatgcaaattgcttcaaagcccagtcccccttggaaagtactacagggtgacatcagaagtggtactgggtcactgatggtacccttagaagctgtccatggtcatcagcctagaagtgacaggactagtagtagaggacttgtattcaggagaggaaggcctaagccagatggtgtgacttaatagaaaaaaaatcagctcattagagaagaaacatgctgagagaagaaagggaattaacccaccaaattcatctaattcctagaaacagcaagaccgaagactacatgtgagggggatggagagatggctcagtggttaagagcaccaactgcttttccaaaggtcctgagttcaaatctcagcaaccacatggtggctcacaaccacctgtaatgagatctgatgccctcttctggtgcatctgaagtcagctacagtataattacatataataaacaaatacataaaaattaaaaaaaaagagccgggcgtggtggcgcacgcctttaatcccagcactcgggaggcagaggcagacagatttctgagttcgaggccagcctggtctacaaagtgagctccaggacagccagggctgtacagagaaaccctgtctcgaaaataaataaataaataaataaataaataaataaacatttaaaaaagagaattgaaaatcaaaagaagaaagaaagaaagaaagaaagaaagaaagaaagaaagaaagaaaagactacatatgaacttattttcttaacagaaccaaagaaattaacctatttcctaaggtctacatctcccataccaatcatattccaactttttacaattatggtacatgttaaacatgattttataaattcaatatgaagttattttcttccctaaactggactgttaagttaatggcagcattccaaaaattaaggaaatctgctattaaaccttccaccttcaagaataccatcctgatatggcagcttaagcattcctaaggcttagccccccgaagtccacagattcgtcagggaacttgttcctgatggtgccttgtaggaaacgtgaaaaacaaaatggcagcctaccttcttaagtccaaagggaaggaaggtgcctagagggagcacaactgcccacaaataagtattgtatgcagaggactagactgccgtggggctggttctcactatcccctcaggtctccctatagccctgggaaaccagactcagggcccatgtcttctcagggtgcagtggtgttgtgaagccggcccagcccaatggacctgagggcgtgccccactatgcagaagccgacatagtgaatctccagggagtgacaggtggcaacacctactgtgtgcctgctgtaaccatggatctgctatcggggaaagatgtggctgtggaagagttccccaggaaactgttggccttcaaggagaagctgggagaaggccagtttggggaggtgagttaatctttggaacgaggcccccagtaggtcctgacatgaaggaagtgggcggataaaagggatcagcagaacaagtgtctctctagaagtgaggtctcagccaaagggctcccttacttgtttatctgcattgctattgagatagttaatggtcaatctcatctttgcttaagagctgtggattccctaggacttttggtttttatacaaaaattttaagggaagcgagtcacaagagccccgctatcctgaaaaatacccaatgctttcaaaaactgtttaccataggtttctgagggtgggacttatggatatcatcatctttggtggattatctaggaacaccctttttgcttagctacaatctttttttccctcatattgagggttatatgtcaaaatggtaaaaacaaaacaagacaaaaaaccaacctcgcccttgttttggtcttggaatgaaaaccaccaaggaatgaaatcaccacaaagataaggaggagccctcttctgggttgttctcagagtgattcgtgggatattagacctttttctcttacataagccatcagaaccttcagagaattcagagcagtgctctcagctgtaactggaatccttgaatcctgtcatctaaatgttacatcatcaaatgtaacacacgatttccgtgaatatgtggttgacttccagtatgaatcaagtattctttctctaggaggtttggtgttcgagaagacagagggaccctcgacatttgtctgtattgtcacgtggactcattctgtcccttgggttgaaattctatgttcactatactattgctaacacctaggcaaactttacaacattctcttcaccctaggggattatattaagaaattgccttatgttttatatgatcaagggattaactttctcaaatcaaagttgaagcaattatgtcaaatgctattttctagtgaagttatgctgtgataaaatgctacattgtagtcattccttcccatatcaatattccattcaatgtacatttcttttgtaaggcactgatgtatcatattagctggatacttcaatgttgtttattaattttgacaattacttggttcaatgatatgtcagccataccctcttattggtctctgattattttgcctgggtcataagagtcagtttttctccggagcatgcccagcaagaatactgaggcatctccaggagacaggatgatgctgagactggatgacttttgtctaggttcatctctgtgaagtggagggaatggaaaaattcaaaggcaaagattttgcactagatgtcagtgccaaccagcctgtcctggtggccgtgaaaatgctccgagcagatgccaacaagaatgccaggtctgtggtctgcattttgaattttcctttacttgcttcctggttaggattgggaatattctggaacatttctgagcttttatttttctttcctctctcgagatgggaaggtttcatgagtggtcacacaagcccacttttaggttttatacttcttatgtggccagaagtgcccaccttttcctctgtctctttcaaacacaaatgtacatatttatattatatttactatatacttacttaaatcccctcacccagtccacataacagcccaaatatattcatccctcatgaaatccagatataatcttgaatgtcaccctctcctctggctggcttttcctaatggcaaacaccttcctccctacatctgtgaattctccactctcccacatctctgttctcattctcaccctgtgttttctcttttatgctccttttcttctatgttcagcagcccctcacaaaagagaagctacttctacttggaaacacatccgtggacctctgagcaaaagaatccacagtcctttgacaggtttccaaactggctagtagtctcttggatcctttcctacacacactgcagtttgcagaacactgcattgttctctgacagcctttccattacagtcatggtgagttaatcctcacccagagacgcatgctggtggaaaactatttgtgtctcagagaaacctgaacatctggataccacatgcctcttcccatgtgtgttgtcttgatatgtcttgctgatactcaccctaagaggaagtttattatccctacttccctaaattattgtaaattccagagatgatgataggtttcattgaaagtcttacagtgggcaggatgtggactgaagaggagacgaaggtgaggaaatggaactgtgtgggctttcacattttaaccaaaagctttatcttatgaatattaacatgatatgggatattcttcatattaatcttcttcataggacaggagagagtagcaagtgggggaaaacattgtgtgagataagaccatgtatctctgggttgtttgggttggtgatatttgcagatctatctactctctcttgtttggtagtgatggatcgcctaagttctggatcttcacacatcgccaaaatccatagtctgggatttcacaggaaaaggagaagggagatgctaaatcagaactacattggttccaataatttataccaacagagtttgactctcagcgcagaattcctgtaaaactcactggagacttctgatttgctcctgtagttttgggaatgtgggctattggctccatgttgacaatttacaactcaaatgtggctttcactatgaactcaagtcattaccagtttggcctaaatggctttgaaacaactccattcgaacaggctactaaatcactgtgtgttgtagctgacttctggtccagatagtattgggaaaagctagtaggtgccaaaacaaacaaacaaacaaacaaacaaacaaacaaacaaaacccagataatcaagagggtgattatccactttgtaaaaactgtcttcactttattaagattgtgatttagtagcttttgaaagagacaaatatcttacagcacttgagttggttttaatgagaagctccatttgcagggaaattttaagcaacacatatcagtaatattaacaacattttatatcgtgatataaaagtgcatcacagatcttatctttgaaaacattatcgttgactcaataaagatccattgtgttcatggagaaggtgaatgggatagttctgggtgcctgtctgtctgttatctcagagatgatccagaggggagccaggcatggtgtgatgggtaggaatgggcattgctgtgcatccatccttgctcggttctgtctctgacaacctctgactttatgtacaatcacaccctccaaaggaatgattttcttaaggagatcaagatcatgtctcggctcaaggacccaaacatcatccgtctcttagctgtgtgcatcactgaggacccactctgcatgatcacggaatacatggaaaatggagatcttaatcagtttctttctcgccacgagcctctgagttcctgttctagtgatgccacagtcaggtaaacgagtcaggtcttggtcttttctgtgcagtcatgagagtaactccagggcctgaaaatggggagtggtaaaacttaaggtatcagttgtcatgggagtagtgtggggaatcagtcagtgtgcagtgatgatggggcagctaccctttgtgggaaatcaaacattctatgagaatggaggcagaatatagatggttcaaccctggtttgatgattagcgtatgccctgtccatagctgctttcttttttcttacacgtgcccctagttatgccaacctgaagtttatggcaacccagattgcctctggtatgaagtacctttcgtctctcaactttgtccaccgagatctggccacacgaaactgcttagtgggcaagaattacaccatcaagatagctgattttggcatgagcagaaacctgtacagtggtgattactaccggatccagggccgggcggtgctccccattcgctggatgtcctgggaaagcatcttgctggtgagtttctccatctgtgagccctgtcgcaccaaccaacctgctgctcagggtgaaggtggaacaaactggaggcagcaggaggcaagccccacagaccttgacattttcccctgactagagaggatcttctcaggcactatattattattgttgttttgttgttattgttattattacagactttcctatatctgctggaaaaggggaatgcaccattatagaaactttagggaaaaggtttaaaagaataagaaatttgctatctttttgtctctacccttctccctattggatggttttagttctgggcattaaaacccttatctgttaaaaaaattatgttgtaatataaattttccattttaagggtatgaccatgcttctcattaattatttagaacagtctgtgtattatttagtgacttttaccatttacttgttgaatccataatttttcttttttatgatttttacctaattcttggtgttttgttccacaaatgaatgacttcagatgtctctcttggagctcagtcgttctggccatgtatatctgaggcacttcaatgttggttttacagacactcagctcattgaaggaatgagtattcactttctacaatgctaccttgattgtcttccataatattcagagaaaagtcagagcccagtttgactttgttcatttctacttcatctgcttttttctggctgatattcatataatatggattcataaattagttttgaaataaaaaaaaatgaacattcttgtctcctcaataagttaatgctttggaatgttgcctttgagggtttttttgtgcatgtatttctaatatgtaatgtctttaattttgtatttttaaatattcaattgtatgtgtacgtgtgtgtttgtggtgggtcagaatgtgtgtaaggacaggtggttgcagaggccagaagagggagtcagatcccatggagatgggattacaggccgttacagggtctggaaactgactcaggtcctctggaagaagaatgaatacttatgtctgcctgttattccaattcacggggggggggggatgcactagaataattgctgttagttagacataagcatgggctagatagcaagatcctacaggggaacgccagggccaaaaaatgggaatgggtgggtaggggagtggcggggggggggagggtgtgggggacttttgggatagcgttggaaatgtaattgaggaaaatacgtaaaaaaaaaaaagaaatgatgctataaacaagaagaatgatgctataatatctgccattttataaaaacccaatggcattttcatcgatatatgtgagcctttatctttatcaacttctaacatatgaaatcactttaaaaaaaaaatctgaaggtgctgtgtggttttaaaaagagacacattgagttacattcagaggactgggtttcctagtccagttgttgcatcattaatggacttattaactggaataatttgctggatcactccttttatttttctgatctaaaaatcaataccctctacatgtctctgccactatctttattaaatagaaaaatgtgtatttaatgagtgctgatcacaaccattctcagtgttgtcatttgataaagtcgtcctcaagtctgtggctaccagcaaatagggaatcgagagtcctggatccaccaggactaattccaggcccttataaggcttccttcattcctaccatcaaaatcgttcatttcttatgctaacttgagctttcccctgggtagttttcccaaagtggtccatagcctataggtgacctagcattcagagagctgatagcccagaggtacctgttctgatgctcagtccatggccttacggactatatccttgcagctcttggatttcatgtccaagagaagcaggactaagctgaggtcacagggatggcagagtagacagctttccagtaagttcacatggccacttctagtttctctttgcacatcagtttcagcattgctcacccttgtcaggggaaggaagattggtttcagatgatggtcatggaacatcttctttgtgggcttggcttgctctgactttcttttctccagcctggtctacaaagtgagttccaggacagccagagctacacagagaaaccctgcctcaacaaacaaacaaacaaacaaaacccccaaaataaaaacaaaaaaaaacttttctctccttcaatagggcaaattcaccacggcaagtgatgtgtgggcctttggggtgactctgtgggagaccttcaccttttgccaggagcagccctattcccagctgtcggatgagcaggttatcgagaacactggagagttcttccgagaccaagggaggcaggtatggactgttgcagacgtggacttgggtgctctcaagggaaggagaaaggaaggtcctgactatgtaggaagaccccagctcaaggatggaaacaaaattcaccttcttatattcagtcaattcatagatctagattatccagaaagtcttcttggtggggggaggggggagggaagggtgagggaagtcaatggtgttgtgttttttgtttttgtttttttttttaagaaaaaaaaaaaaaccttcaaataagttatggtgttggtttaggttggtttaggtttctagacttgaacatccacaaatggactggtataccctggtccttctctggggaggtacctttgggcctactgattgatcctctggggacttatggagagccgagccctcaagctcacatggagtcctaattccctgagatactaagctttctttggttggccaagtttttaatgctccagtgagacctaggatttaaagcttgctagtgactagagcattgcagtcccccaaggggtctgtctgtagcgcatctgacatcacagcatttccaagaggcagatagatggtaatagctagggaaaggttttgtaggagataaaaagtgggtcctctctggattacctaggcttaaacaaggaaatgacaaggacagacaagaataatacatggtgcatgctgaaaatgagaacagcctgcaatttaatttttatctcaatgtcctttagataatttggcagcaggaattctaaatcatgcatcctggctaggagatgtcccagttaacgtttctattgctatgatgaaacaccatgagcaaaagcaagttaaggagaagaggtttatttggctgacacttctacattggtgcagaggtcatggagagatgctgctcctcatagcttgctcaacctgctttcttatagaatccaggaccacatgccaagggatggctttgtccacagtagactgggccctccctaatcaatcactaatcaagaaaatgccctataggcttgccgacagccagatcttattgttgaggccggccagaggctcacatgttggcaaacacactttataaagaggggaggcccattcccagccaggcaaagttcctttgaagtagacagatcagccttttagtgggaacttgtgaagatcacagttctgtgctaactcttggagaactggttcagcctcaggcaggttagggctcaggcaggtagtggcacatcaaaggagaatgctgagaagcagcacagcaggtggctccgcctaagtggcagatggtttgaggccagcctagctagcctggaaggaggtaacatcttatggagatattttcttaattaatgttccctcagatttcataactgaggttctctcagatgtccttagcttttgtcaggttgacctaaagctatctagcataggaggtaacatctctcttattgtgataaagcaaagatttgctcttgtctttatgaaatatacaatgttccaagaagaaagccttcctttcctagattaatgtatttaaacaaccctttagaagacaaattccaaattaaaagttgtgtgttcaattagaacatggattcccactcattaaaataataatcttaatttgagtatatcctagattcataggcaaatgtgggtttattgagagcctcttggtattcttcaaattattgtttatcaacagaaatcctgcagagtcagtttttatgtaaactggaccaacatccatgccataggaggaaggccaagtcctttcctgggttctgtttgttttatgttagtcttcatgatattaaaaatgatcactagacagtcatatgttatttcaattctgttatacagctgcacaagaacacatctttttaaccaactgaaaatcatagacattttcattcataataatctttagaactttactttctcatttagtttgagtctatgtgaaaaggaccactaatttttacctacacagatactagcaatgtactacatacagatttgaccatctccctgtgatcaagtactagaatcagggatttgactgaatccaggcccaaagcaaacatgaccatcacatactaagtcacttctcagttacaactcaaaattttggtaaagaaatttctaaatttagcatatcacatgtaaacaacaggttaaatacaattgatcagatttggtaaaatttgattactattgtgtttatagctgaagttccagtattcatgttctagagtttgacatgagcatatatggacagcactgtgtgtatcagctactatgtggcttctatagtccctgagctacacagaggcggtgcactcatttcccaatagttcatccaacctactgggcacgggagatacaagcaagtagatgaaccatgtgacttatgcaaattctagaagaaacttcatagcttaagcaaatttaaaattaagcaaattttaaacaatttatcttcaatttaaaatgcttaaatgtctacagcaaaaattccaaccattaaaaattaatttggcattttttgtgttcaatttacaatctcaaggtgtgaagaagttccaggtagcatttttcttgaatgcccacagtatgaatagaacttagtacctaaaattaaatcagtttaaattgtacttcagtgttataagaggtaacaacatggtatatgtgatatgaaatcatatgaaatgtaacttaaactgttcaagttaaattgttattgctgttgttgcttttgagaccaagtcttgctacatttccagggtggctttgaactctgatcctcctgcctgagcctcccaagtactaaggctacaggcctgccacaaccacacctggaactcaacattactatacctttttttctaaagttctcagaaagagctcagcaatttttttgttttatcagtaatacctgagaatgccggttatcaataatgcttactttctaatgcctggtattttatatccattgttttataatcctgacttaaactttgttgtatctgatttgatagtccagctaacttgctattttagcagaagccaaatatttttgcttattggcctttttactggcaattagaagtcgatgggcatgtgttattattagactctgggtaaagcccagctcctatgatacatgatccaggatggtgttgtatgaggtaaggcaaggcaatgggaagtagctaatgattaactaggtacaaatatcgggttcagcaaaggtaatgatgcttttatggttgagtgatcatggaaagtttaagtacggtttagtaatctgtcaatatagcagggtattaaaatgtataggtaaggagatgatagtaaaaatatagaatgcgggagatggactggcagttagtaaaatagcatcttgcttgtggaaatggtaactggaaacttcagagtagcatcctaggctggaattatggcatcataattatacctgttaatgcaatccaatctcttctaaatgagaacaatacagagaggggaacatggagaacaatggtgagtattgctaggatacagccttcctcccaatttatacatctggctgaatattattccaataaaattgcaataaaacctcaaattctttagcagaagctacaagtgtgctttatttctgtcatattggctcagacaagattcaccctcattgacggcagatctgagttcttttggcattggtggaacctttagtaggaaggcagggtcctcgtgaaatactgcttgagaggactagaatagaagaaggtaataagaaaggggttgatgagctttgtgtgatgggagaatagacacaacacccgtgtcttttgctaagttcagtaaagtggcgagggtacacatagagctatgttacagtccattctcttcctgccccttaatatatatttttctctcttttaaaatgtttgttcccatagatctatctccctcaaccagccctttgccccgactctgtgtataagctgatgctcagctgctggagaagagaaaccaagcaccggccatccttccaggaaatacacctcctgcttcttcagcaaggagccgagtgatgatgcatcagcacctggcagtgttcctgtggcccagatccttcccacaagacctactgctcacccacatctaagccactccagctggacattcaatggacccgagagacagagaattagtcactctgccctctctgtcccttgcctcctccactacacctccccgctccctactattgactcatatatacttttttacatgaaataactaaaagaagaaaaaaatatagagcagatattagtaaaagaaatgttacttgatataccaaatggttagataatgaagactagaaactcagataatttataaaggttatgcttctgtttataagtgtgcagatcctacaatatttttccgtgtcactttctgtaaaatacctttagaaagaaaaacttgaagaatatgaatgtcttgagaaacatgagattaggcttaaggaaaatacttagaggtaatgaagaattgcaggacttggcattccacaacaaatggatgattttctgatttggacgtgactctcagatctctctgtctctgtctctgtctctgtctctcctctctctctctctctctctctctctctctctctctctctctctctctctctcgtcaaagtgagtggcatgtacttaaaaacctctatcttgtgtcttggaatgaatgttttcttcaatcatggccagagatcagagcctacccatgaaacagggcatatggatagaaagaaatgtctgttgtaaggcttgaagtaggacacagaaagggaaagattgcacaagcttcccggtagaccatggtcataggaaagacggtcctcggaggatgactcgcaagtgtactatttgttgttcatctgtgagggtcttcacctgtgtgttctagtgacaacttgactttactctgtaaagcctcaagttttgatattttaatggttgctccatcagttcctcttgtccagttctatatctttcactatgtgatgcctttgtgggatttatagactagggcttcaacttctcaggcacaagtatccaatgtcatgtccaatatacaagagatatgtttagagtgtttccaaaagtttggccaagacccctggaaaaagttataggaagactgatttccacttttgggaaaatatggaaatagaacatatgcaggtgggggttttcccagagatggggaatctctcatctccgaaaagtttcagatactagctgaagaactctgcagggaagaggttgttgactactgggtatatatgtatgggataataaaaggatgaccatttggtgttactgaaagtgcttttgccaaagagagggtggccagcggcaaagcatgaagttcttttctggctttgggattcacgagaactgatgcatgatcaagcaggagtcaccttagtgactaacttagtgaccctaagttttcatccttcacagactctaagattcagcagcaatctacactacaaaacccttaaatcctatagaggaaaccaagctgaggtaaaatagtggtgatctgcttctgtctatccagtcagcttgctccatggtctcttagaaacctgagagcttcttggttcagccttcagcatggctacaggacacagcagatgtataactctaagtcttgacattaatttcatagatcccattcgctcacagcacatttacctcctctcccatggcttttctaccattctcagcaagactaacttcgatcccagaggtaggagagaacattggattgggaactctggccctgtgctgcctcaagccaagtatgtcattttcccaagtcttgcttctctctgaatttgttttcttatctgtctcaaaggaaaaccgaatctatgatttaggaatctcttggagttttgctttgttttgtgcttgctggagaactagatttgtggttgatgtaggttcagttactgctcagacaattgtggccagtaatagtgatcccgagagacatcatttaagtaagagcaacacctgcattatatctcctttagagtgaccagtgctgcttcacgttatctcatttgatagttctagggccagacatgtttctttcacaactcttgactatatactcttcaggattctgcccccagttcactgtattcctttacaaatgaaatttccaggactttgctttatggaactaatctatcccagatggctatcaaatatgtatcttcatgtacaggcactttgtttttggtatgaagaaggttccaccttctggcactgaaacctttgtattacagacacaggtttagtttctagttacactagtagagtttagcagtacaggtctgagtagccaaccatggtagaaggtaaagacttactctgtagacaggtagctcaaatctaaactagggaaatgaaggtaggttttggaaaagaaagcagaaacagatgagaaactgtgggatcttgttatttccccaagtaactcgtgatcacgatatatgtgaaccatttatgtcaagatgtcctttagactatcatatttcaatttatacctttattgatgaatgcatacattaaccaggtccatttatgtttttattattggggatcatacccagaactcacatttgctaggcatgggtcctgtcattgatctatgttcaaatcttgatctggtgaccagataaatgtgtaaccatgtcacatatgtgacctggagtggaaatgagtgcccagaggagagcatgcattgttggagctgtggaaagattgtctgtgaacgctcaaaactgtaatacaaaagagggctgtatgcaagtatgtgagtagtgttttttttttttaagttgttacatgaatgtgtgtgtgtggctggaaggagaggatgggtagaaaataagaaagaaggcacagtgaaaagaggcaaggagaggttctggggaagatatggggtgaggcaagtcaaacgtggtagagaccgggttggctggaggccatgaagtcaatgctgatgcatgccaagagatctgagagaggttagaaaaagtgacttgggaagaatggagggtaggtaaaggagaaatgctgggtgaaggagactgtctttagtaaatcgatgtcaggtacaccgtaggcaatgcaagggatttttgtagagttgaggaaggacatggtcttcatggctatagaaacacgtggccaccagaaccattagggagtcacctattcatctcaggaagtgagtacagaacgcatttcactctcctgtgggttctagaccacatgtagggctggtgacaatgctgtctgcgcactggcctttggtgttccatgtgctgttggggcatgaaggtgtatgagcgtttggtagttaccaaatacactttcaataatgctcatccttccatggtctaaaatggccacagcaaacatggaaacaataggtgtaagttagacaatactaagtttcatctgatctttgacagaggggtgtgccatattggaaacatgttttccacacaggcaccccacaagaacagtgtgatgtgggcgtagaccatgtgttttaagtaaagaggaaatcagggggcgtgtcaggatgaagggaatgtgggaagatgttccgaagacatgcactagaaaacagaacggtgtctgttttcgtccagtactaaatgaaaagaattgcaatacattgcttattgcaatttttatcctaagttgaatccatgagcctggtgcttgcagcatagtttttttgttttgttttgaagcctatgtccttgggcactgtgtggggcaaggccctgatgttttggcaacatgcagattctggtctcctggaaaccttcatattctttcatattctagaaacagatgaatgtcattggcacttggtgaattaattagaatcctgagctaagagggaaggaagctgggtagtgacgaaggacttgagtaggctggcaggaaaggactggggagggaccatttagttgtcccgtgtttttcagaaatttctcattttgcaatgatctgagacttgaaagaagttacaaaagaatcagcaccttaccttggttctgttttccacacactgaaaatatttcagtctattttcatctatttggaccattttcaaaactaaaccctaggcccggcttggctttcaccagttttcctacattgtattcagttgctcactggatacttttagcctttgttggtttgtaatctggctttggtggcatacaggataaaggattctacctagatattactctacaaatgagagaaaacatcaaactgacaagctcttttatcagggaccagtactccagctgtttgctgaacccactttcgattacagctcatcattgctggacccagaacggccacagcgttacacgggagtcatatgtaatgatcagctctgctgtttggccacccaaacaatccaaggacaacttaagaaaagtaacaatataaaaggcttcaaagtggaagggaattgtaaacagaagaacgggacttttgttggtgaccagaggggtctatgataaagcggtactttggtcaagaattaagtggtactgaatggaggtagggatagtttgtggctagactatggcacaaatataaacccctaatgtgaggttaaaacactgtctttggaggaccagaggagcttcattcgcctaactgttcatccttaattgtaatatcagctgctaagctaaatgcaaacacatcagctccctggggaaaagttgaaactctcgtttcttggaccattactttgggtttcctgctagacatttttaagctgccttgcttaagggctacaggataacaactgtctgtggcttatgagattcctagcacacaaatgagtagtttgtgtatgttatatttttaatgaataaagagtggaaaaattatgtatcacatgtgttaatttggggagaagcgctttataacagagggcttactctcaaagagaacaaaggaaaacgtgttctacagacagtgtatacctttgacctctgaaaaaagctatatagtttctcctacagacaccttgccagtaaccttacaggtcttataggagagcagatccaagttgccaggctgatctgcaagcacaaacatttgtcaagggaaagcacaggtcgttactttcagtacaaaatggttctttgctatggatggattctcttcttcttgccccatgtcctgttcccaaggaccgacttcctgcagcactgtggtggactcttctatgaggagacaacatctgggccttattcaatagcctgtggtgggtaatgtgttttgtcaagagctaaacagcaaatggatttaatttctgcttaacatggtcatagtcattctgaaatggctacagaaatattctctgtactagaaaaaggaatggaacgtggtgccaattgtctattttcctttatttattccctgtaagtctgtcagatgataaattgtacataacagtgattaaagagtcatgctactgatacagtcttctttctgtctcagcagtaacagttctggcctttgttgtctttcctcctgacaccactggtggagtggtgatgtgacacagggaaagtgtgcacacggttatcagggatgtctgacagagagtcatgtgaaaaggcttctgttagatgtcagttgacagctaactaacatggcgatgtctctgacatagtagagaccttgtttcatatcttcatgttattgggccacttctgggaacctgagtttccagaattcttttgaaagccttcattgtcattactgtggagttgttttgttttgatatattttttttgaaggaacagaaacacttgctaaatccaaatatggtctgtctcaggcagctgttcacacaagcataaattaacaaaaactgtatacaactgggatccagatgcaaacttcccaatggagattagggaggaactatccccaacacattttactttcacttgcagaattctgagtaacaggagcacacttctcccagcaggtgtcctagtagaaaagagaatgggcatgaattctcaaagaataaacagtattcacgagtgcacttcctatctctgcaatgtccaggctttcaggaccgaagaccaggaatatacctgagcggtggaactggggtggaacaaaaagaaacaaggggactggggatgttcagagatctaattctgctgccaacacatactgccgaggcttaatggcagatatgagtgatggcttgcatctatgcacacacatacacaaacaacacagacaagttatccacatgtttcattatgtaggtcattattgaggatggaaattttgtctattcaatttttcattagcaacttgcatgggtctggttaagttgcagagaacaagaaaactattttgcgtttttttttttagggaagagcgttgaaaaatatgaacatgagaaactacacagccccaactggaagttattcattagtcctgtttgcaaattagaggccgtctattctgtgaatgtttctaagaaccaagaatagaactttgtactcagagcaaaagatatgtctctcatccttacctactgtcccctaaaaggaaaagcgatcacggtctgactttagggtagagatggatttattacaaggagcacaattaatgttgagttaactacacctgctcaactcatgccaaggcttgccagtgatagcttcactcactgtgcaccagactgttctggtacccaactgaagaaccccaggacaacacaaacccaagatgagtagtttggagtgaggtaaaaacaaaacaaaaccaaaccaaaacccaacactcacctatgaattaaaaaatattttcattgctcggggttgtgactctctatgacaaatgactttaaaaattaaacattttagattaatagtccagtccatcccttgtcggtcacagagccttggaagcagcaacttgagtagaacaaaaggaggaagagtcccagtttcccttactgggctgggctggaagtgatagaggactttctctgaagtcttctgggtttcatttaactcagagctggtcccacacctgttctcatctgaggctgtagtaaggctgaactcctctcggacccaggcagactcctgatgttgctttcatgcacagagttcatgctaataattgcacaagagaacttaaaaaaaaaaaaaacaactcaaaataaacgtcataatatgttaattaagtttacagttttctggtgggccattttcatgctaccctagggtgcagtgtggacacacctgtctgccacccaccccacccaccaggctctccaatttctttttaaaaagtgagctttgggagagccacacagttttctctgttcttttgctgccacttctgaactccagggtttaaaaaggatcatttgggtatggaatctcaagatctgggattttttttttcacttcaaggctttagaaaatttgttaagttactgtcttttaagaacagttgaaatgatcaaccagttttcttaagttttagcagtttgttggtatcattaatcaaaacatatagattaaagcccagaaaagacgttatcatttaggatcacggctatccctagtaattacagctttgaaagaggcataaagtttgttcaatcatatgagtattagtcctttcactcaatattaatcatctataagtagcgaaagctgggataacgattataacagctgcgcagggtatttttatgcgaattgaacttaattaaaaaaaagggggggagttttaatgtatgcatttgcccctccctgattacctagttctgctccctccaaagtactcatctgggatggcttggcaacaaaaaaaaaaaaaaaaaaaaaaagcgagagaacgagcgagcgagcaagcgcgcgcgcgcgcgagagaggcagagagagagagagaaaataaagctcattacagcgacctgagaggtctgaaggagatgacagtacgcattcctttagccttctgagattctctggtttcattccacattcagagcttgaaattgctaactgactcgtgattcgacataaatacaattcaatgaaatccaggttctctttcttaaagaccatgctttacacgtcctaagaagcaaacttggacttgggttcctgcaccgaagcctctcccagcagccttgtgaaacctccagctctgccgcccgcttgcttcactcagaacaaagcccccgccgcagactgggggcggcgactgcctggattggctataggacccttgtgtcacgtggctccgcccctcggcctatctcacctcacccggcctgggcgtggagagaagatgccgagtcgcgattggcgggcctaacgcgcggaccggatgacgcaggagaggtggagccgggccgagccttgattggtcgaggtgcgcgtggtcacggatcaaggttcaggctaagagcaccccggtgcagttctacttcggtgcagggcgtggaagatgcggaaggtggttttgatcaccggggcgagcaggtgagacctcctatggaaccccggagtctatgcggggggaagcgcaggtcggtgattcacttcgatggggtccgcagagaccccgttccctggctttccaagaggtgtggtcatgcctgcctcgcttggtgctcggtgcttggtggctggcgctttgaattaaacatgacagtggaaaggaaagctaaaccgccagtgactggtcagcctggcagtgatgctgaacagttgttctctagggaccgtcagtctccgagagtagttaattgtaggtgcccacagttcactttaaacctaaacactcggggtgtttaaatgtcagcatccatgaactttaggacaatgaggaaatttcactcctgcagcatgttttcatatactctttccaggaacctacagaacgaccagtctagcaactaaggcttatcctgatgcagatgccagcaaagttattccaggcttgcccatttgacccttgacctacttatcatttgttgatgaagaatgtgtggaggatggacccaaccaactcccctcctacccccaattggttacattgctattttttgaggaattaatacaggatttgttaaatgccacttaagcctgtttcagtgacccaatcacatctatattaactaaaccagtggaggggtctgtcttgggctttttgttagtgtgcgctctcctttaggtcagctgggttttggccgttctcgagtggaaagtgcctgtagaagtcagacctgaattggtgtgattttgatatactgtggtgtgtgcaacttatactaaagttggtatttaaagtaaggatgaataggccggtatctgcttggtactttgctggcagggccgccagattctgtggattccagactcactttggagctccctttgctggcagtctgcatgagaacttactgttacccagaatggcctcgctaccagcagtgggccccatctgctgcgaccttcatatcactctttgtgacccagtgcatctgaagcctcctagctctgctctttcctgcttctttgtcttcggctctatctgcttgctgattctgctttctgtctacttgtattgagggctttttttttttttaaactcttggctattctgctgtgacttagtagttgacagggatttaacttcaagctgtgctactgtgtattctcctgaaaacaaaacaaaacaaagcaaaaaaaaaaccccaaaaaacaaaaacccaaaccaaaacctcaccggttggttcacttactgcgatttacagttttcctaatagcaacagtaccaagaagtggtgagaacccttgcctttgcgggaccaaggcaccacaagaaaatggggacacggtaaacaactaatacggccccccttaaagtatttgctagagatatattaaatcacaccctaacaggtgctccaaccctcactcactgtgtcattgaaccatattagaggggaacaactggatgttgcttatcaacatggctaatcgggagattccttcttcacataatgtttgggtattttctatctgcttggatttctcattggagctcatattgacactgtcaagtttctgaaccagagagaactgccttcatttaacacca

SEQ ID NO: 86 - DNA, 3255 bp, Mus musculus
tctaagtggacttctcttggtgtgtcaggaaaagttcggaaaagcggcagagggcagagtttgaatcagggcggaagggcagggagctgggctcttcaagactcaggaccgaggcagatctcatgttttggggtctggatttgtgtcagcgagggaagaacaggcgccaataaccaaagaaggctgaagcgaggtacaggactccatagcagctgcaagtacaataaacagttttagcagagctggaaatgttggcaggcaagacaggccgatcgcagagtcgggctgctggagagagggaaatctacaagcaacctgacatttggtgctcgtgctctagagcattctaaggctcgctgcttgacttctaaagaagctgaaataattgaggaggagcggggaccctctgtttccaaggactctgttctgcagagaatgttctgcaccctctgatactccagatccaactccgtcttctgaaatgatcccgattcccagaatgcccctggtgctgctcctgctcttgctcatcctgggttctgcaaaagctcaggttaatccagccatatgccgctatcctctgggcatgtcaggaggccacattccagatgaggacatcacagcctcaagtcagtggtcagaatccacggctgccaaatatgggaggctggactctgaagaaggagatggagcctggtgtcctgagattccagtgcaacccgatgacctgaaggaatttctgcagattgacttgcgaaccctacactttatcactcttgtggggacccaggggcgccatgcagggggtcatggcattgaatttgcacccatgtacaagatcaactacagtcgggatggcagtcgctggatctcctggcgtaaccggcatgggaagcaggtgcttgatggaaacagtaacccttatgatgtattcctgaaggacttggagccacccatcgtcgccagatttgttcgccttatcccagtcactgaccactccatgaacgtgtgcatgagggttgagctttatggttgtgtctggctagatggcttggtatcctacaatgctccagctggacagcagtttgtactccctggaggctccatcatttatctgaatgattctgtctatgatggagctgttgggtacagcatgactgaagggctaggccagttgactgatggagtatccggcctggatgattttacccagacccatgaataccacgtgtggcctggctatgactacgtgggatggcggaacgaaagtgctaccaacggtttcattgagatcatgtttgaatttgaccgaatcaggaattttactaccatgaaggtccactgcaacaacatgtttgctaaaggtgtgaagatttttaaggaggtccagtgctactttcgctcggaagccagcgagtgggaacccactgctgtctactttcccctggtcctggacgatgtgaaccccagtgcccggtttgtcacggtgcccctccaccaccgaatggccagtgccatcaagtgccaataccattttgccgacacgtggatgatgttcagcgagatcactttccaatcagatgctgcaatgtataacaactctggagcccttcccacctctcctatggcacccaccacctatgatcccatgcttaaagttgatgatagcaacactcggatcctgattggttgcttggtggccatcatcttcatcctgctggctatcatcgtcatcatcctgtggaggcagttctggcagaagatgctagaaaaggcttcacggaggatgctggatgatgaaatgacagtcagcctttccctgcccagcgagtccagcatgttcaataacaaccgctcctcatcaccaagtgaacaggagtccaactctacttatgatcgaatcttcccccttcgccctgactaccaggagccatccagactgatccgaaagcttccagagtttgctccaggagaggaggagtcagggtgcagtggtgttgtgaagccggcccagcccaatggacctgagggcgtgccccactatgcagaagccgacatagtgaatctccagggagtgacaggtggcaacacctactgtgtgcctgctgtaaccatggatctgctatcggggaaagatgtggctgtggaagagttccccaggaaactgttggccttcaaggagaagctgggagaaggccagtttggggaggttcatctctgtgaagtggagggaatggaaaaattcaaaggcaaagattttgcactagatgtcagtgccaaccagcctgtcctggtggccgtgaaaatgctccgagcagatgccaacaagaatgccaggaatgattttcttaaggagatcaagatcatgtctcggctcaaggacccaaacatcatccgtctcttagctgtgtgcatcactgaggacccactctgcatgatcacggaatacatggaaaatggagatcttaatcagtttctttctcgccacgagcctctgagttcctgttctagtgatgccacagtcagttatgccaacctgaagtttatggcaacccagattgcctctggtatgaagtacctttcgtctctcaactttgtccaccgagatctggccacacgaaactgcttagtgggcaagaattacaccatcaagatagctgattttggcatgagcagaaacctgtacagtggtgattactaccggatccagggccgggcggtgctccccattcgctggatgtcctgggaaagcatcttgctgggcaaattcaccacggcaagtgatgtgtgggcctttggggtgactctgtgggagaccttcaccttttgccaggagcagccctattcccagctgtcggatgagcaggttatcgagaacactggagagttcttccgagaccaagggaggcagatctatctccctcaaccagccctttgccccgactctgtgtataagctgatgctcagctgctggagaagagaaaccaagcaccggccatccttccaggaaatacacctcctgcttcttcagcaaggagccgagtgatgatgcatcagcacctggcagtgttcctgtggcccagatccttcccacaagacctactgctcacccacatctaagccactccagctggacattcaatggacccgagagacagagaattagtcactctgccctctctgtcccttgcctcctccactacacctccccgctccctactattgactcatatatacttttttacatgaaataac

SEQ ID NO: 87 - protein, 886 aa, Mus musculus
LRRSGDPLFPRTLFCRECSAPSDTPDPTPSSEMIPIPRMPLVLLLLLLILGSAKAQVNPAICRYPLGMSGGHIPDEDITASSQWSESTAAKYGRLDSEEGDGAWCPEIPVQPDDLKEFLQIDLRTLHFITLVGTQGRHAGGHGIEFAPMYKINYSRDGSRWISWRNRHGKQVLDGNSNPYDVFLKDLEPPIVARFVRLIPVTDHSMNVCMRVELYGCVWLDGLVSYNAPAGQQFVLPGGSIIYLNDSVYDGAVGYSMTEGLGQLTDGVSGLDDFTQTHEYHVWPGYDYVGWRNESATNGFIEIMFEFDRIRNFTTMKVHCNNMFAKGVKIFKEVQCYFRSEASEWEPTAVYFPLVLDDVNPSARFVTVPLHHRMASAIKCQYHFADTWMMFSEITFQSDAAMYNNSGALPTSPMAPTTYDPMLKVDDSNTRILIGCLVAIIFILLAIIVIILWRQFWQKMLEKASRRMLDDEMTVSLSLPSESSMFNNNRSSSPSEQESNSTYDRIFPLRPDYQEPSRLIRKLPEFAPGEEESGCSGVVKPAQPNGPEGVPHYAEADIVNLQGVTGGNTYCVPAVTMDLLSGKDVAVEEFPRKLLAFKEKLGEGQFGEVHLCEVEGMEKFKGKDFALDVSANQPVLVAVKMLRADANKNARNDFLKEIKIMSRLKDPNIIRLLAVCITEDPLCMITEYMENGDLNQFLSRHEPLSSCSSDATVSYANLKFMATQIASGMKYLSSLNFVHRDLATRNCLVGKNYTIKIADFGMSRNLYSGDYYRIQGRAVLPIRWMSWESILLGKFTTASDVWAFGVTLWETFTFCQEQPYSQLSDEQVIENTGEFFRDQGRQIYLPQPALCPDSVYKLMLSCWRRETKHRPSFQEIHLLLLQQGAE

SEQ ID NO: 88 - DNA, 168198 bp, Homo sapiens
  misc_feature (1)...(168198): n = A,T,C or G
taggaccagactggcccttagtttgggttcttccatccctgggagtctcagttactggcataaggttggccctccctgatcactgctggaattttaggccacacgagcaccatgtttctcctccagccatcatgtctcaccctccagtggcagaggtagatcagggtgaatgatgtctggaactctccattcctcaatgtaaaaatcatattctctctacccatggaggaataacttttttggaggacaaggatcaaagctcattgctaccctacccttagtctgggctgggaattttttgaaggatggatgccgtgttgcctgtcaagacccaaagtccctatcccctctacatcctgatgtcccactgtttccatcctgccacttacatgcctccacttcatcctttagcaatttatctttctctactgtgagatttagacacctcctgctgcattagctacagttccttcagcttattggagtaagaactgctgaaagagctgggcacccatggtccactgcatttccccacttggttctttttattcttcctcccacaatggccctgagaactcaacgagcttttgtgttcatatttccccagtcgactcctaaaggtgacttccagggcaggcaagggatattctctctagtctccttctgtcttctttgtttaggacgctgacatttccagccttctcaggtaggttttatctcaggtattcattcattcattccacatttaacaaatattttataaatccctactatatgctaagaacagttgtagacacttggagatatgctagtaaacaatataatagtgcttaccttctagggggtataaataaataaactatatagtttttttttctttgagacaggatcttgctctgttgcctaggctggagtgcagtggtgtgatcatagctcattgcagcctcaaacttctgggctaaagcgaccctcctcccttcacctcctgaatagctaggactataagcatgttcccccatgtggccttttttttttttttttttttgatagagacaaagtctgtgttgcccaggctggtctcaaactcctggcctcaaggtatcctcccacctcagccttccaaagtgttgggattattggcgtgagccaccatgcctggcctgcagtgtgttaataagctctaacatgaaacaaaagatgagaaagggggatagaaaatggtaatggagataaaatactagaaagggacaccagatttcactggtaaggtcctttaggaaggaagggaacaatgtaggtggctacatggggaagagtagcccatgtagagggggcagcaagtgccaaggccctggggttggttgtccgatctgaggaggtgtattggcataatctgattagtaggagcaggttggagctgcctgaatagggctatagtttagaaataccctgtagagaggaagtggtgcctggtatactgtaccaggtacggcaactgaaagaagatttagttggcattgcaaagcctggaatctaaggagagaggacacatataggtggcaatctgtgccagaggtcagtaatgggtggagagaatgtatttaatgagtggatagcaagagtggtgggaatttgcctattgtcggctctaaatattctatgctgtgctctgtgatgtcagatctgaggctctgcaaactgcagtcagagattcctttaccaataggcttcctcttaggttctgtcaagaggaggcagaagatgaagactgaaagtcaggaggaggagagaagagagtaattttctatttcttgatatcaatgtcattgctccagaagtggcactttgccccagcagtggcatttcatatcactgtggcagtttattatggcttccagcttctttccgcattcccagaaccagcctcaacttccttcctcaatggtaccagcaccgttcaatgttatgaaccatctcaaaggtcagagccctagcttcacggtgcccacttcttctagtgcctaagttctgatagccccaaccctcaccttttcatcccccagccttgggatggtaattgctttctgctttatgcagttattaaatttccgctcagtcagctctccaacacctgtgtgatcaatcaattccttattaaatccatgctcttgaaatacctaatatggtgtctactttcctgaccggatcttgactctgtctacttgttgaccaagtacttgcctggatttctgagtaatacctccctgtggattccgtgctctgggctctactcctacatcaaagagttactgggaatgccaacatgcgtctctgagtggtttccttgtctgtcataattggaataacaatacccatcttctattctggtagcagtgttagttaatttactagaaaaggcacctgtacagagacctgaaaagggcatgacttcaaatcacagaagcctgtttgatgcagtttaagcagcaaatgggaacacagtatatggacactagtgtcatatggaatccaagagcaggaagagcatctcgaccttgggaagagcttgcaactgagaactcgaaaactgccaggagtctaacttgcctttgcttttttctgcacattgacttcattcttttttccctgctggccaggtctataggggagggagcagtaccaaggtcactgtagactgagaagacctacaaacacctactctcctgggcctcagtaatgccaatgaaacttggaattggggtccagatgagatgtaggtctttaatcccaaatggactagctgctactgaacagatccccctatctcaggcttagattgattctaaggaggtggggagggatgagactgagtctgcagatgaggatccaggggtctcggttgcaggaagtgagagagatgcagactcaggacccatctctccattcacttctgccagttctctcaagtgtattccagatttctcgtgaaaaagaaaaaaattctacctccaatcttcattctgttgaagaaactggggctccccatgggctaagcaaagaatgaaagatttcagggcttgatctgtgttctcagagattactgacatcccatagggtgatcttgtctagattccatccccctcaaaccactcccctgacccctgattggttttggggtgctttgcctatttattttttctatttgttttattcacctcaaatctcttaaatgtttaaaatgaaaacagtttatgcacctgtgttcttctctgggacatggaggaccttaaagaacacagattccatccataagataaacatctgagccttcccagaaacagacaaggattacagagaatcagaatctggtctttatctcgaaaggcaatttgagtgctgctggacattgcaaactggaattgtacatggaaaaataacattggtgctataaattcctttctgctttgaaatatgttgtgtgttagaaacagagaggtaatgtttatggtgtaactcagaatactgggatagagttatgcattaagagtgggacgataggacattatgcaaacagagtccctaaagagagatgttttagtgggtaaaataatttttaagaattatttagatactccctaccaataagtactcacagatattaacctcccagacttccactgtcctccagagatcgatgggaaaagaggaatgaatcactaaaaataaagctcaataactaaaagagctttatcctccaaacttcttggatcagtacagtcagtggggactatgttgattctctcatggatgctggaaagactccagcctggaagcaaggcagctgagagtctttaagtttcataagaagggttattattaagtataagatgattcctgaaaactgggcctgagcatggaaaagtaacactgcttctccaagttcactctgcttggacacaggggtgcaagaggtgctgggagatggttcagctagccgagggttgtttccacagagtacagacaaggatagggttcaaatggcagtggggagattcaggatacataaagcagaacttttgacactgagtgttgataaacactgaggactgtcgagagatcctgttttctggagatgcttaaaagaaggttgctatcttatctgacagggatggtttagggtgccggactgtagcctggagaagggtttgtatccttgatcattatataaaataagtcatttaaaaaactttttgtagcctcactctcttcaaggaagctaaagctgagttacaattctgagatttctgtgtctatttcttcacctctcatcttagaatttctgccgaggcaagtaattgctattctttctctacaatgaaaaagaaaatgaaagaacagcaaagcaggcagggagaccagataacctcgtgctccagaattgagtgtaaattaagagtctagaggctctgaggtttgttattgatgccaaatgggcaggaggagcactgagaatcacaagaactggattcaaactcagattctgttacttaacagcaaaaaacctcaactaagttaccaagtccctgagcttcattttccttcccttgaagtgaggatattaatatctgcactgagtacatattggggctgtctgaggatcagatgaagtcatgtctgtgaaagcactccttgaactgtgaaatattgtatgtggcattgttagaaacagacaaataagaatcttattttggccattaaccttaactttctcttaacttttccgttcatccgtgggagagtcaccagatggactgatttgaattttccttttttgatttctcatctctctctctggtggacgtgctaaggggtaggaacataatcattgatgggcttcaggagggcaaaggatggggaaaaaaaggacatcgatgattttccatatggataacaagacttcaaactctgaaaaactaagaattaactatttcctaactgctctgaaatttttcctgtacactacagaaacacacagcatattattgtcacacagacacacattttgttgtcacacatacacacacgtgttctagctctggcaggtatgatcttgggcaaattaacttctctgtgcattggttttctcatatggccattgggaaaataatagtacccatcccataaaattcttgtgagtgttaaatgaaataataaatgtggaattcttataacagtgtctggtatacagtgtcagaagttttatatgtcaaaagttctgctttatatatcctgaatctcccctcctgctaattgtactcaataaattattatttctggatcttatttgatcttcacaaccctgtgaattttcagttcatattgtcccccattttacaattagaaacgtgaatgacttgttcaaggtgactctgccccctaggggtttgtaattggatcactttccatgaaagtgtccaacaggagaacagcacctagtagtgtgcagggttaggacccagaagataaagtgaacactctcttagagttaaaattatctttgaaagacctttaaatcacttacagtatacatacttctgtggatatgacttcataggataattcttaaggacactaaaattcgagaatcgtggggtaaattcaggaagacactaaaagcaagtctatatgcagctgtctgaacattcagactattttgctttttagaaaactaaggtgtttctattgtctacaagagttcctccacactgatttttaaagactattaagcctttatgccttaatatatgtcaatggatttgtctattatggatagaacaaccaggaacagggagtcttaagaattaggttctaaaattggaggccgggcgcggtggctcatgcttgtaatcctagcactgtgggaggctgaggcgggtggatcacttgaggtcagcggtttgagagcagcctggccagcatggtgaaacaccgtctctactaaaaatacaaaaatttgctgggcgtggtggtgtgcacctgtaatcccagctactcaggaggctgaggcaggagaatctcttgaacctgggaggcagaggttgctgtgagccaagaacgtgccattgcactccagcctgggcgacaagagcgaaactgtctcaaaaataaataaataaataaataaaaataaaagaaaaaagaaaaagaattaggttctaaaattggtgcttaagttaaatgtgtgcagaatataactccaaagtacacaatattctctgcttttgtgttagtaaggcataatttctttaaaatccagggattgccatgcttgtctaattattggtgtaacagacaattttggggtgtcttctaatgtatgacatcccttttctgagaattgattcatgtatgcgtatgagctcttggagccatattcatattatatgatccattgccctctacagtttagagatagaggatgcacataagaaacacatttgaccagtaaaattctccatcccagcattctagaactggactcccataatatctgtcattctctcatgatcgtttgaagcaaggagagataaatttgagaactaaggcactgttacaggcgcctgctataaccagctataatattatgcgaaaataagcagaaaaggctggtttactgaaagagaatgggctaaagcaaaatgagcagcggtaagcagaggagagagacaagaaatgaatgagagagagaagaaataagagaatgagaggagaagaaaagaggagaggaaagaagagaagagaggaggaaaggagaagagaagacaggacaggacaggagagaagaaaaacctgttgactaagttactggtggtggctaatttgtggcttaaattccttgtgaagttaaatgtaccacatgggtttggtttgtgtgaatatccatgtatccttttaaggtatgtgtgtgtttctcaaactaagttaagttaattcattttactttcatccttcattttatgtcctgaggcatcacaaaagcatccagctcatagctatttagagacagaaatattatagttatttcaatgctcaacttttgtatttacttgaaccttggtttgtagactagaaaaggtcttgaaaagtcatcttgcacatcttacttctaattaacactgcatcttgaccattccggatagatctgtcctatttttgtaaaatcccagtaatggaattctatattgtttttcagtcatttgttttcagtgtaaaacagtcctcataacaaaaatacattacttcctatggaacagaaataattctgaatgcagtgactcacatttcccaagccagaccaaccagggggtaaaatctgttcacagaagagtaataaaatggtatttctccacatctgttcctgcaatattaggaattccagtcttactcaaaactctaccaaatagctctgagagttcccaggacatttcttctgtgtgttccatgggttagtcccgtcagctttgaagttagcatttgccattttcttactttccagctctggcttcctacagcagtggctggtgtcaaggctgaacactggttgtcactcaatcagagttgtctctgaaaactgaggcttcaatctaatgaatcctcctcatgctttaaatatccctgaagtattttagtaaaatatcactttcagcttttccttgctcttttctttgtagaaccttcttcctagagttcaagattagaccccagctttggctgagaatagcctgagtgatggagatggtgttttgagtgattgatagacatgctattttcctttgagctactccttactgttgacgtagctcagtttttcttgggacttttatcccttggtcctttctgtgttcagtgagttcttccccagaagtgtcctggtctatatacaaatagactcttgactgcctagtccgcctcagacaaacccaggtgtgtctgggttttgcagtctacatcactggctcagtcctggctcaattaagactacaacttgagttctaattatacatacacagagaaaaaacaatctcacctatggagtagaaccaccttaaaatgaaaaaggaaaacacatacctatatgtacaggccctgtcctttatcaggctcagtctggttttatgaagttgttactgttttccacatttgacctatagtatcaccaaatctgtgaaatcacagattgtatttttggtacattctttatagtaatgccaaagaggtgaactactacaggcatggacatttgaggaggatttctagttgtctctggcaagcacccagtaaagtgcctgataagagcccaacacatatttattgagttgagctgcatgtctggcctgagtcaccctcaggcctgacttcagatgctgtaagttatttgaagagtcttcttaataagttgatctctgcagtgtcttttctcttcataaactaaccctagttctagttttttctctaaggtcttgcttgctgcctttaatcatttccatggctgccctctgaaccattcccatgttctccgtgtccttttctgtaacagctgtgaggcacagatgttaacggctgctttctgaccctcagactggtgctgagcttatgagacttttagggacttaacactgactcaacactagctctcagtttcatggccaccctcattgtgtgtgtgtgtgtgtgtgtgtgtgtgtgtgtgtgtgtgtgcgcttttccattccccttatgaaacatctcctgcccctaacttactatgggaacgttcctccatgatctctttccatcctccctttcctgtttgctcacttcttttcttgctcatcttggagactgtgcaatcccagattaactacaaacagagaagagctggtgatagctccagagctcagagaaaggaggtctctttacaagaagtctggctctcaaaggtaagctcggtcttcttgacctgccttttgccatctacctctctctttggatctcctgcccctgggtccctgcttgccctgcattctccatactcacggagaatcaggacctccagaacagcccagcgtgggcttggtcaggaatgatccaggctctgaagggttaaggctggagcctggatggatggagagggttattagttatcgtttggagagtggagtgaaggctcctcccctgttgcctacccgcccctttcacatgatctctgactatagctgtggaagcggggagaagataaaggagggaaaaaaaagttcacaaaataatttagaaagtccttataaatgcttgtgttttcatttagcagcatgaatccaggacagcaacagaccctcagaggcagcagccaactgggaattgagtggaaaaaaataggaatcctggattctggcagtttccagttgttttcttggtggggggagccgtggtgggaagggattaaatcaaatctttcgggggagagctcagctctaggctttcatggtcaaaatactaaaggtcagctccgcgtgtgtgccccaactgtcctggaagcttcaattggaaaactccaaactttaagttttgcttatagcttcagctcaagtaagaaaaatgaggtgtggggtaggcggcgggggggtggggatcacaggaaggggatcaagtcttagatggaggggaaggaagtggagatggatatgggtgggaataaggcagaagggagcggtgtctttaagtctgtcctatggttatacatattttttcttctatgaatgggttttgctgtaaattatagctttgcccatagtcccttgggtcaaaagaaatagtctccaaacagaaaacagctctgattggtgactttccttcttccctccccaacccccttcctaattgaaaccaaatgtgcaatatattggatgctgggatccctggcgctttcccaggaatcctcagaatgtgaggtttctctcaaaggcatcttgcatcagcctgtggatgtatgcctaccaccgggctccttcaccagcaaagtggaaaaagaagcgtttcacaacaaattcttctttttgggttggggaaacgcagtggattatagctctgttttcttctttccaaaactgtgcacccctggatgaaagtaagttatgtgggtcttttttctttattattttttcttttttgaaaatgaaagctccgcatatacttcttttggtgtttcaggaaaagttttaaaaaggaaacagaagggcgttttaagtcagacaaggaagggaacgtaatgaggcaccacagactcgagaaatcagatcccatgtttttgggggtctggatttatgctatgaagggaagaataaagagcagtaataaccaaagaagcctgaagcaaaataaatgaatctatagcagctgcaagatacaataaacagtgttagcagagttgaaattgttggcaggcaagacaggccgattgcagagttagtttcaggatgaagaaggcagagcaggagagctaagtttttagacatttagtagtggtgttagaaggtcctgagttttggagatagtgtagaccaagcactttttgtttttcaggggagttgctgatttacttgtgagaagggtaactttggatgaggggtggcttccccctgagatttggggtggctagggggaggctgggtgcatggaagatttttcagttgtgacagtgaaatacagcttcccagactcatctcctcgctggctctgggtgcctttccctttgttatggaatgactggggctgttttcatttgggacctctgagtcctggcctaggttcaagagtcccatccaaagggaaagagaactgttcccagtggctgaaactctcagaccagccatttgaggcaagagttcgtactgttcaagccagtagggggttcagcaccattttgccgatcattggcttcctacaacacagagttaagagtcctgaaaagggccttaggcctctcatctaaccccttcgctccacagatgtaaaaaatgataggaaggggaccgacctgttcaagtcccacagcacatctgtagtggagctgaaaatgaaattgagattctctctactgctagtccagtgttctttccactccatacctctgctttcatttcctttttaaggcttattctggctgagacaatagaggcagtatgatgagcaagtcaccacaaggacgttaattatcagtaatagagaggacgccaatggcggctcatcagctaatgatgtctatggttatatttgtgtgtgtgtgtaaaataaaaagaagctaaattctgagtattttctatgcagcaggctcaaaataatacataattcatgctcagagctcttcatacataatttgattgactctcacagctatgtaaggcattatttctatcgtacatgtaaggacattaatgcttagagaagcgaaatgagttgctcaaggaaaggtagctaatacatttgaaactcatgtatatctgactctaaaacctatgcttggaatcactattcaatgatactcccctcatctcccttgcatttggttacttttggggtcaaattccatatttcactggctgatcaggaggtgaaggtgtcaggctatgggagcagtatggattctctctcagaggccacttctgcacttggctgaacatttgtctggatatcagatgtggggttgatttctgggtctttggtatatacttacctttgttatgcaaagagcctgggacttagagtcagaagattcaggataagttctggctctaccttttactacttagcaaagttgctttgcctttctgcaccttgacttctgtatttattatatgggaacaattgcagtacctttcagtgtgattgctgcaagaggtattggacatgcatgcatgctgaaggctatcaagggcttacccatatcagctctttcgattaggatcggtaaacacagaacgtcatatgaggcagcccctgtggtgctgggtctggcagttggtgctgatgctggcaggagggcagatggatttggatgtgtgtgaaactctgaaatgggtggcctcagtcttagtgcccatctcctttgaatggaagcaggccttcctccctcccgggggaatattcctgagggctctgtcttaaattctgtctcttaaattctcctccactggcctggtttgatatgattccttgcccaaagcagtgcaggctgaaggacactgtgcttggtgaagcatcccctgtctctgaaaaggaagtgtttagtcaggaccagtcccctgattgctcctcagacaagactgacatttgaggagcttcgtatctagctgagggcagatccttgacccaggaccttcttgtcactggcaggcacatctcccttcatcctttccctggcattccctattctgtgcctgcagtcagaagggaggctgctgctcctggggtgggggtggagagccagcctgcagtggggaggcctcagcctctgtttctgggtaagatccatttgctttagaaaccttaaatgtaagggaagtgggtaaggtgtttccggaatgcctttcacttagattcctcaacagagtctccatgtccaagcacaggaccttatcacctgcttattctcccctagccactctgtgaactcgcacttttctttccttcttgtataattgctccccagtcttgaagtcatctgaattctctatcacacacagtgaatttacttcaaacctttccatgtatttgcatttttaatagacacatgaaaaaattggagcggccacccccccatacattcatgtcacaccattttcaattcgcatgagctctcagatatccttcccaagctcccttacaagatctgctttcaggcacttcacatcaccctcacctcaaacacacaatccaaacacatgtctcgcaggcatccaaaaagcaaacacacgtctaaaagtggacctccacagacatgctaacattcttgtgccagctcacataaatggtgacctgtccgcaacacagacacactggactctttatacctcttgccctgtttgaagctgtgcaacatatgaattgatcgactctgtcccaacaatgactagtcagtccagaaatgtgtccagcatccccaggcatcccagggcttctctgaatgcagcaaccatccataatgaggactgttcaccaggaaattagaaaccccaggtagaccttaaaagattttcagaccaatcaaatcagaatatctgaggttggagattgggaatcagtactttgaactgctccccaggtgattctgatgtgaaacagaattaagtacctctgctgataaatctccaactgtgttgtctttggcaattcaattttattccatttgatttagttctattcatcaaagatttagtaacactgtgctaataacatagtttagtaaagaagctgagatgtccagatacctgtcaaggatatttattggaacatcaatcacctcgtgtctaaagtgatgatctctgtaaatttttctctcttttaattatatttgtatatgtttaaatgtgctattattaagcctgcattattcatgtacgatttggctaaaaatggttctcttattttctaattgttttgcatagatatatttgatgtttcctaattttataaaccccagcatttggcaaattgtgtacttattagctggaatcttactttggctttgaaatgctgaagaaggtcagttttgagccagcccaagagttgctaaggcctggaagggcaatgcaaaggtagaggaattctaaacatgggtttggactcactacacagctcctgagtttagctgggcttctcctggaaattggatattgtctgtaatggatccactcattaagtcgtctgtggcttgtgatttgtgcctaaaagaaccccacaaaaatctgtgaggggccctttggatctatagctccgaggttagtgctggctggtgctctgtagtgtgagtgagagggagagggcatgtgataaatagaacttcagatgcgtgatgtagtgaaaagaacatgtagtgaggctctagtcccaccaccatcattttctagggtttcgacctcagaggagttttttaacttcattggtcctcaatttccccttgagtttttatccccttcatttgagtttagataagataatgtataggaaactggaaagcactgtacctgtgaagatggtaggtaatgcaagataatccttagggccttaatagcttaggtagccaaaataattgagatgggagatggattaaaaatgagggcaaataatctagcatttttgcattttttccttttaaaatttgaatgctcttatgaatccaaaaaaacatgaaacaatacaaatctcagtgaactctcacgtctaagatagttttccactgattttatttttctcttgaatagtggtgatttaaaaaaaaatcgcaggtatattttttatctattaaaaatatcatagcatcctggtaaactctgtcataattttgttttgctgtatttatttatttactcctcagtaagtagttattggatgcctagtctctgctggacactgttctatgttttatgatgaacaaaccccatgaagttacaagcatttataagcattcattgctttaggttctagggagtataatatgaatttgactgtgtgaaacttgatttagaaaattggtatccacattgggttaataaaatttagtttttaaagtttactgaactgtaatttaaaaataatacagaaatagttattaaatggtgattttcagtggagcaggtgttatgccataaataggaccccaaattttatattttttataatttttaaaaattatagagcaactttagctttacagaaaaactgagaacaaaatgcagagttctcatgaattccttctaccctttgcacaatttctctattattacaaccttgtattagtattatgttttatttgctatcagttactcaatgtgtatttattaaacataacaaaataataaataaatttattatttatgccctatttgttattatgaaaagaatacatcatattgctgcctctcaagctgtttataatgttatgtagctacagtttgaggtttctcatttattagaaaaattttttttctgtgcacttagtgcatgccttattcagtgctagggcttaacacattatctggacatagtagacatttaataaaatatctgctgagtatacagacaaatgaaatgaaggatccagaagtaaaagacgcaattcttgtccttaggaacttaggaaacaacagacacacatagcagtgactggagaaaatttcagaaatacataaaatatgattaaatctctgataaaggagacattggtataggcaaatgaggcataaagccattaccaagagccccatcctctttttcctcctttttgggactgtacttttttttaattttttttatttgtttgagacggagtctcactctgtcacccaggctggagtgcaatggtgcgatcttggctcactgcaccctctgcctcctgggttcaagtgattctcctgcctcagcctcctgagtagctgggattacagacacccgccaccaagcccagcaaatttttgtatttttagtagagttggggtttcaccaggttggccaggctggtctcaaactcctgacctcaggtgatccacctgcctcggcctcccaaagtgttgggattacaggcatgagccactgcgcccggcctgggactgtacttcttatcatcaccattgtctttgttgccatggtcttcattattatcatcataattatggctatcgttctatgtctaaatccaagcattaaagaacaaactcccatatccccatggtaaggttggagaagtgcgtgcaagtgtgtctatgtgtgtttttggcaattttaaagtacagtcacaccaatatatgccacttccatttcttgctggaagtaaaatgagtgactacttgggctttgtaaaagaaaatcgcactttggaagtccttgtgggagccataccaaaatgccttgcagtactgtaacttctcagaggcatgtaaaagttagaggattggtgaagttttcaaaagctactggcacttgtccttcaggatgaaccctcttgagatgcaggggagcaaattgacctcaataagagagtagtgggagctaaattcactcaagaatagcaatctgttcctcagacagatgcagttgtaattttagaatgtgtacataacagacagtttaaaatggacataataacgctaaaatagtatcaatggaaattaaaaataagtcctaatcccaaccaaaattctagcaagttgttttgtggatatcaacgaactgattctttttttttttcttttttctttttctatctttgagacggagtcttgctctgttgcccagactggagtgcagtggcgcaatctcggctcagtgcaacctccacctcccaggtccaagtgattctcctgtctcagcctcctgagtagctgggattacagacatgcaccaccatgactggcctcaaccagctgattctaaagtttatatagacagttaaaagaccagattagctactgcaatattgaatgagaacaaagtcaaaggactgacagtacctgacttcaaggcttactgtaaagctctggtaatcaatacattgtggtactggtgaaaaaataaacaaatagatcaagaaaacagaatagagagcccagatagacccatataatgtagccaactgttctttgacaaaggagcaaaggcaatctgatggagaaaaggtagtattttcaacaaatggtgctggaacaattggacatccacatgcaaaaataatgaatcttaggtataaaccttacatccttcacaaaagcaactcaaagtggatcatagaccaaaatgtaaatgcaaaacaatgaaactcatagaaaataacataggaaaaaatctcagtaatcttggatattgtgatgactttttagttacagcaccaaaggcactatctgtgaaagaaatccctgattagctggacttcattaaaattgtaaacttccactctgtgaaagacaatgtcaagagaatgagaatacaaaccacaggttgagaaaaatacagatggtgctgacttaaaacggttcaacttacgatttttcaactttacgacagtgcaaaagtgatactcattcagtagaaatagtacttcgaattctgaatttcattggacaaaactatggaaacagtaaaaactattcgtagttgccaggaattaggggtgagggagggataaattgaacacagaggatttttagggtagtgaaactgttctgtggttactacaatggtggatgtatgtcattatacctttgtcaaaacccatagaatgtacaacactgagagtgaaccctaagacaaacaatgtactttgggtgaaatgatttttttttttttttgagatgaagtcttgctctgtcgcccaggctggagtgcagtggtgtgatctcggctcactgcaacctctgcctcctgggttcaagcgattttcctgcctcagcctcctgagtagctgggattacaggcgtgtgctatcacgcccaactaatttttgtatttttagtacagacagggtttcaccatgttggccaggctggtttcgaactcctgacctcatgatctgcccccctcagcctcccaacgtgctgggattgcaagtgtgagccaccgcgcccagctgaaaatgatgtgttgatatcacagaccattaggtttattgataggcttattgattgtaataaatgtgccaatgtcgtgagggatgtcaatagtgagggaggttttgtagcagaggacaagggtgtatatgggaacaatctgtactttctgcttaattttgctgtgaacctacaactgctttaaaaagaattaaagtttaatttaaaaaatctgcccaatctccaaattctaatactttgattccatcttggctacttctttcttatttgaaggcagtcattgtaatatagttataatcatgagcatctgtattttaaaatgcttaattttgtttttcagataagtaccctaaacttaaatgatattattttatttattaaagctacctgaggcagaaatgtttcaaaatcttgaaaaagactaattcaataggttaatagcagataagtaggtatttttgtgtcatactcttcaaattataataactatcacttaaagaatagtcatttttgttcgtttgtgatccttccacctcagcccctcgactagctgggactatatgtgcgtactaccacacctggctaactgttgttttttgtagagatgaggtttcactatgttcttcaggcaggtctcaaactcctgggctcaagcaatcctcccaccttggcttctcaaaatgctagtattacaaacatgagccactggacccaccctcattgagctgttttaactacaacttggtatggtagaaagagtgatgggccaagggttaatagggtgagattctaattttaactttgccacctacaagcagtgggactttgtgcaacaatgttttaaatctttctgcatttaaatttttctcatctgtaaagggcaatatacaatttctgtattctccagttcagttatgctaatcgctgtcctgtcagcacccacatccccatattcactttcacagataagacttgagtcgctatgatcttcaccctagttgtcaccctgtccccatactctctgaatatgctcctctctcctctcattttagccaaataccactcttctttgaaggccagcttaagtttcagatcctccatccatcccagatcttcttggaatccctagttcttttggtcagtatcacttagtttagcaaagaccatgtcttaggtgattgctctaactcaccttatagcattaacccataagtgagtacttactgaactctcactgtatattagattaagggcttattttatatgcctggcacagttcttatttgttgttggaaaaatttttagagggcagtaattgaaatgtcatatactatagtctttgaggatggaaaagagctcagtaagtttctattaattggttatgccgttaagatcagcatctaaagagagctaggtcatggaaaaaatggcctaagtactggacttactatcagaagtactggacttaaattttaattcttatgatttgtgaacattgtagaaatatactaatgtctttgtgagtacagataaggaggaacagataagcttatgtgaaaactcggtttgtattgggtctatattatatacagggctattttattttatttatatttatttatttatttttgagacagagtctctccctgtcgcccaggctagagtgcagtggcgggatctcggatcactgcaacctctgcctcctgggttcaagccattctccatcctcctgcctcagcctccgaagtagctgggattacaggcacccacaccacgcccagctaatttttgtatttttagtagagacagggtttcaccatgttggccaggctggtcttgaactcctgacctcaggtgatccacccgccatggcttcccaaagtgttgggattacaggcgtaagccaccatgcctggcctattttatttatttatctatctatctattttttgaggtggaatttcgctcttgtttcccaggctggagtgcaatggcgccatcctggctcaccacaacctccacctcccaggttcaagcgattgtcctgcctcagcctcccgagtagctgggattacaggcatgcgtcaccatgcccggctaattttctgtgttttttttttttttttctttcagtagagatggggtttcttcatgttgattaggctggtcttgaattctcgacctcaggtgatctacccgcctcagcctcccaaaatgctgggattacaggcgtgagccaccgtgcctggcctgttttattttattttaacaacaaatagaaggtggttattccaggagggtttcagaatactaccccagatttggtttctcctggtttgactacaggcagtgctggtgtctttctcttgatcatactcctttcctcatgggtgtgttcagtcctctgatgatagaagtgcttacctttatttaacctttccctctctcactgagtgttctctctttcctgaaatacttttcatttgttaaagcttttaagaaattcttatttgaacattcagtgttatgtaaaaaacaaattaactgctgcttaatatcatgtttggaggtgaaaaattttctaagccttttgcttagccatttattaccaaaggggtatcaagcttggatgtcaagctaggatgtaaattctagacctatacaattccttcaagggcggctgaaaagttgctttctaatccttttgctatattttggtggcaagctttgttttcacagtttaaagaggattgatggttttcctattgtctttccttcacaactttctgaagttcacttgcctgtttcattttcatgacttaaggtaccagcttcttctgcccctctcctagatccaccagcgccccccatgctccagaaaaattgagctacactgtgcctttccctgagctgtagaaagttccacctctaggtttccaggtgcttctgatcatcatttttcaatggattgagttgccaacatctacaaaatatattctaacaaagatgctcagaatgtctggtgttgacctatctatacaggtaaacttcaatgactctgcatttccctttcactgctgacctcatgccttttgcagaagtaatataggaaagaagagcattgaaatagggcagaagatctaattttctttttctttcttgagatggagtctcgctctgtcacccaggctggagtgcagaggctcggtcttggctcactgtaactccgcctccccggctcaggtgattctcctgcctcagccttccgagtagctgggattacaggcacccaccaccatgcccagctaatttttgtatttttagtagagacgaagctttgccctgttggccagtctggtctcgaactcctgacctcaggtgatccacctgcctcggcctcccaaagtgctgggattacaggtgtgagccactgcacccggccagaagatctaattttctaacttacaatgtactcgaatattgaaaggaatttcatatttttagaactaagccctcattggggttgggtacggttagggcaaggagaagcctgggaaggagttcttgggtagttaaattggaaaaagagagtctggcacattcagaatggctccatatttgttacccgcagactgtacataagaaatgagacctggctattaagagatatgatgcctgtgaaaaccctggatacacttgcaacttgctttttcccaagtgtttaggactctagtagggacacctccagttccttttggaaataagctaatatttggtttccaaaaatgtattgaagtagtcttaatgagacaaatagaaaatagaaatttgattgaatgttcttacgttcttaaaaatgctactttttagcatttttaaaaataatgaagtacatgttggggtgggagtggagaagagactgtaatatttctgtatctgaagcctccataaggtcttaatccagccctccataggaacataagccataattgtcatctacaacttgttcctaaatttactcagctacagtttctcagagctattgagggaagtactacgatgctatttaaaaatactttcaaatccatccttatgatgatgaagttattatagttacaaatgcatgattcagcaataggcattaggaaaacatatccaccagacagcctgatgatcatggtgtatgacactttcttctgaatacatgagggttagatgaaagtggtgacaaacgattgagatatctagatccacattatttacctttttttttttttgagacagagtctcgctctgttgcccaggctggattgcaatgacacacttggcttattgcaacctctgcctcccgggttcaagtgattctcctgcctcagcctcctgaatagctgggattacaggcatgcactaccacacctggctaattttgtatttttagcagacagggggtttcactctgttggccaggctggtctcgaactcctgacctcaggttatctgcccacctcagcctcccaaagtgctgggattacaggcatgagtcaccacgcccagccaaccacacttcttaaggctagataaatacatagctttaagtgtagagtaaatggtgtctcacttgcaaagaagaggatctcttggtcctctcctttccccaaccccaaataatggctttgctattggcaatgtaaggtgggtcggaaagtttgtgaagcaatggccaagggccttatggaacaggcatactgcaggggtggcgtggtcataagttgctgatgaagcagattctctgtcactcatgcctggtgaacaggcggggactcccttcttcaagagagacaggtgatgatagaagagtagacagccctgaacaaacctttcctcaggattgtcccttttggtattactcagacctgaataatacatggacatgttttatagggaattttttttcagctttttgggtgatctattattaggatcttattaaaatatgtataattttaaaactaggtatacacttcttatgcttatagttcttatgcaactatagagccaaaacaaattaataaatgaaatcaactatatctgagcagacctcaggatttgagagagagagagaaaaagaaatcaaatataactatgaaacccaataaaatttaaattattttaatgtgatagataatgtggttttgttgaaactaatcactagtgtggaacttaaagatagacacagtagaaccatgtatcctcagggtctggtctatgtttaaatctgttatttaaatgtattaatttcatgcaaagcatgcctgttagtgtaagtatgttgaacaaattgttattaatagctttgagggttcataagttcaggaaaataagatcttaacccaaactctgtagtaagcaatcatcgaatgtcagtttctatgaggtgtcatttgataattttttaaattgtttactcacttgaagatagggttagcattgtgttgatattaaaattggtactaaatggatatctaatccatttactaacagaatcagggacagaaccattcttctttgtgtgtttatgcctcaagtttctgcttataagctggtatgtgttagtatgtaaaaagccaaagtccccatagcacatctgctcacagcgtgaagatggcatcgaatcctatggctgagtagattgaactgcctcatgccatgcaacgactcagttttcccaacatttcctctatgtccagattgatccttgacttcatctggctttcactgggcatttgtgcaattgtaaacaccaatgaaaagccaggcagtgaaattgcatgatggttactgcttgtattaaaatgttaaattataatcgaagacagaaaattttttaaatcctagaactcttgtggactgcaagatatttatcctttgagacaaactgctttaaaattaaatttgggctccacggttctcaggaaaacttttctcatttgtggtctttcctttaagttccattaataattaaaaatgacaattgtgaggacttctgagtaatgagtgtttattatgctctaaaatttaagataagcactttacatatgtaatctcatgaaaaccttgtaattggtgtgaggtgagtgctttggctattttacatgtgaggacacatgacaccaagaaaaggtcaatcacatgacaagtaagtggcagcagcggaatttgaacctatatctttctcattgcaacgcccaagccttacacactaaagcctcttcttatgtctccatttcacattgtgaaaacctgtttaactgcaactaggaaccagtgctctacaattatcctcttacattcctgtcttttccattgggccagtgggtctcaatctttaatatgcatcagaatcacctggagtgctttttgaaaaatgcaggtcccagatgccactccgaatttactgaataagaaattgtctgtgcaaatgtccagggggcctgaatcttttaaaacaacctccctcaggtgattctgttgcaggtgtctgtctgatcacattttgtgtaaaactgcattagactgtggatgcctcaagaaccatgacttttgaaaaaatccatccttgtacctcaaggactcactcactaaatgcttgtcaaataagtaaaagaatgaatgaaggggcaattgtcaagaaagatgtgttcttgggaagaatacgcttttggccagacccttggaaaatttagagatgcatgtttaaatatcacttaatatactcggtctagactctccttcctggaggccaagcatggcaaagagccgatgagagggtggtagaaagtacaaatctatctataaaaaaaagaatgaaaatgctcctgaccatccaggatgagatagaataaatcttcccctgcgtttctaaaactaaagtcaattgaactagaaatatttaaatgcacttgaggcccagaaagagattcatttccttaatgttttgtggacttgacgttttctacttaaatcatagctctaaggtcaatatggatttgttaccggcaaggggtcccaatctacaccccaagagagggttcttagacctcacgtgagaaagagttctgggcaagtctataaagtgaaagcaagtttattagagaaggaaagaaacaaaagaatggctactccataggcagagcagtggcatgagctgctcaattgggtatacttgtagttatttcttgattatatgctaaataaggagtggataattcgtgagttttctggaaaaggggcagggatttcctttggaactgaggatccctaccctttttagactatatgaggtaacttccagatgttgccatggcatttgtaaactgttatagcgctggtgggaatgtcttttagcatgttaatgcattataattagcgtctaatgagcagtgaggatgaccacaggtcactttcatcaccatcttggttttggtgggatttggtaggtttctttactgcatcctgctttatcagcagggtctttgtgacctgtatgtgtcttgtgccaacgtcctgtctcatcctgggactaagaatgccttaacctcctgggaatgccacccagcaggtctcagtctcattttacccagtccctattcaagatggagttgctctggttcaaatgcctctgacagattcattcctgtatttagcaagaggttttttcctttttttttttttgagtacttactaagagtcttgtatttaataagacatagtcctttccctttctgagtttattttcagttagaaaattccgggagcagtaaaagagcaatgcaagtaaatggggggctagttgctcagaatctgcaaatgtaagagtgcatggaagggtttgtatagccaggggactggtgctggatgctgcaaattgaataagaattggaataaattggatagccaggtagcaaagagcagtggaacagacacttggcagtcagattgcttatggctggctggttcagttaacagtgaggacaggagcctagggtggtgggatatttgccttggggagcatggggaaataacattgcatagatgggttttctgacattaaatagagctttggatgttgtggaattttgaacatttcctttatctgaaagccggtgaagtgttgtcttaagatgtgacagcagtatgtaagcaaattgcaggggataagaaatcaagtcagggagacccattagagggctgcattctcagaacaaggagcactgaggaaaaaattaaaaaacaaacaaacaaaaacaaaaaaagaaggttgctttcggtagtccagatgtgaagggacagggtttagaccagggtggtggagtgcagaaagaaaagccagagggatgtggaaggacaagatggcatgaccacgaatggtggcaaaggcagcgtggaacaagcacatcagctgatgtggaatgtatgagaacaaaaacactcattttcccaccagaacccttagtaggagaaagtgccttaagcttacagtgaggattccaaattgaaattgctcagtagctgtttcaccctttgttactggcagagcagatggctctggaagagactaggactacttgttgcttctctttcccatctctcaccactccccaaccttatcccatagtgaggaccactcactagtgacatttctgcttgagacctacaaagcaagtcttgctaatgagacttaggcactttttcccaaagtgcaattcttggaaatctgtgggttttaagtagattacagggccacagttccgtggtcaaattagttcaaaaaatattgttagagaattaagcaagtttctttactgcaggatgtcccacagtctttaatatggtaatcaacattttgactatccaagagagggcgagcttagagcactccacaaactttttggatcatggagctctttttaaaagaagcaccttgagagaagaggatggcacagcatatatttaaagaaattagggactagaaagtttgtctcttgcactagaggttggtagtgtcatgcaaagaaacaagagttgggatttgggtccaggctttgccactaactggtgatcttgggtaagtcattgaatgtctctgagcctcagtttccccaggggttatgttcattctaaatgaactcttcagctcctttcaaaagtctgtcttcatattcaaaaaggaaaataatctgcaatttctctactctgcaataactctggtggtggaggcagtggtaggaaaagagagagtagagcggacagtgacaagaagatgaataagatacggtctgaacccctgcactgattagactgttgggcacaattacagtgctgggctgatgtaacaaagataaatgaagtttgtagtgtgttctcaagcttctctgactccaaccacatcatgtgatatacagcaactagttcagttgctaagcaacactaattcccaatggtcacttaatccatctagtctcagttctgctactaagaagctgtgaggccttggataaatcagttaaccctttgggtttgggttttcttcatccgtaaaataaggaagttgggttaggtctggaaccatttttaagttgacctgagtcttacctggaagaaggtaaaggaaacacagctattctcctctcacccaccctatgcagatgagccccaacattctgtcttcgcttttcttctcttccttcctcctggatcacttaatctgtctcagactttaattattgcatttatgtagttgaagttcaaatgtggatctctaagaccaacccttctcttgaatgccaaaatcaagatttgtctacctgttttcattctaaggaaaccaaattacttatgtttcaaaccaaactcacaatctccccttacaaaccaattcctcctccacgttaaaaaaaaataataataataacagaccaggtgtggtggctcacgcctgtaatcccaacattttgggaggccaaggaaggcagatcacttgaggtcaggagttcgagaacagcctggccaacatggtgaaagcccatctctactaaaagtacaaaaattagcagggtggggtggtgcgcacctgtaatctcagctactcaggaggctgaggcaggagaatcgcttgaacctgggaggcagaggttgcagtgaactaagactgcaccactgccctccagcctgggcaacagagtgagactccatctcaaaaataaatacataaataaataaataactatgtgctcctggtcacatgcagcccagactcccaggcttttcgactccctccttcttccctcctgtgctagtcattggtcaattctcaatcctctccacattattattattattttttgagacagagtcttgctctgttaccctggctgtagtgcagtggctcgatctcagctcactgcagcctaagccttccaggttcaagtaattctcatgtctcagcctcccaagtagctgagattacagtggatgtgtgccaccatgcccagctaatttttgtatttttagtagagacatgttttcatcatgttggccaaggtggtcttgaactcctggcctcaagtgatccacctgccttggcctcccaaagtgctgggattacaggcgtgaaccaccgcacccagcccctctccacattattatatgtccacattatttatttccctttcctgatgtcattattgtacgtcaggctttcattggtcatcctgccccaggtctctcctccaaagcaacccacatgccaggttcagcctcacagagcttctctgagcctgccatcccactctccaaagcctttcccggctctcttgtgctcactccttgctggcatttggagccctgcgttttcccacctcaatcatcttccagcttccagctttgtcttcgattacctgtgtgttcctgtcctcccgccaactatttattaatcttcttatcccataacttgcccattcaaattgttcccttttcttagacttttgtctgcattctttctatctgacaaaatcctagtgatatttcaagagtcagctcaaataatggctcctcactccaacaaatctttagggaacactcaactggcttgatttctccttcttttagcaccttgttctttcctttcttactaccttaccaacccagacatatatatctactatatcttgtaatatccattatatcttttttgaggccaaggaacatgtttccttcatctttctatcaactatagtacatattacatactaggaactcagaaacgtggttgaacaaattactattaaattattaagctattaaaacaataatctattgaaataatgtaataatcttaatctcctaacaaaatactaattaaatttaagtaaaataaataatctacaataatccaaaaatgagtcgaatcttggtttactctttggtgttttgtcattctactttcgtgtcaagtttagaaataattttctgaagaattttgattttgattttagttataactttgcgttagtaagaccatcagcctacggttaaggatatttgtctcacctgtgaaatctcactatctccatgaaaccgactggcttcgctacatcatgggaagggtgttatctttcctagttggagcatcatatgatgatgtggttgaaaacatgcactttggcataagacagacttggtttggaattctgactctgcccttgttggggctgcttggggaatttagttagcatctctaaatattagtttcctcatttgtaaatggaggatgtaattgcaggtgctggttctactcttggaaggattcaaaaattgtcatgcttacctgaggggctcctccaaacctgggcggggttttctgtatgccttatggacctacaaatgcaaaccacactgactatgtaattttgggggcagattggaaagctgaaacagaagtgcagggactgttggtgcccatcttcctggcctggtggggaggaatgtaggaaagcagactcgtgcttctcatcttgaatcagacagacgacagacactccaggaaattccttttgtttggaaaagaaaaatgctctgccatcttctcttaccccagttttctacattcccagacttcctaaaagagtagaccactggggttccctgaaaagccagctaagtccagcacatacgatcagccccacagctcattttggttcacagacaataaggagagaggacttaacaattactgagtgctgagtacccactatgtggtaggaacattttgtacataattacaattatgcatcctcataactttatcacataagtatcatctctattttacaagtagacactaagcaacctcccaagattgtacagctagtaaatctgagtgaggaagtgaactcagatggtctacaaaacttttagcatttgtggccaggcatggtggcttacacctctaatcccagcactttgggaggctgaggtgggaggattgcttgaactcaggagttagagatcagcctgggctacaatggcaaaaccttgtctgtacaaaaaatacaaaagttagctgggcgtggtggcacacacctgcagtcccagctacttgggaggctgaggtaggaggatcacttgaaccaagaggtggaggttgcagtgagccatgatcacgccactgcactccagcctgtgtgacagaacaaggccctgtcttaaaaaacaaacaagcaaacaaacaaacaaagaaacttttagcatttgagaccttcagtgtgatcaaagcaaattagctttgtgaggtggggtttcctttagcttctacgtcagcaaaattgtgaaccaacaggattaaccttttgccgtcttagtactgcagggaactagctttcagaaaattgtttgggggccgggcatggtggcttgtgcctgtaatcccagcactttgggaggccaaggtgagtggattacctgaggtcaggagtttgagaccagcctgggcaacatgtcgaaaccctgtctctactaaaaatataaaaactagccaggcatgttggcgagtgcctgtaatcccaggtacttgggaagctgaggcatgagaatcgcttgaacccgagaggcggaggttgcagtggctgagatcatggatcgtgtcactgcactccagcctggatgatagaatgagactctgtctcaaaaaaaaaaaatactgtttggggacattttggtcctgttttcttccctgacgctgatgtgatgctgatgatagtgagtgtttcaagaaccaggagaggctggttgttgtaaacattcctataaacgttggctcagagattgttaatgtaagtttttctggagcagtgaggtaagccccaagtagaaaagggcagaagtatagtaaaatttggttgttttgtcaactttgtaagacttcagctgcataccttgttaggaaactagaagccggaggaaagttgtgctgagatgtgtagcatttgttcttgctttgtgtggccattttattcccattaagtactgtatccttcactaaagaaatgggccattcagcagcccgcctgaacactgcggcactgtatattgttatagagagttatatccattcagaggaacacaacagatcagaggaaaggaaagaggtaaccatgtatgcagacgtggaactgtccccaacatgtataatagacaagccaaggtgaaatatatagcatactaatattcaactttttaaatttaaaaaactatgcatctcaaggcatggtggctcacatctataatcccagcactttgtgaggccgaggtgggaggatcgcttgattgcctgaagccaggagttggagaccagcttgggcaacatagcaagacctggtctctacaaaaaatacaaaaattagctgggcatggtggtgtgtgcctgtagtcctagctacttaaaaggccgaggcaaaaggatcacttgagcccgggggttcaaggctgtagtgagctatgatcactccactgcactccagcctgggcaacaaagcaacaccctgtctaaagaatacaacagcaaacaaacaaacaaaaaaccaaaaaccctcaaacactataaatccatagtttttatatatgtgtaaactatttctagaaaattactcaagtaactgataattagttatatctgaaggagggtgatggtgcggtggtaatgagactcacttttcatcatgtggagcagtgattcccagtgtgttctgggattctggggagtccttgagaccctttcaggagatccatagatcaaaattattttaataataatactaagttgtttttattctcattctctcacgagtgtacggtggagttttccagaggctcagtgacatgtgccattgcagcacactgaatccagaagcagatacgataatccaactgtgtctggtcaagccaaatatttaagagattttaaaaaatgtaaaatgatgtcattcttctcatgttgaagataaagttatttttataacaattttgaagataaagttatttttataacaattattattcaacaaaattactattatttaatgagttaatacacaataaatttcaaattctcagttttaatttcttaactgggcaagtatcagtttaggtataaacaacatccctccgagatcctctgggatacatccaattcctttagtgcctggtgtgcttggaaggtttctgttgcacggcgctggacaggagtgccaaagaggaaagaaatgtgaatggaaccaaagtctataataaaatattgctttctctttttcccagcctccatcaagggagacctacaagttgcctggggttcagtgctctagaaagttccaaggtttgtggcttgaattattctaaagaagctgaaataattgaagagaagcagaggccagctgtttttgaggatcctgctccacagagaatgctctgcacccgttgatgtaagtaggtccagtcactgaggctctgttaccacatgagattgggagtggtgtggctcacattgaatccccccacttatcctgcctggtgtcacagggaaagttgaacacttggtttctgtgcctagagctgctatcagatgagaagacaatgtatttgactatataggaaatctgttgtggactgtcaattaactcattttcacttccgttgatttggttgtgaccagccctagattagagggcagttttagagtgtcctggcctagaatgtcttcctcagttttgagtaagccagggtatctggcctctttctgggacttctctgcccttacaggacccactggaatctgtagggttccagcgtcaatctgtgttttctaatattacaatttgtttttattttttatttttaacaattattttataagttgttttcttctgggaataatttgaggtgatttagagtaaaacaatacttaatagaagcactacaaccagaataatagtacaagagtcctgtaattatattttgggggaattaaatgtaagaaaacctagcccagggatactgattgcagattcatacagtgcttagctgggactcaaggcaaaaagagaagcatgctatattgcagaacttttattaggaaaccatttccacatatcaaggtggtctgctgcaggtgaattttggtctgaatgggacttctcagttcatcctttggcaggctaaaatcccactgaggatctagaactgtagcaatttctagattgtgtctgagaccttcccagcctggagctccatatctccttcatgcctgtgcctctagcatctagcacagggtctgacacatggaggatgctcagcgagagccctcagattcaacttaggctttactgtattctgcacagcttctggaatgtgtgctgaatgaatgaatgagtgagtaaataatgtgaatgattattgggataagggtggggctaaagtggtattttcttacattccccagaagatttcttcttcctgtcgagatgctttttggattatctcttcctttctgtttattatctagggaatgcctcgctgctctttagcttcctggtggtaataattcacttcatagtttaatgtcttaggtttccttcttcccacagattgccttcaaatttgccttttcttcctccctccctttcttccttcctccctcctttccttcctcttttccttccttatgatagactcttggtatgggggagttaagaggtcttaacttgagccttcacagtgtatattttagaatgaataattcattgctatgcttcaccaccaaccagaaattattacagggtttctctattacatgagatttttcaaacattatttatctatgatttgttctgctttacctttcagaaactatcactgtggtcttttcttcccctgccactggagttttttttttttttttattttttttgttaacagggttttgctctgtcacccaggctggagagtagcagtgtaatcttgtgcaatcttggctcactgcaacctctgcctccaggctcaaattatcctcccacctcagcctcccaagtagctggaaatacaggcacacggcaccactttgtattttttgtggagatgagggtctcactatgttgtccaggctggtcttgaactcctgagctcaagcaatcctaccaccgtggcctcctaaagtgctgggattacaggcatgagccaccatgcctgggcaccaatcttaaacaatgatttccataaattactattagaatattcaaggcatatgctatatatagccttgtcctgtgaagcctgattttggtgcactcctccacccccactgtcatattatccctggaactatctcaaacaccttggctcctccaggaagagtccttctggtcaccaattcaggctcattctctttctgggaacgatcagactgagtatttcaatctgtttagagatttactaagttttagtttcttgtgtttcttattaatagggagaccaaataattcagcatccaatctggagaactaatgaggacaggagaagttattaataggtaatctggaacataaggcatactctggatgggtagccacctgcttttcaaagatcttgcctctttaatgggtactgagagcagaagggtaacaacagcctttggagattgaactcctgaattctgttcagttgtctggggctagggaactctgacacagatattgtagcactgagtatttctaacaagctgtggggggcctgtcccctagtggatgttagagttcccagagggagaagtcaagaccactgcagcaccgacggccccgtgcttatgagatccagtggtggtacccctagtcagtcttcctccaccctctccttcctcttttcccttctcctccccttcttcccttcccctccccactccccagtctgctcccttctctttttgatccttattctctccctctcccttccaacgcccccacctcggctccctcttgttttgttttctctttccatcgccttctctttctccattttcttctctccctttgccattcacagtgtcttcctttccttttctcttctaaaatggctcttccaaaatcactggagggcagctcaaaagagcaactctgccaatattaatttctccttgaaagggaaaagcctgcatttccaattatgacttagtcttcattagttagaaactgtcttttttccacagcaagtggcctaggaatggtgtgtttctcgcaagtctctggtcggaggtcctggttttatgtattctgctgtgcacgctttctagggcatgaagacagggcaggctgggccattggaggtgggggtggcagtgaggatggcggtctggctgtgacaggaacacacctggaaatgtctgcttgtcacagaatggattgcagctgaagtagacaaaactctgtgatcatgttgctgcataaacctcgatgtctgaaatttgggacgatggctgtgccaggattattttagaaaggcaagctcaggatcagtgttcaactaaccagagaatctacagctgctgtggatgtccctccaccagagagagagagagcctagcagaaactgaggagagaagctcttcaggccgctcaatggctcacgtccgtagtcccagcactttgggaggccgaggaggaaggatcacttgagccaggttggagagcagcttgggcaacgtggcaagaccttgtctgtacaaaaaaaaaaaaaaaaaatgccaggtatgatggggcctgcctgtcgttccagctactggggaggctgaggctgaagaatggtttgagcctgggaggttgaggcatggtaagccctgttcacatcattgcactccagcctgggtgacagaatgagaccctgtctcaaaaataaataaataaataaataaataaataaataaataaataaataaaagttcttcaaagaggaatggaggggaggaaccaagggctgacatggacaattctaggtaaacagggctccagaaacattctgaaaagcataagctgagagcagacttcagtaacatgaagaaagaactggggaggaggggagcggtctagagaataacatgctcttatttgttcatgggattcataaactgtggacaatatttttatttaccaaaaaggtaacaaagtttattgagcacctgtgatgtgtaagggactctggaagtattttgaagggatacaaatataaataagagataactccagccttggtttctcatgggctaataggaaaggaaaggaatgaaaaagagaattacactcaagggaggtaagcatgagtcaggacctgacaaatggttgaaggaaggaaaggacacttgtagctgggatgttcaaggaacacatgctttgaatatggagggtgtggagcttgacctaagccttgggggctaggaaggaatttgatatgcagaaggaaagatgtgggtcattatccttggagctgacctaggcagtgaggacccagagtgatctggcgaacacagactgtgctgggcatgtggagtggaggggaggtaggaaacggctgtctacttggggcagaggattgggttgaggagtggtggaagataatactggaaaggaggacacttgccagaatgtggaaagccctgactgttggctgggctaagacatctggacagtctggacaccattttagggattcagcacgtgcgttttacgtgctctagcagggaaggatgactttactgttagagatgctcatttctgatgtccctctcgctgagtgtgagtgcagtcctgaataagattaaaggtgtcataactataaaccatttggaaaatgtaaaaatatatatgcatgagacacttggagcaaggattttctaaggtctcaatttcttgtttttgctttgattgttatagcttataagagtagatttaagggttagccacaaactctattactgtcagagcagatttgggctgctaggtagaatcttattttcactgtttcaattctcatttctttgtaattttttgtattatactacatattttagccccaaattgtgggctgcaggaacaacgttgttaagtatttcttgctggctgtgttcactgaattgcttcctgagcctgaacttgctcaaacttcctgttttttgggcacagaactcctggtttctccatttatgatggatgagaggggtttggagtctctcttctagactttcatagcatgtttcaggatttctcactgatatctaattgtcttataagagacattaaatttttttcacactcaaaaatccatgatcccctctaggtaaggtctgagtctctgtcaaacattttcgcttttgtgtaacatttagcacagtatttatcaggcattattttgtttgggggtagaggaggtaggcggcggtgggcagttgggaccccccgtacttatgttctgctccaatattaagtcttgtagaaaatggtctaaaatagatctttactatctgaaatatcatctagtgagagcattggcatcatcaaagagcttgttaaaaatgcaggatctagaacctcagactaaatcagaatctgtaatttgattggcctttgagacttgctggtctccagatgtaatgtatacacatcacctagggatcatgttaaatgcaggttctgacactcaattacttaggtaatgatcaaacaaccagatcttgaagttttctaacatcaaagcagcaacttcctttctagagttgtcaccggacaccttccctcctgagagtgacacttctgcgcagaacagatggtttatgacaggagttggaaaactgtggcctgctggtggcatccagcctgccgcctctttttgcaaagaaagttttattagatcacagtgacgctcatgtatttacatattgtctgtggcttcttttgtgctgtactgactgagttgaatagttgtaaaagagactgcatgacacacaaagccaaaagtatttactatctgggactttatagaaaacagtttgctgaccctggcttatgtgagtgactctaaatatttccttaaagaatcaaatagctatactctcttgccccagtggcaaacttcgcaagcccatctgaatccatggctattcatagagaagctgaaccataaaccgtcattcccaggcaacctacaaagggtcttgagcctaaaattggtctggataatggtaccacagagcctgtgactttccaacatccatttaatatgtccctcctcaaagaaatggttataattttatataattttattgagctgactccctcctccacaaattgatttcattaattgttcaacataagtctgactttccccaagaattggaatcaaaaggaaattctgagtaaaaatatatctgggaccaaggaaataaaaagacttgtacaagttggttataatacacattttactcctaaaaaggtagcgttggttttggccccactctggcctattcactgggcagactgtatgggcttggagtccttcttttaattcccttggagaatcccaccacctgtctcttatttgggtttttgaattgtgaaatgatggcacacacaagctccaagaatagctgcgtgtgtacaccaagcatacagagacagaaggcagagacttaggccaaggatcaggaaatacagaagagaagctggcatggaggcatctgctccacaaacacagtgaagccggaggttgtaggaggagggaggtgggacccgtgtaatcactggaggatgtgggcactctgctctgctctgcaagtcttggagatcttggttttctttccagaaccaaatttcagaggaggtgggtgtaggagaattgagattctttttcctcatccagagttatctggggccaaagaggtttagggtgagattctgtgggaatctttgctgtagctccagaagctttattcttacttagttccttttccctttgtctgcatagtccaggacactaaaagggtttgtgaagagtccgggtagacataagtggagagtcttctccttaattctagagtctatcttgacttcaaccaattaaagattgtaggagtgaattagagccccttatgttaaaccttgtttcttggaagccctcctggaattccctaagatgcagagctgattagcttagctggtcagaatgtgaaggttttaaagccaaagttattatttgggctgatattttagacattctcttcattggaagaagtacaatgtattcattcattcattcattcactcattcattcattcactcagtgaatatccattgaaaacctattgtgtaacaggatgcaggaaaaacctgaactggagagtcagacacatctgagttcaaattctagtttcttgatctgtgagctaactaacacctcattcagctttccatccaggtgacataaccaccccagcttccttccctgaatctgcaggttaggttggacatttacttctctgcttttgcagcaacttctacaccgtctgttctcataccacattatgtggaaattatccatttgcagtctgtctctctctccagattgtaaagtcattgatagaaaagagcttcatttcacatacttttttacccttagtgcctgacatatattagaaattagacatatgtttattgcactgaaaagaacctaattgtgtggcttaatttccctaaagcatgtgtttctcatctgtaaaatgaaggtgataaaaacatgccttgtgagttttttgtgaagatcaaatcagataatgtttgaatgagtgttttataaatatgaagtgcttgcaaatactaatagttgttctaatatctggattgattgcgattcagtagaaaacaagcagaagagaatcaagaaagtatgtggaggtgtcctagtccactttttctaaactgaataactgaacgagggggatctggagacttcagcttctgaggcacagtttgggtgtgtggggttgacacgggacagaggaccctttccagcaagctcgatgtctctgccattagattatatactcataacagtggggatatgttttattaatttcattgcccctttattcaccctaagcataactaagaaagtgaatatgtaataattggatttcaatgggcattgcaaggccaaagtctcctgccccccaaatctcccagtatccctggcctgtatgtatcttttcttgagaacctgaataatggaaccattagattgaaaacatagattggggagaagagagtgagttgaatttgaaaaatgttgagtgtgacatctggcagtcaaatatgcagggctgactcatttcacttttcatgtgtctgttttagctcacaaactagacatagagctcattgtacagattccatagtgcttaatgcactggctaccccttaaaaaacctatagagcttgctggagggggtcccctatctcatgtcaactcaataaataaatatgtatggatttgttgcaaaatattggattttcttttccatgtaagtaacaaagaactgctgcagatatttgagcagagttgtaaaatgatatgaattttgctgtgagaaaacttgatcttgctgtaatgtatgaaaaagactagaagggaaagaagttgagggtggagagtcttgttaggagggccaggataagagcaggtgggcggtgaaggaggctgcggcagaaccatgccaagcagaatggagtggaggggacttgactacacaagaggctggtgactcagctttctgcctagtattagtcctagagaagtctccctgctctgggaagaccggtgtctagcctcatgtggcttcggaacaaaagccagtgattgcatccaagggaagataatgagaaacacacaggccgtgaaaatcaggaaagcaccactaatctttttgttgcaaaactttacttttcaaagtcctggggaagggtgcagaagcctcagcacgtggacttgagccctgtactcggaaatgcaaaatggaaaccccctaataaatcacagaactgaaaatatccaagagtctgagaggctgggggaggacaggagtgagaaaaggaagggggctggagtactgatcagaagataggagaaagcaacagtgcaaaatgcggggaagggctgagtagacattcaatttaatctggacttttattttgctacaaactaattttatgaagactttttttgcccaaatattaaatatttattaattaaagatattaaaacaggaaaaactgctttcattcaataaaaactctagtaattcttcctaactccagaattgtatgtatatgttttacctattaaataatcagaaatagaaacaaattagacaagatacgtgaataaccttaaaaattttccataatatttgacttaggaactttagttttatgaatgtactctaaggaataccctgaaaaggacaaaatctatacacaaagattatacacaaatttattatagaattatgtactaaaaaaccctaaatgaccagccttgagtatatggttaaatatataagttataagcctttgggttttgagagttttagataacacaagaaggtatttatgatattatattaaatcaagataaaagtcacaatgtaatataaagatatacaatcaatgatgtaaaagtacatagaagaaaactctaatgaaaatatgccaaattgttaactatgatgacttttaggttacggaattatgggaccatttttgtttccttatgcaattgaaaagtcataaatgagcatgcatcactttttcatcagaaaaatatatgagttacatatttttttaaagggaagatattgtaaaggaatatttgttgacagaatgcattaaaaaacctaggtaatttccttatttccctgggattctgagaatttttttactcttgggaatatctttccttgctcttagttattttcatatgttagtcttgttcctggggataaaaaatggtaagtttgctatttgagctctgctcgaacatatggagtagttctctcttacatatacagaattggtttgacattcaaggtctttcagagtcaaatcccaattgatcttcccaatttcacttcccttagtttcctacgtatattttctacacaaatcaaaaaccttttcagacttcctatttcttgtacatgtccataacctcccctttctgaaactctacttgttcctggggacagaatgttcacagagcatgcgttaaacatcataaagtggatcgggagcctcttttaacataaggctgtgtgattttgacaaggcagttagctcaccctctagatctcagatggaacacctgtaaaacaagggactatgttgtagatggttgccaacattccttgcagtgctacagctgagtgaaccttgttccctcatggccctaggtgtgctcattcatctgcctgcaccttgtctcaggttcccactgcatcttaagtggcccctgcccaccccactgtcaaatttgacccttcctagctcatgtaccatttcctttataatgccgtcctcagtgattctgattaacagggacttgcatgtatgatttttttttttttttgccactcatacaggctgccttttatcaaaactatggcacatgtcaatgatataacagataatatcatttgaataaaaagtcaactccatggggaggaaaaaaacctacttaagtgagctttagagataaaggtgaacacttctctaaatcctttgtttatggtctgttaatcaataaagtccaatctgtgatccccagatacataagaggagaaggatatgtagactatttatgatatttctgaaaatcctaagaaaaatcacacacaggcccacagtaagtctatgtttctttattttgagtcagaggatttcttttttccatttttaaccagtataaattggtttaaacttcatctcttgaataactcctaacatgaccagagcccttttcttccttcaaatttccacaaatgcattgctccccttttttcttttcaccacccatatgtccatgttggacaaaaaccatgaaggaaggaggttgagaaactgtgtaccaaaacgccaagagcatctttgccatgttccagcacaaagggcactgttagaaggaggtgatcagagtcatcttctgactcaacctcacaagaggagtcaggttagatgaacagttcccaactatttactctcctctctctctcattctctctctcgcattctttttccttctgttttttattagcagcacaaaagattttgaagtgcttaagggcagaaagcttgccttgttcatctatgcagctcttgctgggaccaagtatggtgctaaacacacggtagacattcagtaagtatttgtggaatgaatgaatgagcaaatgaaggacaggtgtggcttcgatggcaatgggtcagtgtgaactccggaaagagtatgcagagttatagtcaaagtggatgatggatcattgctctgacttactagttatgtaatcttgagtaaacccctttatcactgtgggattaatttccccagctgttgaaaaaatgtgtgtgggggaaagggggagggttagtgattaaaaatgtgttccataaggagcatgtatgtaaaatcatctggcacatggttgcagctgaatagctggcatttatgtagcactttattttttctgcattttttaaaaattaaaaacctgaaaattgttaagttgtactaacctcaaatctcaccacttaagaattatataaaataagaagtaaaatttctcttcccagccaacttttctaattccccagagataactacttttcttaacatttaagtttgatgtttatccttcttgacatttttctaaagtttcatatatatatattttttataattatttaatatatatgtaaactcatgaatatatatatgcaaactcataaatatatatatatatatctccatgcaactttggatggagatatatatacacacatatcattttcaaaatggaactattcatatatgtctatctatctatctatctatcaatcatctatctatctccaagtcaattatttttgaatgatggcagaatcatttgttgtttgaatataccatattttgctgccagtcccccagttccagtgttttgtgattacaaacaataatgcaagggtcttccttgtacatctatatctgtaagcttttgtacagtacttactttagtaataaggcacttgaacacttattattctctttactcataaccaccacaagaagaaaggacagaaattgttattctgtgttacagatgaagaaaaaggagagctaaagggggcaactggcttggccagagacccacacagatagactatggcagaccccgtgtttcccagtggcttgaatttttgtccagagctctttttgtcacactgcaataaagcacaagtcaacaggaaacctttacaaccaggcagagaagcttggatcagggagcaggcagtcacactaaattgtagaaaagaacaaacacacacacacaaacaagaagctcgaggccaaacacatttaaaggatattatttggaagaaatgcactggtggtgagtgagggaccagcataagaagagctgtcctttaactagttaccatgttttatgcaatgttctcaatatgatatccaaatgattaggatggcttagattgcataaatgaggcaggagaatgacaaaggacacccccacaaccccaacaatgacactacccctctccctcaagggaagtgtctagggaaggccagtcagcatctggttaggcttggccttaattgtcatcttcctcaattatctgcaggaaatattagctgttattaaaatttgcagatgcagtcaattgtcagagtcactggagaccaagaattattactcagagcattggagagaggctggaaagaaaaagaacaattcagcctggaaaaatgcaaactaatggataaagtgaggtagggggagtgggggaagaatttagagggataaggccagtagtagggtgaggcagtgaagcactcccctggagtacaaactttaaggggatgccaaaaactcagctatcaagataaataaaattttaattcaatattgaaaaaaatcaagttggcaaatgacagcctgtgggccagcagcctgtttgtaaatacaattttattggaaagccactggaagtaaaggtactgtggcaggggagatccaggctaattctttgatgtgaaaaccctggttaggcttgtgaatgttagacacattagaccttagcttgtgattgatgggaaaaatatttctgaagaaaaggaataatggatctgactgcttttatgggtttcctggggttactgtaacaagtgatcacaaactgggtggcttaggacaacagatattgattgtctcacagttctggaggctagaagtccaagatcaaggtgtcagcagggccatattccctctgaaggttctagagaagcatctttctttgacatctaatttttgatggctcttgcaatcactccaatctctgccttgatgtttacatactcttcattgtgtatgtctctctgtctttgtgtccgtctctctgtctttgtgtccacatctttttctcctttcccttagatcctagtcattgggtgacatcccaatccagataacctcattttaacttggtaacatctgcaaagaccctagtttcaaataagattacattcctaagattacctatgaatataaccttaactctttggttccttatttggaaatagggtctttcttggacacgattcaacccaccacactgttaaagatatctttctaggacacaattcaacccaccatgctattaaataggtagggatggggagagatttgacttaggcgcagcagaaacattatccattcacagaaatctggcagcggagtcaggggcagactcctgacatgatttaaatacctaagaaaatatttaaggaaaagtactttagttcctttggggcgcaaatattataacctttgctcatgtcacatggtgacaaatacatgcaggatttttaagggtagttctgatttcaaacatgcaaacaatagtgactggaaatatttttactaaattttatattccttttgttactattttattcttctcaatgtaagcaacttattaaattattactataaccgaatataacaacttttagatatttttcacaaaaattcaccaaccggggaaaaacgttgtttgtaaaatgcagtattctgatttttaatttatgaaatatggctgttatgcttctgaagcctgttcaaaggctatgaaacaatggagatgatcgaataccattagaattttaagtaagttgaaatgtaaatgggaaacaaatctattttctcccattttccaaacacatcacagtcaagtccaaaaatttgaatgttacatggctttttagtgaacacttttgttataaacatgcgtgtgtaggtatacttaattgtatcagcaacaataacattagttattttaattattgtatcaccaatcctaatcactaatcaataaatgtatactcattaattaataattcaataataatggctaatatttatgaagtgcttatgtgctagacagaagaattgatccctttatgtgaattatttaatttatgaatacagtaattcttccttagaattggtattctgttcatttgggcttgaaatgttctacatattatttttcctgcttttggtcaggagtcaccagcccatttaaagagagacagctgtatctttctgtaactgggctattttctctatgagtgcattaatgttaacagagaagcatggccagcaagggctgctagcacaaagtgaagggccctgctgtgatgaacagagaaattgggaactttatcattgctgctatatacattatcaactaataacacgtttttaaaattcctgaaaagagtttgctttctaaaggttaaaaaggtttaagttctccctgtaattttgtttatatagatgatttgctttgtaaacatttgttttgtttgtttgtttgtttttgagacagagtcttgctctgtcgcccaggctggagtgcagtggcacgatctcagctcactgcgacctctgcctcctgggttcaagcaattctcctgtctcagcctccccagtagctgggattacaggcatgcgccaccatgcctggctaatttttgtatttttagtagagacgcttcaccatgttggccaggctggtctggaactcctgacctcgtgatctgcccgccttggcctcccaaggtactgggattacaggcgtgagccattgtgcctggcacagctctccattttaaggctttgcaattgattgaatcaggctcgttcaggttacctaggatgatcttcctcacgtaaagtcaacccatgatggattctaatcggtctacagaacttcttcacagcaacacctagatcagtgtttcagtaactggggtctacagcctagccaagctgacagatcagaagagccatgacaacaatgataaaagaaactgttgccctctagtttcctcctgggcattaataatttagctaatataaacccaaatactttggatacgattgactgaattcagctttgctgatgcctctgatttcagttgctttaaccaaatgcaaacccctagtgcttctgttgtctgttgatacccagaggctcatgtgatctggaagggtaagtggcttctctctgatttgccagaagaaagtggttatgttagctgaggagccaggacactaatttcagtgatttgactctggtacaagtggtgggaggcccgagggtgggatgctgctttttcctttggccctggtaaacattttatgcttgttatggtggttgaaatgctgtatttaaccttttcttcatgtgccaggaggttcacagtaaatgaggggtgtggtctgtgaagggaaaagtggctgtggcttggcctctttgtaccctgtcagcacacgtacacgcatggtctgtaacatgtgaacctatcacgtgggaactcattactgagctgtgagggctgcccctgaggagctgggggcagtggtcgggagaggagaaggtcgtggggcacagtagaaatggcaccggactgggaatgagttcctactgccaacttctcatcagctcagttcctacagtcctctacttactccttcgttgcccaggacatttatttaatgccaggctaagcacaaggcttccaggattcagcagtgaacaagacagatgctacccttgcccttttggagctgactgttgagcaattttaataaatagcaatgatcatatcattagcatttcccgagggttaccatgtcccaaatgtgtgagttatgatagaggaagatggggttattctaggtgaaggccgagaagcttctgggaggcagtgactaataactactgccttttttactttggagtcatgtcctttctgtgactcccctttccttctcctctgtgttctctcccttggccttgtcaggctgcccctggctttggttctctcttcctagtctcctttctaattagcctttctagcccaataaattaagctcttgtctggaatctctagctgcctgatggacacctcctcgtgaaagccctcagtatctcaaagacacaacatctgtgaagaactcaactcttccattgtattcttccttccctttcctgtctctgataatgttatcacaattcgttttgtcatttaggtcaaaaacatagtcatctttgacctaccttccctatcatacctaccagtcactcagccctaccctgtctattcccatgatgtctctcatctctccctccatttgtttgtcactctcaatggtcagactgtcttggtcacttttctgggcaattgctatagtttaatgcttgcagttttccctcaactttagttcatcctctttagagctaccagagcacatactcttgatacatcttcttgcgtcactctgttgctcaaaagccttcagtggaccactgctgggctctgcagccaggtgcttgtgttctaaacctggctctgtcacttaccagcttggtaactggcaaattattaaccattctgtgcttctattatttcatctataaaacaattgtgtctgtctcatagagttgtgatggggattaaatgagtcaacatgtaagtagtgcttataaaaaaaagtctgacataattttagcattccgtccaggtagatgctctggctcctggtcctccacattttccctcttgtgccttgactttttgcatttctaacttttccctgttatatttctgaatagttttttgcaaagtagtgcacaaattagtgcctggatctacacaaactacatcatacatgatgctcttgtctttcttcatattcttttaaagactatatgttatatatttaaacacatatgcatatttatactaaactaagtatatatatgtatacacatatatacatatagattcatgtatactttattgtttcttcattaattgaccaaatgttttgatggtgcctctaaataagtagtacttaggcaaatctccactcatagtattgtggtaaaagattaacttttgaaaactgcccagagaacagctttctatcacattaatcatgagatacagttttgttttttccaatgttctggcggccattctcatgaggatggactgtgctgactgatctcagtgaaagttaccagtgggcatgttctcggggcctctctgtccccatgaagcatccccactcagagacatggaaaacctgtgagatgagctcatacaaatgatttctgggatgaaaatagcaatgtgagatagtgccaggaacttcaggttcacagagtataattaagatttttcctgaatcattgcacactgtaatttcatcacatcattatgtacgttctttaattatgggctctaattgcccattttagttctgtaattagacataaagacattaattttgtaggtataacaatcagctcaaatgtacttccaaattctttcccctacctttcaagaaaaattaatacatcattaaaaagtttgtgcacagaagagcctcttagagggcagcttttgggagccagttggtgttctcaaaggtggggccccagttcagaaagggtatgggaacatcaccctcttatattccccataaactgtgttgcttcatgtcagatagaccctactgggtccagggcagggaagagctccattaattcacatagggccgatttctcttaatcgtaaaattttaaggtgacatcaatgcttaatgagtcatgggagaggaatgaactaatgttagggcaactctggctttttatttctcttgtgtcctattaaaagatgagaagatgaagcattttaggctcatggggtttgtatttttcatttgtgcatgggtagctgattatcatctgtcattatgtgcgtgtgtgtgtgtgtatgtgtgtgtgtgtgagagagagagagagagagagagagagagagagagagacagcaagagagagccagaatctgttttttaagaactctcaatgattcagatctccattttttcccttcacctacagcactttagttaaaacaaaacaaaacaaaacaaaacaaaaaaaccgacgagttccagcatttccccccatggaccatgctatgtccatttcagccgacacattttacatgtgtatctatttgcctccacttacaaatccaaggaaaaaaaggcagtgtggtagagtagaaagagccttagtaagggtcctggcccctttttcttccctttttacacatactctctctctaggtaatctctctattctcgtccttaaaggccgtttatatgcttttgtccctccaatttatatctctagctcaggcctcatctctgagctccagattagataacaatcagaatgcttatttctacttggatgatttacagataatttaagcttgctgtgttcaaagctgggtttactttcctccaaatgtattgcttttctattcttcccaaactcaataaatggcaaaaccatccattcaagtactcaagctgagtcatccttgattattctttcgacatatgagccatcagcaaggcttgtttcaccctccagaacctatcttcaatctgtctgtttccctctccctcaattcaggctgcaatcccaatgcagagtgttcagtaaagcaaaaggggtggtctgctctcaccaaaagcaatttgcgtgctcttaattcacggatggattacctagcacttaacacagacccagatatatttggtactcagtaatatacactgaagaatgaatgagtgagttaatgaattaatgaatgaataacagaaactctacctcctaggacttaataatacacagcaggattaacctgctttcataagtaatcagtgaacctggtaaagtgtgacatttatcttttggtgaaagcagctcaccccttttgctttaccgtttcaccagcaatctctgttttatttttacctgttcttttggacacacaatttagtcagaaatttgcacctgagtcttacttctgccacctgctagtataaagatcaactggtgcagagcactatacagagattatttattgtttgctacaatgttggatatagagtttcctctctaggacctctttaactgggagggataaaaatggcacaactaaattttcatgatttggataagaagagaaacattgggtgggcatggtggctcatgcctgtaatcccagcactttgaggggctgaggcgggtggatcacctgaggtcaggaatttgagaccagcctggccaacatagggaaaccctgtctctactaaaagtacaaaaaaaaactagccgggcatggtggtgggcaccggtaatttcaactactagggagcctgaggcaggagaatgcttggactcgggaggtggaggttgcagtgagtcaagatcacgctattgcattccagcctggccaacaagagtgaaactccatctcaaaaaaaaaaagtagaggagaaacattgcttcattcagaaagtgcttcctaagagattcccatggtccagggatgatgctggatggtggagatgtagaataatgtagagattacagggtagcggggatggggatgcacttgtaagccaatgagtagaagaaaggggttctggcggtggcacagcagcaaccacaggacgaaagcaactgcagaggacatgtgctcaattctgtgaggggacgatggcgggacatggaagggtcctgatcatgtcgatgttgatggcaagtctaccagtcaaaaggaacaggtgagcaagggcctgtagcctggaggtggcttggggctttcaaggaaccactttgttagacctgctaaagcatgtgtttcaaagagaatgtacccagctcgaagacttgcacattgtaggcacttagctaatatctgtttaataaatggataagtgaatataagtggcagaaagacagctgagttgctgggacaggtgagatcatggaaggccttgtgtatcatgctaggatcagtaatgggaagtagagaagtggtcaatgaagttttatttaagcagaaaagagaccctattgggttgagttttagaaaaacccctgtggctgcagaaaagaggatggtttggtgggaatgagactgaagtcatgagcacagacaggaagggtaactgaacattttgagagagctgaaagtgtagacaggaagggtgttcaaagattgttggagttcagagagaagtcctcggcctggcctagcagtgtagacagccaaagacagacaagtagtggaatgtcacattctagtaactgattgaaatgtgtgtgtgtttataggcaagtgagttgaaaactgtgtgtgtgcttaagttggaatgtacatgtgcatatatgaaggtgatttgaagtgtgtgtgtgtgtgaatgcagtgtgtggtagtgcattggaacgtgtgtgtgtttacatgagtgcaagtggacagtaagaatggtgtctaacacttacctatttggtctaaaggctcataaaacttctgccttactcctggtcacatgctccaagtcacaagcagaaatgggcagaacagctcggccttgtaattccagcctgactcacactaagctgtttccaaccaagtgaattaatttctccctccttatgcccacacagcactttcctctacaacaattgttacaccactgttgttattagtttatataatactttaccccctgctaggctgtgaaatcctgaaggaggagaaaatatgttatgtatcatttatctccagagtctagctcattcaggcacatgctaagttctcagctaatgtctgttgaacgaactaaaagaataggcacacttttatagcttattaagctcaaacatagactccaaagcaaaatctcatcattgcctcttgcacattttggaaacaacagcaataatagttaccatttcttgagaacctactgtgtgcaaggcacagtgccaaatactttgggggagccagtgattttatgtgcaatgtttttaaaagtccctggagttaaaaaattcctaggaggtaaatattatccaccccttccacagatgacggaagtgaggctcactaaggataagtaacctgccaagttgcacagctagaaagtagagagctgaaacaggaactcaaagcctgggctccgaacaagcacgccctgcagacttcccttccctgtgatgccccatgctcagttttctattttctttatagtggaaaagtcaatgcccttcctatgagaaataaaagggtttaaagtggtcaaaaggaaacagtgtttcctctgtgctcacggggttttggccaatcacagagggtgaaccaaaaacaatattatgcgagatgtggccagtttgggttgattccagctttggatgctgtgagctggatcccaggagcacacgaggaaaaacgataatagcatacttgagatccaagcccatgttggggtgaggatagaagttttgctttcctcaaactattgcatttttcttttcctccctaagggtccgggcaggatgcttcctaccccagggggccacttccaaatgctgctctgtcacttggtggaaaacttcaaatttactgagggtttactgtggaagacttagtcaagagggcaagtaccctatatctccagattgctttgcacatgttggcattcaattaatattttatttgtcaatggatttaatagctgattacagtttgcaatgctctactcatggataaatcagttgatcttctcaggcttcttatgccttttcccagtggatttttcattgtcgtggataaccccaggaaaaagaggaggcacagaggaacctctcttacatgaataggtggggggatgcaagggaggacttctagcttttcttctcctgacttttctacattccccaggttgagtgactcgtctccatcttttaatttagcatcttggaactgaacagcacctcccaagcaaccctcacctgggaaccaggcagaaacaagtgaaaatgtggaggaggtgtttatgaatttttgggcagtcagtgatttcagggatccaggaagttattctactttctaaaccacttccccacctgctggatatgaatgtaactccctcagctttcagctttcacatctactttatatacaattctatactgcctctcccattttatattatttatacctatgtgctgggacttgagcaaaggtttttttattttttatttttttttattttttaaactttgtacaagggaagccataaagaatttgggcaacttgtagggaagagggagagtgaatttggtgaaaccgaaagtcagtaaaggtcacatgggagatgctgagctctgcagacagatctttcaacgtgaagcagcagtgaagaacatggctctggagtcaaactggctgagctaaagagttgactttgttacctactagttacctattggtagttacctactagttatctactagttacctacctctgttacctactagtgtgaccttgggcaggttaagtaacttctttgaacttagtttactgatacataaattagtgataataataattcctgtctcataaagttaccgtgaagattaagtgaggcaatgtatgtggagtgttaaaacagtgcatgacgcagagtaaacacgttaaaatgagctgttattaatatttggttgctaaaggtctgtcctacctgatgtgtctatctctttcaaatacatcctctgggatttagcactagaaacagtcttgcagaaagttagagcagggaggaaccctcaagatcatctaatccaaagtcctcttttgtaaatgaggaatcactggcccaaggtcacggagtaagtcactgagtaatccctctggtctgttgcccagaatgcattccttcccacaaatctggccatgcttgtcctggagggcagatagactagccttccccaggtaaccttgtatcttcccgtaaaaccgtctgtcctcacaaagtggcacaatttctaaggctccctcgggcaacaaagtaggttgtgttcagagaccagtgaggtggagaaactgcccagccactgaactccaggctggacttggtgagtggcactcagtggagtcagagtcctggagacctgcacatcagggagagggtcctgaagaggtcttgaaataatttgacatggaaagagaaaatacaaattttcagagacacagataagcatcatatttttaagccaagaactcagttatatttttgacagtgtggtgtctacagtactaaggcatgttcttacaagagtgacactcactagctcttttttttttttaactttcattttagtttcagtggtatctgtgcaggtttgtcatatagtaatggggatttggtgtacaggtaattttgtcacctgggtaataagcacagtacccaataggttttttttttctgattctctccctcctcccactgaccatcctcaagtaggccccagagtctgttgttccactcctagcatccgtgtgttttccttgtttagctcctacttgtaagtgagaacatgcgatatttggttttctgttcctgtgttaatttgcttaggataatgagatcatgttctctgacatggaaagagaaacacacaaattttcagagacacagatgaccatcatatttttaagtcaagaactcagttatatttttgacagtatggagcctccagctccatccatgttgctgcaaaggacatgatctcattcttttttatggctgcatagtattccatggtgtgtatgtactatgttttctttattcagtctaccattaatgggcatttagtttgattccatgtctttgctattgtggatagtgctgcaatgaacatgtgtctttatggtagaacaatttatagccctttgggtatatacccaataataagattgctgggtcaaatggtaattctccttttagttctttgaggaatcaccacactgccttccacaatcgctgaactaatttgcactcccaccagcagattatgtgttttttttcaaccttgccaacatctgttttgttttgttttttaataatagctattctgatgagtatgagatggtatcttattatggttttgatttgcagtgctctaatgattagtgatgtcaagtatttttttcgtatgcctgttggccgcatgtacgtctttttttgaaaatgtctgttcatgttctttgcccactttttaatggggttgtttggtttttccttgtaaatttgttcaagttccttatagattctggacattaagtctttgtctgttgttcccctcctagtttgcaaatattttctcccattctgtaggttatttactgttaatagtatcttttgctgtgcaaaatctttttaattagttctcattggtaaatttctgtttttgttgcaattgcttttggtgtcttcatcacgaaatctttgccaagtcctatgtccagaatggtatttcctaggttatcttccaaagtttctatggttttaggttttacatttaagtctttaatccatcttgagttgattttcgtatgtggtatataagataggggtccagtttcaatcttctgcatatggctagccagctatctcaatatcatttattgaatggagagtccttttcctagtgcttggttttgttgattttgttgaagatcagatggttgtaagtatgcagcattatttctgggctctctattcaattacattggtctatatgtctgtttctgtatcagcaccatgctgttttggttactacagccctgcagtatactttgaagttaagtcgagtaacatgatacctcctggtttgttcagctcatttctttcttgttgaagacttcagttcaatggccttagtcatctttggaatggcatttaggattcagttcaatgaccttagtcatctttagaatggcatttaggaaaatggactcctttaccaaaaaggtgaaaaagaaaataatataacccaaccttaaagactatttttttaaggggagagggagaggactttattcataatcctatcagctgaacacattccagtcttcttctataaaaacacaattttttataaagttgaaattatggagctaagacatttctaagaagacttaatttcagttagggacttgctgattatctttgggtaagtcagtctggcttcttttctgggaggagtgttgtgtccttagagacgtgaacatcgacgtctgcttgtttttgtgaggaagcatggtagaatgaagagaacgctgtctggagccaaaagatccagattgaaaccagactttaagcctgggctctgcttccccttttgctggatgaccttgagacagtgtcttaaccttcctggatctgttttttagcttttataaaatagatcactggcatatcagcttgttaacgtgcactgtactcagccttgacacacgggagaaaggttttcagggacagggtgaagatttcatctatatgacctttgactgcagtttggttggttgggttacacaatctacaattgtagattgattgagagtcttttgaaatatgtttttctttatgctagttacccaggtcctctcctctctggtgacagtggtaatttaccagggcattgtgtcctcttttcattaattaggccactcaggcctacccgaatcccaagagaccatttatggatgatgaaggtggtaagatagggttgtagtatgttggacctgctgtcacaaactaccatatgcagggtgacttataattaagagaaatttatttttcacaattctggaggccgggaaatcctagatcaaagtgccagcagatttggtgtctggttaggcctgcttgctggttcagagataactgtcttcttgctgtgttgtcacatggcagaagggggaagagaactctctggggtccttagtataagggtactagtcttatccacaagggctctgtcctcatgatctaatcaccccacaaaggcttcaactccaaatgccatgactttgggggtcagatttaaacataggaattttaaggggacacaaacattcagtttatagcagagagtgtatgttcacagcacaggaaggttcacagctgaagcgagccattaattgtgtatagactttcatgtctctgctctgattcattgtataatctgcttcattcaaaggaagaaggtaaattttgggtccctcttggaacatttaggtgactcccaccaaatacaggatagctttgagttataacgtcatgaagtccctggtcatgtctgtgtgtttgctttggaccagacccaagggcctgtcctgtgtcctgcccgggctcctcccacctctttcctggagaaacccacagtgagagtggagggtgggggtccatgtttatcttggtgggcctcactggagctggacactgctgctctgtttgcccaggcttaagtatgcatctccttttttaactggccagggactttcccccagtcacttggcctgccattgatttgggacttttctgcctaaaacttctaggatgataaggagagcactattacccactgcctgcccaaacctagtagcaacagcagctagtcatgaccagcattcatggctgcaagtactgtcaggccaggggcctgaccagtgaactggaactttacttctctcccaagtgggattagagttcactgagtaggtggccctattaaaatatgtatagcctgtgctaaagttaattctaggggtgagaatgaggcagctctgcttgctggctagcccaggctggcaaagaataatgggtgcaagcaagaataccagagccagattgggttcaaattccaattctattgcttcctaggtatactgacttaggcaagtacttctatttctctgtgtctcagtttcttcacttgtgaaattttcatattttaaggattttgaagatatcattttgaggcttaaaacaatgtatttacttatgtttaacacatgtaattactgatgtttaacttttttggacttataaaaatgacaatgtttagcagagtgctttaaaaacatgacccaactatgtgctttctataagaagcccctttgaatataatgatatagccatgttcaaagaaaaaggatgaagaaagctatattatataaacattaattgaatgaaagcaggagtagctatattaatacatgtgaaaatcctctacaagatattagcaaattgaatacaaccatgtacaaaaagaattacacatcatatcaaattagatttattctaagtatgcaagactggttcaatattttaaaatcatgtgattatattaattgatgcagaaaattatttgacaaaattcaatattcattcatgacttaaaaaaaactctcggcaagttaggaatagaataattacctcaattaaaaagtttacagctaacatcatactttgtgaagaaggacttaatgttttctccctaagacagggatcaaggcaagaatatctgctcctgccactcctattcaacatagcactggaaattctagccattacagaaaagaaattaaaggcatacagattggaaaggaggaaataaaactatatttgaagatgacatgattgcctacagaaaaaaataccaacacatttacaaaaaactctcctagaactaataaattctcctagaactaataagagaccacagaatacaggctcaacaagctcaccggatacaaaaatcaattgtacgtctacatacctatattgaacatgctgacaccagaataagaaatatagtgctaattttaatcactcaaaaataataagtgtaagtacatttaaatatattatatttgtaatgtatattatgtaagtttaaatataataaaacatacataggacttgtatgttgaaggctacaaagactgatgaaagaaataaaaagatctaaataaacagagagacatactatgttcatggaagtacttgacatagtaaagacacaatatactaaagatggcaattctccccaaatcaatatatacatttaatataattcctacccaaatctcagcaacgttgttttttttaaaatagatagaaagaggattattctaaaattttgactaaaggctgaggaaccataatagctagaacaatttttaaaacaaactaagtgggaggaatcagtctaccctatttgaagacttattatatagctgtagtaatcaaggctgtgtggtattgacagaagtacagacatagatcaaaggaatgcaataaagaattcagaaatagacccacacaaatacacctctgtgttgccttatttttcagaaaagctctagactcagagtcaggaagcccaggtttaggtccttggccttgcacaagtgagttcttccagttataaaactttgattttctgggtctaaatcacttaaacttttctatctcagttttcttttctgtttaagggaacatccttccttcttccttccaagcctctatttgacaaggatgataaaatatctttcttttttaagcataaggaattctacaaaccaaaagaattattacattggttgatgtgaataacacatctcaacaccatgaggccctgactccgcaaacctgaagtcaaatgccaagaactttcatgaaatttattaatttattttttcttcccaactaacaccactaattctttatttggactccttaaggagcatgaagaatgggactcattcttgcagaactgtttttagagtttgctactgctcaaagctcagagtttggccatgtgaacttctgagaagtctgtgaataagagattttacagcaatttaacagtggttcaaagatagatgctctgtctcccagtagaatacttgtgcttgtgtgggcagaaaattcttaaaatgattcaaaccaaccacccaaagaggattatatgtaaattcatattgtgtgggtcctgggagctttgaaaaccacatacacagagcacagaaacacacaaacacacccaccaacacacacacacacacacacacacacacacacacacacacacatacatgaatagcacccttagcaccattgctaccttatgtgattcctaccatgaaaatctgcactttaaaaagcaggaaaatttgaaatctacagatgtggataacactcaaacttgaattgggacacaagaacttttccctctcaggctagtgagatagtatggcctagtggctacaagggtgaattctggagataaattttctgggtttaaatcacaattttacctttcattaactgtgatttggggcatgttttttaactattgggtgccttggtttgctcttcagtatgattggaataattatatacaaaatatacaatatctatctcacagtattgctgtgaggatttgaagaaatcatttatactaagcttttatgcatgaaatatatttagaacagagtgaagcagaagtatctgtgttctttcatagaatgtatgaatgaaatgggacagtgggtggtcactgccttaaaatactataccatatattttgtcatggtgctattgcaacaatactcctaacattatgtatttctttatttgagtcactgaaatacaaatatgttctgagaagagtcagcagagtgatttacaaactagctttttagactgggaggcacactggagatccaggttgggggcctgggtctaatctcagggctctacttttttaacaaggtatataattgtggacaagtcaactggtgttcctgaacctcattcttacctgcacactgaggaggctgaactgggtgatctcggaggtcctttctggctgtaatatcctaagagactggatgctccctaggcaaggaaactgttttatcgacgtacatactgtggaagcttactaatgcaagtctttattaagtagtttttctgtagcagccgcttttctaagccctttgacctatttaacccttgcagcaatcctatgaagaaggatttatcattatccccattttacagataaggaaactgaagcagacagaggctaagtgatttgcccaaagaccatatggctattaagtggcagggctgagattcataatccagtaagttgaggtacgcacaccaggcattctattcagcatcagacagtgctaggcaaagaataaccgaagaagagggactgtgttctattcactttgttttccccacagatctgtaagagtgcctggagctttttataggttctgaatagatatttatcattcttgcagtggcttgatcttggctcactgcaacctccgcctcttgggttcaagcgattctcctactttatcctctggagtagctgggattacaggtgcccggcaccatgcccagctaatttttgtatttttttttttaaattttattttaagttctgggatacatgtgcagaacgtgcaggtttgttgcataggcatgcatgtgccatagcggtttgctgcacttatcaacccaccatctaggttttaagccctgcatgcattaggtatttgtcctaatgctctccttccccttgccccccaccccgtgacaggccctggtgtgtgatatcccactccctgtgtccatgtgtcctcattgttcaactcccacttatgagtgagaatatgcggtgtttggttttgtgttcctgtgttagtttgctgagaatgatggcttccagcttcatccatgcccctgcaaaggatatgaactcattgttttttatggctgcgtagtattccatggtatatatgtgccacattttctttatccagtctatcattgatggacatttgggttgattccaagtttttgctattgtaaatagtgctgcagtaaacatacgtgtgcatgtgcctttatagtagaatgatttataatcctttcggtatatacccagtaatgggaattttttgtatttttagtagaaatggggttttgccatattggccaggctggtcttgaactcctaacctcaggttatctgcccgccttggcctcccaaagtactgggattacaggcatgagccaccacgcctggcctatcattcttgtttttgttgacgacaaaaagttgttggattaaattgctttcagccttctgggttgctaagtgttgcagagttggctgtgttaaatttcattttcttttgttaatgttacccacacaaggtgaaggttttggttggggctcaggagggctcctgactggggagaaagtgggaagatccagagcaaggagaagacaatgaggctgccaggctttgggctgctctggcctctctgctgcctgccactgtcttcatgtccagcctcgctgtgtttctataaaggtggagttgtacctctctgatttcccctaaaggtggcctggatgtggtagaagaaagaggaggcaaggcattacctgcacctggaatactgatgagtggtttgctctttcttgtatgcccagtggcctggtcttaagcctaggaataaatgtagtcaccatggccataaaacggccccactgctgggcttgctttccctggcctctgtgagttccatgctcattatatggactccccatagcaacgttgagagcttgcttatcatttccagaagtgaccatggcagattaggaatatatgtttattttgaagtgggtttttttctttttaaattttacacattgttggatgaacataacatcaagggctgctttcccaactgtcttaggaaaagagctctaatgttggagccagtagccctgcgtgttctcatcccagttttgattataactgactataatactgtaatgacactctgacctgtgttcttttatgactgagatttccggtggggatggaggaggtgtctgatgtacagaaccagggggatgctgcctgagccaggttggggacggagagaagaggctgaatttcaagacactgacatcatcagtactggccctagtgcagttacatacctggtcctgcaacaaataatgagtatttagggcacatatgccaagcattaatggggtcacgaggtggatcgttcttttgggtgcccttttatatgccgctgcaatcagagaagcaggacaccatgtaggtgagcatctgctgttttcacagctatttgaagctgcaacccagtgtactaaaagtttccaggctgactcagtccaaaggtgactgttttggaaactttgaatgagattggttcggcaacttcagtgttatgtaagtaaaaggatgagagcagttgaaagagccactgctctggacatgttctaagtggcttctaccaatgggaatacgtgagcgtgcattaagaatgtagcaagtgagactgacatgtctccagtacaagcacagcacgtacaaggacacaacttcatgtttggttcaatgtgagacttctctgtggctcctttctcttcatttgcacagatatctgtaccacccagtataagtggtatactaatcgtagctagcctgtgctgcatgcctgctattttctgggtaattcccatgtgttttacacaggttaactctacttcctctcatggaaactacttgttgtcgaaataatggttatattttaccaatatggcaactgaggcacagagatgttaagtgtttcagcccaggtaaataagtggttcaatcaggatttgaactcaagcagcacctaccttggagcctaagctcttaaccacagcacttcactgaacctataaaatacatgtttattggttttaagctctgctagttgaagaacatttatacatgtctctattaaaaattcacttgtgtgtgggttatgaattcacccataaagaagactgccatgacgcacggaggaggggtgtctgtggagcttcaggagacgtgataatccacaaactgtcctgggttgaacttagctattattctgccaggaaactgtctggagaaggtccaggaaagtaccaagaagtaaagaagtacctgagagtgctcagctcccagtgtgtcccttggcatctgccagtcacagcttggttggttctggctgtggggccggccttcctgagacccttgtcagggggctcataccctggtgctctgttttcactgatgatgaagcctcagagcccttggtcccctcatgatgttctgcgggaaaattgtgcacacttttgttgtgtgacttaggttctttaactcaggctggttgacatggagcttggttccagtgatcagtgctggctttagatatgatttgcgcatctctgcaggctagtgtcacgctgcactgtggatctggactgtggctcgggtgccagttgcaacatagtcttcaaggatagccaatggcgagacaacagcactctgtcatgcagctgaagttatggaaacacatgatgtcacatgaatgtctattgtgtgaggtgatggttaatacctgtgtttccaagaaagtgccaggtactggctagtcctcaccacaaccctatatgtggtaagggcagttattaagcttattttataactgaagaagcattagcaccaacagagaagataacttgcccaaggtcatacatgaaaaccaatggagaaattaaggtttcaacctaggcagttaaggcctaaagtctgtgctcgtgaccaccaagctatctcaccggtcccctgtcaggctttttaggggataaagtacagagtaaagtagaactttcctcaaagactgtcttattggtctcacttatttttttttttgttagtctttgggtttactttaaattgatgggctgctggaaaaaatgtaaattgtcatttaaaaagaaggcatcaaggttttgtcttaggttaatttttcaaagggcttaccaagaacacagaagacagaatgccagctgggtgccgtggctcacgcctgtaatcccagcactttgggaggccaaggcaggcagatcacttgaggccaggagtttgagaccagcctggccaacatggtgaaaccccatctctactaaaaaaaaaaaaaaaaaaaaaaaaaaaaaaaaaaaaaaattggccaggtgtggtggtgcatgcctgtaaccctagctgcttgggaggctgagttgggaggatcccttgaacctgggaggcagagattgcagtaagctgagatcatgacactgcactatagcctgggtgacaaggcaagacaatgtcaaaaaaaaaaaaaaagacagaatgctgagcaattaagaactactttatttagtcctgtcttatcatttgtggcctttgtgtattgagcacgtcctgagagctgggcactttctaaatactttacatgtgtttcctcactttatgcttgtaactgctttctggaagcaggactgtgattattcccattttatggaagaaggaaatgaggttcacgaatattacataatctgctcatagtcacaaagctagcaggtggtggggctggcgtagaaacccaggcagtctggctccagagtccatgttcttaattaaccactcctctagggtggaaagctcactggttttggggttaggacactcatgccagctctgccaaaatgtcaacatgtgtgacactggccaagtcatatctcctcttgggttctcattcatttatttactgattcattcagcagctctttccagcatacctaccatgtgctaggcattgttagtactagatacataacgggtgataagatagatttcctcgatgcttctgtagagtttacagatggattttcagtttcctcatctgtaaaagatgagaattaaaatatatgaatgtttctcatcctttacaaaacccacacatctttttataaacataaaaagttatgccttccctaatgttatttgaaatttctgagtaaataaccatgactaaaaataaattaaagcaattataatagtgagtaatttttgtttgaatcacacaagccctcatgcctgttcctgaggagattctcctgcgctggccctctgagccctgggcattctttcggttaagaatcatgggaatagtattcttgctctaaaaacggacctacagttatattttttaattgctttgaaatgctggagttgtgtctatttaatttgtattcattctttcaccaagttttggctcttgggtttgtatggcagataaaactttactcattccttttactgaaaacctctttcccccccagggtatagtcgtgagtcacgagctctctcaccaactgacatttccccatcctgtttttggagggaacaacaaaggacatgcctggtgcctgacacagcgggcccacaggctgctcctttagtggccttgtgagttcgatgagcttttggctctaggaagtgcctgggctgctattactctgtgaatctcatgagagtcacagacctcttaggagcaccagccaggttgtaaagatctcttgaggactgggctctggaaggactggccactccaacaccctgccttgcccttaattgtgcattgcctggtgttctttaattgcctcacaaatgcccttgaaaactctcagggatggcctcactgtgcatgacaaaggaatgcaacctactgtctggttgtactgaaggagcagagagcaggattctcataatgattgttcaaagaatttatttatgtggagtcctaaaaggagtgataggtgtgaaaaaatgcaatttaattcaacaaacattgatgcaaacgctgtgcttggtgacagcaatatagagatgaataagaccagtgtctagtgacgtgctggcaagtacaactggctctgtggggaggcggtaccctgatttgtaccttttgctgatttccattgagtaaatactcttgccatgtttgatttcaagctaccaacatggtgtcaattggctcacagaagccctgaaaatttaataatcagctcttatgagcctgtacaaactgaacttgcattctgctaccaatatctacttttgaagttttcagtttagattggaagatacataaattgccatgcagtctggtaaagacagaaatagaagtatgtagaaggtagaaaggtatcacaagggacactggttcaattctgcggtgggcatatccacatggtaggctgcaaacaaagacaggcaaggcctgtaggtgggtggagacagagaccttcagagcatcctcagtgccttcaggtcatggggaaatgccttggcctgccttaaggtcccgtgcagtctagcctcaccttacctggctgaacattctcccacatttactgacacaaaccttctgctctagtgagtccagcccagtgttttcagtcttgagagcacatccctgccttggctgacacccacctcctcccaccaccgtttagaaagtgccttccctccacctccacttccctgctctactcatccttctttatgaatgcttcctacaacagctccaagccacagaaagcactgacagaaagggaaagattgatcacgtgaattccattaaagtgaagaatttatgtttatcaaaagtcactgttaagaaaggaaaaggcaaacaatggagtcagaggaactgtttggaacacttatgaccaatcgaggatttgtattcaggacatgtaaggacctctcacaaatcaataagaaaaagacaagaaaagggaaaagagaccagaacaggaacttcacaagaatggatatccaaatgacatgaaaagaagcttgccttcactccacctttacctcagtcactagggaaatgtgatgccactacatacccactaaagtggctgaaaccaaatagacttgtattaccaagcattgttgaagacttgaaagagtgggaaataatgtatactgctggtaagaatcagacatggtataacctatttgaaaaacagtttggcaatatttattaaaatggaacatttgcatactctatgacccagcatataatctgaccatactctatgacccagcatatgatatgacctagctataatccaatgaaaatgtatatccatatgtttacctaaaagtatgtactggaatgttgatacagcatcattagttatggctccaaattggaaatacccagacattcatcaatagtaaaaaataaattataggctatttgtgaagtggaatctttttaaactatgaaaaagcatgacatactgctccatagaactacatggatgaacctcacaaacctaattttgagcgaaaggggccaaacaaaaaagaaaacaaatggagttattatatttatataaagttcaaaaacagacaaaactatatgaggttagacatcagtttacctgatacctttggggaagagcaagaggttagtgactgggagggctgtgttgggggcttctgagttgctgaggttgttatatttctggccctgagtggtgataacacaggtatgttcactttgtcattgagctttacgtgtgcaatttgtgtacttttctgtatatcttacatttttattagctaaaaagcaaaggagcttctgcatgaaagtattagaactagtgctggaaagtgagggagtgtttctgaaccgcctttgtgtttttcttttgacgttttctatctttatgagtttattcatcaaacaaagacattttgagagtgacaatgtgccgggaactattttaggtactgagagtgaaacaaaatagaaacaactgctgctttcatggagcttacattctcaaggggacagcaaggtccttgaacagacaaatgtataacaagtcaggggataagaaatactctgaagtggtattaggggataagaggataaagaataatggagctgggctgagggtttgggcactgactaggtgttgttttatatggggtggtcgaagaggacctctgaccaggcagccttggagccagagcctggatgaagtgagtaagggaggctgacaggtatgtgaagaacattccaggcagagagggcagtaagcgcaaaggccctgcattgggatccttggcctccgaagcaggaaactcagcatcattcttggcttctctctctcttcttcaccttcatatttgaatcaaatcatgatccatttgatttcatagctaaatctctcatagtttgcaacctctgcctcccaggctcaagcgcttcttctgcctcagcctctcgagtagctgggattacaggaacatgccagcacacccagctaatttttgtatttttagtagagatggggtttcaccatgttggccagggtggtctcaaactcctggtttgtctccatcccctccattgttgcctatttgggtaatagtttcttaactctgccttcccgtttccatttttttctcttctgattttaagtcactgactggatatgccactcctctgcctaaaagccctccagtggctctgctttgctctcagagtaaatgccctacaaggttttggttttcctcactggtctcatatctttctgctttgccgtacactccgtgcttgagccacaccaaggcgattccatgtttcccacattccctctgaggaaaggccctttagtctctgggtctttctttatgagggtgcatctacctgtggagttctttcccccacctcctcattttatgttttgcacatcccttagatctcagcttagatgttgtttagtctgggaagctgttcctgtcccttaaaccttggccaagtccctgtgttctcctatcgttgccccgtcatatcattttgtcattgatttttcttttttccagcctcccatgaaactctaagacacatgtgggaagtaactatgttacttattcatagtgcttagcaaagtttctgatgtttagaaatttctcaataaatattaaaaaaagaatgcatgttgagctacatttctgtgatatgtcaaaaatctagaagtatttttattagtaactgatagaaatatctttcagtcaaaacattattcatcaactcacaaaaaagcagactagctttgtgtttgagttttgtttttgtttttcctggtaattttgtgttccataatttctcagacacagaaacattatctttcaaattttaataccactttatttgactcaatcacatgtaaaatttttgttcagagaattttgaatgtatccgtgaaaaatattcaaatgtcgaaatccaaatgtcttgctttggctgtggagcaatatcattactgtgacttagttctagaatttagacttaattgctaaaaaaaaaattttgaattcaactttattaattttgtcaagtttttgatgtgctaggtggacattctttccaatttattacagtcccttcatatagacacaaaagcttttaacacgatgggaaagctggtgagacaagtcagaaaataaagcagctcttttttctttttttgttgagacagagactagttctgttgcccaggctagagtacagtggtgcgatcttggctcactgtagcctccacctcccaggttcaagcaattcttgtgtctcaggcaccgaagtagctgggattacaggcagtagccaccacgccggctaatttttgtatttttagtagagatggggtttcaccatgttggccaggctggtctcaaacttctgagctcaagttatccacctgcctcggcctcccaaagtgctgggattacaggcatgagccaccgtccccagccagaaagccgtgatttttaagctgatgctttgtaccatcagtgtgaggagtgatgctattgatccctgctgggcatgagcattagaagaaagttgagcagggacttaaaatggggatgtggagcactgtgccaatgtctttcaaatgggcttttaaaaattattttaacaggattatttggagaatcataaatgtttgagcctcagatacactcatagctaccatttactgagtacttgctatatgccaggcactataaaaactgctttaaatagacaatcttgtttaattgtaataacagtcatatgggattgttaccatcattcccatttaacagatgagaaaattaaggctcagagaggttgagtggtttgccctaggtcatatagcaggtcaaagctaatgctgaactatgaacacagttcctctgactgaaaatgtgcaaggctactaacgactaggtcctactggcttatgtattgaaaagtagatcaatgaactcattctggagctaaatgttgtctattactgtggattatccatgacataacccactcattatattccagtattggttaaaaggtaggagagaagtgatagtaaatttcatgggttcggcatatcttctgaccgacagaagacatggaaatgttttaaatgtttcttttcctttttttttttttttaaaaaaaaaacaaaaacaaataacactaaaagtttcaccaaacaagggttcataaaaggatcgtctctaaattgtgagtgtggtgagtgtgcatgctctgagcaaaaagagcctcccctttctgagggaattgtgaccctggaaaggaggagagcaggaacagctggccatctccccctgaaaggccagggcccccctctcaggcctctgggctccagctctggctgagggtgtgtttgtttggctgtgactctttcccttctgtttccctctcggtgtcatatttcatgagctccaggctcctgcctgtttcagcttgagcctctggctttcatcgctgcctccttggccaaagctgagtgagggcttgaaaaaaacactgattggatgcacatttagtggaggcgattgctggaccagcacctcaccaatccccagccccaaatgcaactgacagctacaccctcctggctggagcctaaaccagaggcccctttcctccctcctctccacccatacccttgctgtttgcccaactcttcctgctgaaatcagaggcagcttgtgcctcccagccttcttccctgcccccgctgtctgcccagccaccagcttcccctgggctggaaagacccccgcttgtctgactgtgctaatcctctgtttgaggttccagaacttcccaattgttgggcctgggttcctgtacttagctgcccagagtccacttctctgctgagatttctattatacaagagattcaaccagaaccctctccgtgggcctccatgcctctttttgctgaattccccattctcattctgcgtagggggtgggagttggtgggggtacatgcaccttgagtctaatcatgatcttactggggagagctcagtaggaaagtaataacatattcatttaaacaactttttctctgttaatctttttattgaacttcatagaattaatggataaagactattggttagagtgcgtctttcttagacgagatggagttagagacacttaaaaaaaaataaggcttgccactgcaggagtgcacagagcacctcaactattggagcccaggtgatctcttcagtgggtcataaaatctgagtcataagaacctcatggcaaagaaaacttgaaactgcaaagtctcacatagtcatttgctgaaaactgaagtgtcccaacaaatgtcgggttagacctactttgagaaacacattccaatatgagatcgaacctgacaattttgcatgctaacctggactgtttcttattagagcaaaggggatgggctttttgtttgctttgggtatatttgtttttgctgccaaagtgttgtaatgtcatgattatttaatatgtatgaggcctagttgtgtactagggagagtcaaaatacatttactacgaaatgagaccagctccagttgtttaaacagctccagttgtaataataagagctaagacttgatgccaagcactgtttctaggtattaacttattgagtcctcatgattactcctcacgatggtcctcttggaaaggatcctatttttctatgagaaaactgaggcttgagtgttaaggaacttgcttaaactcacacagttagtaaaggtcagcttttagatttaaagccaggcaccctcattctagagcttgtggctcaaccactgagctatactgcttgttagggttgttggtggagtgatagtagaagtagatgggctagagtttttcatttctaaccctaaaaatctatagctattaacactgaagacagcaactgccaattaaataaatcctcaacaagactgagaagagaatctgctaatctgttggtcactaatgtctgcagtttatctgcttatctatctgcagcaaaactgtcttagaacactttgctgaatgaaattgaacatggaaagctgactgaagggaaaacagagaaggtgggatagttgagaagggagtaagatcagacaaattgcaatgctctgtgggatactgcgtccaagcagaacagtcaagggattcagttctcagaagctgttcaggtagacgccctccttaccagagtcggttagcctcttgctgtatgcacacttgaggctgctcaaagcgcgagggaggcatggtctgtgctcattccaggcatccaaagcaccagggaggcatgatctgtgttcattccaggtgtcttatctcgctgccacttccaggcctgcacattataggcaatatatttactacactctcccttctcctttattttttacttctggatgtgccatggtgaatatttttcaggcaaatcgggggaatcgtttccatttcaagctgggttgaaatctagcactatgattagggttgtgctaacctctgcctgcctctcccctaactcctgctgtgtataggtgggcatggctcaagcatcctcagggctgggagaaggttgcatcaggaatgtttctaccaacagaagctggccagtgggaggcttgtaggcactttgtaatttaccattctcttcttgaactatgcagcagtctgaggggctgtacagaggattcttcccagtcattcccattgctagctttggaggccttctcccacaattcatagcctcctagtaatgtgctttattcctaaagcccagtccttggggtttttgaagaaaaggaaggcagatcagcatgccttccctagtctgaaattaccctgtttgactcatatagtgtggagctttataatctgtaatccaaaattgggattgtctatactataaggatattctctgggacttacgcttatttaaccaaggttgtctgcaatgggaagctcccatgacgggagattcaggagaaggctggcataggcttctaacttacaccagtgctccctgatgcctgtgaatgtggggagagggcaaggagattttgagaacagataagagacatttgaatttctcaatgccttctgaaaatctgtgtgcagagttgaattgaaacttaccttgttagcattataaatctgaacactttccttgctaggccacaatgacttaataatatcgtctaaaggatctatgttcactctgcttgcactgatttacatctcctttttccaattctgcgtagtctctggacacttctacttccaaatatcacctgtttaaggaatagcacttaccttgtcttgtactgtgaacccaaatttctgtgaaaaatggactgtagcagttgttccagtttgagattgctgagtgtcatgaacattggttttgaagagtatggagtgttgttggaggacagctcgaggctaaatgtggttgtgcaatatggtttctacacactgtccagcaggtggttggatacagttatgccattctctgcttcttgtttgttgtcttcaaaacatgaaaaaataaaagcaaaatatagaatatcttcgatgaattcagcttctcttaatctcacttttatctcctttctgtaagacttagtcattatttccgaatatgccatcaattttatccaagtgaaaattcagttttagttttaaaacacacagatataaaaataagatgcaaagttctacagtaaaattcttagacataaacactgagatttttggattcacaaataaatagtttagataacactcagaaagatcttttcctcctaattagcttctattgtcacctcttcctaagttgatatgtagctcaatttgttaggaaatggatttcccacgcatgccctaactataatcataagcatctgcaactctgttttcaaacaaagcatctgcaactctattttcaaacaaaggtagttactcatgagagagcttctttaaactgcaatggaccacacagaggtggatgtctagcacatttacagtgaccatgatcctatctctcaccatttcttcttttcaatattgcaggattctaaccatatgactttcccacccctcacctgatgtttggcgacaatatcctggcttctactggcaacaccatcttttgctatttgggtaaatgtgctccttatcagccttggatcctacccaggctcagggccttgtgagtgcaatgtctattgggctattgtggaccccatgactatgacccagacactcagttttgtatgccacatcccttttcagggagctaggtcaaggacatcatgcaactcatttgcatgccatattgaagattcacacttgggggaatattttattctcaggcagctaagaccttgaaactccagcatagtatggagagtgctgagccttcagcatttttagcacatgatttcagccttggaaatctgatgtacttgcagacctctacacaagaggaggtatttgcatagaaacatgagcatgctggggctgggtcatccttttactacacatgttaaagcatacattgtaaccaaaattttggaagcaatgagaatctcttactctactattgggatttggggtcacagcaagactttggaagaggtgttactgagaagatgcctctatgaggtgttactcaaagtcattaattacttacagggctctacgagaatggcatagttcatgtcttaaaaccgcttatagctactggttgagacagaaaaggaaactatgtgctgtgtgattaaaccggtgttttcttttttgcattctgtcttctacatgtgttgtggtgaaatgaaactttaccacattcagcagtgctcaggagaaacattgagcagtgttggtatatatttcaatggcattcaaaaccctgataaataatttaggacttggggagatctgggtatgggaagaagaactgaaaaaaaaaaaaaagcagcggtaatttactaatatatgtttgtaggttaaaacactttttatagctgaccgtagtagatagaatcattctttacaactattaagtggtattaaataggttgacccaactcccttggaaaagtgattaattttgtcttccagacctgacttctgaagctcaaagttggtttaaacagttcagctgtagtagaggatagcctgatatcctagttttgccacagtatctgggccagatggcatttgcagtaaatggaaggtaacaatgatcagctctggtatttacgtgtgtaggtgatatggtcatgtgggagtgttcataggcttacaagccatatggctcttggccataaactattgctaggtaaggctttgactctgtatcagtatgaataaagtagctctttcagctcatgagtatccatttgctttgtgtcaggctgatgtcaagttaacctgcttttgcactctggtgaacagacacatagattattaaaactgaaagtgatctaaaaagttatctaaaccaatatcctacatgaagaaggatcctccctacagcctcacaagtaagatgattagtcagcctctacttgaatatttccagtagtggggagctcataacctcacaaagaagcacagcctgtttttggatggctctaatttttagggtgttccctcttatttttgatgaaaatctgcctctctgcaacttccttagtcatgactggagttctgttgtatgagctgaatccttttatttcagaatagggcatcacatatttgaagaccaacattaagtcccagtgtagttttcttttttctgcatgaaacattcgaaggtctttcagtaaatccccttgttttcttggtagggagtcactcatcaccacttttctcttcccactggagctgtattaagctccttgaaactttgcatcctggagatacagctttctagtcacaaagcccaatttaccttctctgagaagagtctagttctttttattagttttagttgtacagtttgggattctcctttttctcctctttgtcttatttttcttcccagcttcctcctcacgtggcgttgttgtgcataaagttctgaatcatatttttcatctttgttcgttgcaattattgtcactctgtcttccttcttggattatttctttcattctccttagaaaatttttgaattctcccatcagctggagaaaagatatcttttaccttctcctccatcttatactgactatgcaagcagcttatacttaggtcccatgcaagcagtgacttcagaaaaaacaagaataccaacaatgtatcatctcctattgttggctcttggttttgaatagatattccctacccaactagattcatgtgtgcgactctgagtataggtcattcatcgaatgtctgttactgctagagtctttgagtatgtagtctgttgatgtgaacctaaatgtaattggtgttacatgcagtttaaatgtcaccctatttcaacctcatgattctcaatctttatgccaatagctacagtatatttattgtctaccataggatctaattacataagctttggtactgctcgttgtccagaaggatcataatgttagagaggacatgtcttcctcacattatgaaggactaagaaacagaggctcagggagaatatttggctcatccaagattacaccattagttcagcagctggtcagatgctgtttccgataagccactcagctagctaactcccttggcttcaatagagaaagtgacttaaactgtggcatttctggtcttttatactctctctctctctctgtgtgtgtgtatatacattttttcttctttatcacctagcatattttctgatatgtaataagttctcaataaatgctggttaatgaatatttcaagccatcctttccttttggaagttgggaacatgtgtaaagggaagaagactagattgagtgataaagcataaaatataactaggaaagtcatagcttgggatagagagtatatgcagtttgttcagaagtatataaggcattgtgctatgtgccacgatgcctatacagnnnnnnnnnnnnnnnnnnnnnnnnnnnnnnnnnnnnnnnnnnnnnnnnnnnnnnnnnnnnnnnnnnnnnnnnnnnnnnnnnnnnnnnnnnnnnnnnnnnnnnnnnnnnnnnnnnnnnnnnnnnnnnnnnnnnnnnnnnnnnnnnnnnnnnnnnnnnnnnnnnnnnnnnnnnnnnnnnnnnnnnnnnnnnnnnnnnnnnnnnnttccctgatatcagtgagtttataatgagataaacgtattatatttggcattgtgaaaatgagataaaaatagagataagactgaatcatatggaaaaaattagtttccagttcaagagaatgttatcaacatcaatgaggagttcagagaagggaaggtaatgaagagcctgctattatgctattgttctcatcagaagaggggtgagtgtgagggaggaagagaggatagatggaagatgagaagagggtgtgtgccagagcactgttgtccatttagtgccagccctgtgtggcaaataggacacaaacctccaattggcttaagttcctgaggtagaagagattaagaatgttaaaaagggaacaaaatttattgagcacctactataggtgaattcatgaatatttcttgatcacctgtctgtggaaggcactgtgttaggtgttagagataaagagagatactatcttcaccttcaagggcaggccaagcagtgtgctaggaacctcacaaaaggaggtgctgaagtcacataagctccccttatgtagttattccagttcctggttttcacgtctaatggatttttccccatagcttctccccctccacccaaccccagcctttccagagtgtgtctgtcttcccaaaatgagtttgatactttgtgcgcatgccgggatccccatgggattgatgacatcatacgccattggctcctattgcacacaagagaggagacagatctgcacattcctgcagttaatgctgagtagaatcttggcagaggtggtggcatccttcatttgactttagaccttcagcctcccttttaaagccctggctcacacagttattgagaagccttatcctgcaaggaacctacagcttaggaaagagttgcccatgtgtctttgctatcaaacaaaagatattggcaaatcttttgtcgattttctattctggcagaggtaccatttattatggggtagatgggatatagataaagcatctccctgcccctaatccctgccttgctgagataaatgcctgttccattccccaatcaccagaaaatgccttggagcaatggagtctaacagcctgagagttgtaaaggggcagcaaagccacttctgcaggaagagagtgtgcatgaaccttattcattgtccatgtgtggagttgcttcatgttcatgctcttcaccctgatttgacacataccaacatcaaataactatctactctaccccatttggatactataataaaaaaaagatagtccagttaccttataaacaacagaaatttatttctcattgtcctggaggctaggacatccaagatcaaggtgctggcagattcagggtctggttagggcccactgcctggtttatggatggcatgttctcactgtgtcctcacatggtagaagcagtgaggcatctctgcggggtctcttttaaaaggaccctgaaagagggtgccaccctcatgacctaatcacttctcaaaggccctacttcctaatactatcacattgagggttagaatttcaatataggaattttgggggaacacacacatccagtctatagcactatctgataaggcttctgaatagtcctgggccattttacataacgggggtttactaaggactctcaacagcatagctcttgcttcaaggggttttccatgcggggcctgccagaatcccctgaagatttgcccttttgcttttgggagaatcattgagagaaaaaggacctggctcctgtgcttttcgcatgctcacccactccggcccttctgattaatgtttgctgttctgctttgcagatgcctcccaggacccagagggagactgtagcctcatttctgtggagacctttggctggactctcctggctctcccagaggtgagagaccgtggttcctgtagcctcaggcttggcaccagctcatctctggtggatccaggattccagatatccaatctcactacagccagggcctctttgtcccagtgtgaccttgcgggctgtccccctgactgcgtcttaacagcccctgccattggtgattttcattccagctacgagccaatggatccctgaaagcgactgtgtgggcttctctcaccatgtcgctctggcctcagcctggcggtgtgctcctctgtggtctggatggggatgatgaactcgggctgcccgttgtttttgttttgtgatatttaaagcagccgaagctctcattactgtaatacagtatgtgcctgggctaaagggggagcagcattccttctggatcagggggcaactctattctgttgtggtgcacccgctggagtgtttagaaccacggctggtagatttacagtgccagggctgacaggggccttggaactcctccattttcattcattccagcctcgttgttggaatgaagagggagctgagcccattctgggtatgggacgattgcttaggccctggggtgatgagtggcagatctgggactagaactcaggcccagaggccagcttactgtcatctggctaagtttctgcttctgttctcttcacttgttcaagatccttctgaggccctgaaccaaatgaggaaaattcatgtaaatcttagcacactgcctgatacataataagtgctccataaacgtttatcagtgctctcataagccctgagacatgcaaaatattcttgcccttcagggacttacagtcttgaggaggagataaaaatttcacacatacacactaacacaattaaggagcaatttaagtcactaaatggttatctgctaagttttggggaataggtgcagtggatcacgcaagagaggagacagattattgtggcctagaagaagtgccatggtgaagataagagcataatgtgtatgacatctgtgtatgacatcttttcaactcctggcagtgagatgaacaggtcagcagccattcctggacactgcagagccctcaggccatccactcatctacccagcacattcactgattatctcccaactctgtgctctgcataagaatgtaaggaagaccatgacaagaccctttcctcaagcctagccagggagacagacatgcataaagatactaccactgaaaaattctacattcatatgtgttcatatcctcaaagcattgtctgagcccacaggtgggtaggcaagtcagataggagcaagagtttgaaggaaagcatacatttacctggtgaaaaggggcaactcacaagccataagctcttgtgcaaaggggctggtaaatgtgagtcttctgcaggagaggtggagttgctgggaggttagacccaagcaagggcattctgagaatgagattgagaagcctctgaggccagcatggggcaagcccttggtgtcacacttggccctggcaatgtggtatttttaacctgggccagaaagtggagaggagcgggcctggtaggatagagaggagggctctttacttatcaagagtaggtaccagatgctggtgactcaaggggaagcttcctgagtggagatggagcctataggtgtttaatcgcctggaacaaacatattttctgcactgcttggttcagaggctgcaagttaaagtaacacagaagagaatgtccggccagcaatgtgaaggaagcatgaaacggaaagggttagaagctgaacttctcttgatcaatgactttattatcttggcaaggattgcagaaactgtaggtgctgagggactgacttgtttggaggaaggggtagggaccaggaaaagaatcccagacacttggtgctaatccaactgctgaatgaggctttcaggctctgggattcaggcaggaactcctgggccatattcttcctaggtatggggctagagagccttcaatcttagtgtctgtatgtccctgggccaatctgctttgttctaccatgcctaacatcagaaaaaaaggggtagattaagtttagagccactgctctgtgtctccatcctgcttctttttcctaaggcaattgagccttacaaggccttctaagtccctatgaggtctacagctgtcagggattggtgaggatggagaacaaaccagtctgttctgaattcaactcttgctttctttctccctctcacaattgaaggtcttcctgagcctttgcctctttcaacagctggatgttgagactgcaatttttcatgattgcttgttttgtattttttcttcatggtctttcctaaagtctgttattcatccaggtccacttatacatcttctaatctattgcaccaaccctgcagccatggcctggcatgaagctgcttgctcattgtcttgttggtttttccaaatgctcacaggcgctagtcatgtaaatctcctcctggcaagaaaaaaagactgactttttgttgttgttgtgttgccccaggtgattcagccagtcctgggctcacaatagatgctaaacatacgattgccacctcgactgctgatctttttcttcctatacaccattctattcataccgctattcaaaaattgatatttataagcacttactatatcccaggaatggtactgtaagttctttatatgcattattccatttaattttaatagtgataccattttctacttttaaccagcttatactttctacactgatagaaaagtgtccctaaacccacagactagttagtacctggctgttttagaagttcctcactcatgacatttctgaagttatcactacaggatatggttgcaaaggcctgggaggagaaatcctttctgtctctgatggtttcagagaaggtgagaggtctctgtctctttgtggtaaaaacaccagggtaggccttgatctcctgagtcttgagtatgttaagggaaagacactaagattgctctgccaaaagggcagacagaccctgcctggtgtctgggaagttgagcccaagtttctctccaaggagggtctcctgcagggatcaggaaggagggtctattggcatcacacatgatctcttctgggttcaggaggggttcctatagctagatgagatagaattgattgatgtctcagtgatgcttcaggccatgttgattgggcctgcactaaaagtaagcagcccttcagagccatgtgctctcaagaggcagcacagccataaccgcaagagtaggatggtcctggtggaaatggcacaatcaaaacaagctcctgggccttgtggctttgagtggctgaactggaaggttcttgaggtatgagcactctcactcacggtattgatcaagcagcgtaatcacatcactgcccccacagaagtggctgccactcagttctcctcagcccaggctgatttctgctctgctggttcataggaaactgcttgggtctttcatgactgctgaagcccaaggcactttccccagaggcagcatcactcacaggatggaccaaatgaaatgtcctggtcaaaggcaggaagtttgtattgttgttcttgcctattttactatcatgtaaatacctgccaaccaacctacacatattctctgagtacttactgagtacttactatataggtgttaatggatacagaaataagagtatggctaggggtggcatgctttttgcccctaacttgcaaatttattgagaacatgatgccaggcacagtgaaaaccaaagagaaatacaaataaatggtaacatttatgagacaggtactaggttctagacacttcttacatgttaactcatttcatccttacaacattcctgtgggcaggtgccattattactcccatttttacaggtgagaagacagaggtgccaaggttcaagtgtgtgcccaggtgcatgacactggtgagaggtgggagacaggactcaaacccagcaagcctggtctcagacaaggtgactcataaggagcagcaagggaggtaggaggcagaacattgagtgcaggggctcagagggtggagggaagtaacttcaatctggtttaaagaaaccagttatcagagacagacagggcctaaagaaggtatgggtggctcagagttttaggaaggaaaaacaggaaattgggctaatagggatagcgtgataagagaacaagtgctaggctggaataccaggggcctggccttgcctgtgagcagctgctgcccctggggaggtcactttgctttttgggctgccttatttttatcacctccaattggagagaattgagaaagatgagctttcaggtcccttcaggtttttaccgtatggttctatgattttgagggctggcatgtttccttggttgcttccaaaagcctctgaccacagtccctcaggctgaccctcttgtgcccagtaatgtggaaagatgaccttctgctcaccagcacatgcttccaagggctgcggagcctgggacagaaggtacggtgggaaagaaaatgagaggagctggttgggaaagatactcacatgcagaaaagtttccagcaagtcagaggtgagagtaaaagatccaaatgaaaagctagagattgctagggctcaccaaggttgaataacttgtccagggtcttagcagactgagggatactggatgataacacttctaaaatactgttttgtatctggaaaatgctctgccttcagtttgcattttctctccttcttcctccccagtaatcaaatgaagacgttagatttgacatttcccagtgtgtacagtacagacaggannnnnnnnnnnnnnnnnnnnagcttgctatttcatccagtgtgggtcacctcaggtcacctggggcacatcctatgtgcccagatacttacggaaggggtcattctgggcctttggctccacaccgaggggctgcattttgagaatcacgaggttgggactcccagaggaaagttgagagttaggaaaacttcaacaaatcctcaggaatagaaacagaacatgagatgagaatgtttgggacagctctgctgtttgtttctgtgtatgtgtttgagggcccatctcttgccaaaaccaagctcatttctgcatatttgtttgcttaatatgaaatactccaaaactgctcttcatatttgtttaatctgaaatgaaaatgactcagcagagaggaaaaacaagatttaaatgccctgaatggcccctgaattaaaatacatagccctaaatcatgggggcgttcttctccccaccaaatcttaatcttcaacacacacaaatgcaagtgccacacacagtcatgcacacacacacacacacacacacacaaacattgtatttgcctgccccaacttgacctcagtccctttatctcttttccccttcatactccagcctttccagggtcctacctttcctgcaggggaggtgcatttgagcttaggtggagaggcctggcctgggctacaggccacagatgattttcctggagggccagcacttcctctccagtccagatcacaggctcagtgtcaagatccctgggggaaatctgaattttcattcttcagcaaagtcgaggccacctcagatagtccctagcttttggatctggaaaaatggactccgtggagagaatggctgtctaccaaatcagacatgtcttgctttttacacaagctgtattcctgaaaagttgggtataaactggatcttggtatgttgcatcaattttgaatgtactgaaaagatttgctattcaaaggaacccagcactggattcttttgtcaagggatgaattactttgtaatggctactcatctagtgatttatgagtttggtaagtagatggaatatttttatatactgaatgttattttaaatgtactgtgtgggatttgttattcaaagttacccggcattgaatccttttgcgaagaactattctgtagtgtagataaacatttcatgatttatgagtttggtaactttaggcatttcttaaagtgggatatacccctagttctgcttcagagaaaaagttgttttttgcaatgatcagacttggagaaaaaagagttctaccatatttgagttatggtcactcctgaggggcttaggaagaatggaggtactcaaactttccattttgttggagcaaaagatccaggagttgcctgctcttcttactttccatattatcactggggtggaaatgatggaggtatttttccaaagaaatgtagttcactattatagctacatttcaaaggtgtttctcttcatatctatatcatttgaatatatatttatatatatatacacacacatacatatatacacacacatgcacatatgtttatacacacacatgcacacatgtacgtatatacatatataatctatcatgtgtatttagatctaaagcaaagacattgcagtagggcttgtgttttgaaccactgaagggctgctgtttccaccagtccagagtgctggggcttgctctgagatcaccaggggtataaaccaggcaagaggagaacttaacttcctgctcactctttctcacttggcaggtcaaaaatcatttcagcacttatctcccaaggttcctagctgtgtccccataccatcctatctgagcactagtgtgaagcttgttttgggaaatgatctgattgctaaggcagttggaaaagagaaatatggtgtcatgtgtgtacaaccaagagctgatctaggatgcccacatattcctggctcatccatgagccacatattcattgaagttcttataggtaggagcaaaccctgcctataagaaccctacatggactggaactgtgtcaggcagaatgttcagataacttaccctttcaccatgatttggccctgaatgtgtctcagaaaaaggcttttagaagctcacccaagtacagagataatttgtgagacatttaacctctcagactcttgcttttttctttcctggagagctgctaatttctagttgtggctgccacactcctgtctgcctgatcttccattttacttcctggtttcctggtggctttgacacatggcctgtccagatcccagtgggggcagtcctgagatggagagctggtggtcttttgtcagatctgggaagtcctgagccatgacttcctttgaaatcaatttggaatgtccatccagcttggctagggaagaggattttgactgtgaagagggaagtgggttctttactacaaaggacatattctctctgagccacatgctccttgatgttctttggtaaatattgggctgtgggcctagaaacactgaccttggagtcaggcgaactgggatccagttcttactctgtggtcttctaacttagtgacccaagcaagtcaaaattaatctcatttcgagatagagatatgcaagatccttgaccttcaatgactcatggtcaggcttgagagaaagtcaggtaaagaagccaactctaattcagcacaatgaatgggaagcaccagccagaccaggtaaaacagcctcaattgagggtgaagtgacttagggccgtacttttctattgtcaaaaggagatgataatttctctccacaggattgtggtgaggctcaatgatgtaatgcatctataagtaactgataaagttcaggaattctaaaatagaaacaggcagtaattctcaactgttttcttcttccactctattcatgtgcaagatgtgctaagacatttcccaatacaacaagtgattcttgaagtataggacgtgttccccccacacctccaactctcggaaatgcacagaaagtgtccttgagattctgatagcctgcttccaggaaaaatgttttgtttggttttgtcagaaaagctaatataaatgacattaacaaggaacacattttccttgttgaaaatcaaaacattacaaataaggctaaagtctccctttgatcaccattcacaatctcctctgacaaatacagcagtccatctcctaactctgtcttggagggaaccactgctgtcagcatggtgtttaatcttccagatcttatatatatataaatgtacatgagtgtgtgtctatcataaaaatatatagtgtgctttacataaactttgcaaccttcttgttcacctaaaaacatgtcatagacttcaaccgttgtaactgtgagtagctctaatgcattcattgttactattgcatagcatttcacagtaggaatattctatagttaataacattatcctacggtagacatttttctaagtttttgttgttaaaaaatatattgcaaagcacttttttgtgcatgcctcattgtgtacacacacaagtctttctttagggtaaataagaataaatgggatatagaaattatggtatatgtatttttattgaaattatcttctaatttatatatccagcagcagagtatgagagtatgcatttgccatattattgccaaagtttatattatcacactttaaaattttgccagtctgataggtaaaattggcattcaactactgctttaatgtttgtctttgtgactacttgagaggttgaatacttttagatgtttacagcattatattgtctcccctgttgaatgctttttatttacttggcccatttttctagtggcttttaaaaaatgatttatagagattattaatactagaagttatttcattatacaatttcaaatatttatcttagccagttgtttacatgttatgtttatgatgtcttttggtcttaaagaagttttgaattttggtggaaatttttattattcttttcatttctggattttgctttccatgtctcatttgtgcaggccttccttatctttagctcatagcaaatttttctagattttccttgaaatattcttatggttccatctttacattttgggctcatttttgtgaggtgtagatataccttcatttgcttttgaaaaggctactaaagcatctgaaacttcttcaccaagtttaaatacccaccttctcatgtagtacatttccatttattcatgagtcttttctgggttgttcattctcctcagtgttctgcttatctatttctataccaattgcatactcagagaggcctttgctggccaccttacctagaacagctctcattccctttctgttacattactctattttattttcttccctgtacatatgtttctttaaaattcttcttcatttacttgttttcttatgtactataagttccatgttggcaggaaccttctttgccttttttactgatgtgcttatcacctgtaatagcacctaatagatatttacaaaatagttgctgaatgaatgaatgaaggccaatggcttgaccaggggtgtttgcattttgagttttatttcttgaggcttaaataaattgtcaaaggggtttgtactactaactaaataagtgggtagagaagggctttcctagcagctccttgacatgcttccatgtatacttttgagttctgttcacatgtcacattgtttaaatattgaacccttggaaagactcattcgaaggtgcagaaaagggtgattctgctcacaataagctttagagatacttccttttagggtatggaatttagaatgaccagatgtagtcactgaatatatggctcaaggcaatcattaattcattctgcaaatacttatcaggcactctggtagtgttgagactacaacaacgaataaaatgaacatggagcttgtgtgtgttgggggggaatacaaattaaacaatcacagcaatgaatatataatgagaaactatgatcatttctatatagaaacattatgtttttagagcatgtaacaatcaaggggatgagagaatattttgctgagaaagtgaccatttagtagagatttgaactaggcaaagagaggagagaaacttcttggcggaggtccttaggcaaaagaaaatggaagaaaaagaaaagaagctccagtgtgactgaggtggagaggatgaggagaagggcagctctggtgaggtaggtggagcccagatcaaaggatgatatagtgtgatgatgagcaaaaacaaaagaaggaacaacaaaaacaacaaaaacccatgtggattttgaagtaacacaagccttaggttcacatatgagtttggtcacctatcaggtgtgtaacctgattagctttaacctctttctccttagcttccttgttgttgaaaacaaacctcattgagttactgtgaatattgtaagagatggtctctgattcgtagtagaagtacatggtataggtataatacttctaggtgctttacagtgctctgtttgttagctgacagtcatctaattttaggcaaaacagaaaaataattattgcttttggagattcgcagcttgaagcccggcaacagtttcaaaaagtaaattagtcaacattttttgaacacttagtaggtttggcttagttcagttaaaaaccatttttgagcacatactttgtgcacgatgtaaagtaatactttggcaatataagaatgaaccattttgaagttaatgattaaatggataattttataacaatgttgtgaaggatccaatagagttaaattaagcatgtgttttggtgaaggaaagaaaggaaatgaggtgtgggagacattctttgcagaaggaattattggggaaggttatggaggggaggaagttacggccagtaacccatgagagaggtgccacaggagagagagagaattctaggactgtcctgcaaaagactgctaggagagggcggtgagccaagtcagtcctgggcctcagcacttactggatggctgcttacaaagagctcgggtctctctggaaggacatcctggattatggtcatgagttagtgctcaactatagccaagaccaatgtctccaggattcacctgtgtgtttctttctctgggcatgtttatttagggacttatttatggaaatagtgttcccgttgctggaagtggctaggaacactgagacatgtattttatcttatccaaatcaattgctatgaaactatgctcatcaccctttgtagttgtagatcacatacccctcagcccctcactatggggccatttaaatcttccgtgttttatttgctttggatccatcctcttcagtcaaaaccatctgactacattgcttttttttttttttaacccctctgggtgtgtcagtattatactgcttagaaattgtcttagaaagcttctgtttcctgaaaaagaaaactccttactcatgtcatcctctgatttactccatccctgttattgcctattaaagtcttgtccatccttcaagaacctgatcagatatttatttctccatgaagccttccttaatcactccagcttaagggaatttcttctctctttataatattgtgtcacatactatttctaatattgcatccaatgcttgcttgattattagtgttactcagagggaattttttaaaaatcactttgtattctagaacagtttttttttttttgtctcactctgtcgcccaggctggagtgcagtggcacaatctcggctcactgcaacctccacctcctgggttcaagtgattctcatgccttagcctcccaagtagctgggattacaggcacccaccaccaagcctcgctaatttttgtatttctaacagagacggggtttcaccatgatggccaggctggtcttgaactcctgacctcaggtgatccacccgcctcggccttccaaagttctgggattacaggcgtgagccactgtgcctggctttctagaacagttttatatttacataatcattgtgaagctagtacagggaatccttgtatatcccacatccagtttcccctattattatcatcttatattaacatagtacatttgtcaaaatgtatgaactgatatagatacattattattagctaaagtccattctttattctgatttcctcagtttcccctaatgtcctttgtctggatataacattacacttagttatcatatctccttaggcaccctgagctgcgatagtttctcagactttcttgtttttaatgaccttgacagttttgaggattactcatcaggaactttatagaatttcccccaactgagacttttctggtgatttttttataagtagactgaggtaataggtttttgggaggaagtccacagaggtaaagtgtcattttcatcacatcatatcaagaacacatactatcaatatgacttatcaatgttgatgttaaccttgattacctgtcttgaggaagtgtttgtcagatttctccactgaaaagtgaccctttttctttctctgtttttacactgtacttcttgggacaaagtaactatgtgcaacttactcttaaggagctggggaagggagatagtaatgcttcattttcttaagagcagattatctacataaattatttggaattcttttgcattggaaatgtgcatattctccccatttgtttattcaatcattaatttatagcagcatgaactcatggatatttattttattctttggtttataattcaatactgctgtttttgaggggaggaactcattaagttggctactgtgtccctttgtcataccccatcatctttttgtgtgtacattttctcaatttctggcactaaaagatactccaagtccatcttgtttatagtctgctccattcccagaatcagccatttttctgaggaatcctgtctccttttattgaagaatgttattagaaatcaagatctgagcactaggtttgctcattgctactgggatgtcattgcctctaggccttttcagcggatggaacatatgtgtgtatactaacccaggcatatacacatatctataaatatttccatatgtaactatttgtatccttattaagctaaacataagttcatactgatgtctccaaatctaatctattatcatagattagatattatgaatcattttggggaaacctgaaaatacagaatcccaggtatcactccaaagataatgaatcgggataaatattgaacttatatgttttgaaaggcaaacattaaaagtaaatgcttctcttggttgaatattggaatcaatatcaagattatgaaaacatcagtttacatgataaatataagttttactttaccattattcaccatttgggtaagtatttatcttaggaaaacttcgtgtgtctgactatacttttgctaatttaaatttcatgagtgtgcaatctgatagagtttgaaaattattatattaggtgattattggatgtgccattcaactcccaaagtctgtgattcgaagtcccatatataaaaacaaacactgcaggaacacaaaattaattgtgagaattgtactcattcatgttggcagtatctgcctcactcatttcctctccttctctttctgttttcttgcattattggttggtggcagactccagttccaacaccatcttctgagatgatcctgattcccagaatgctcttggtgctgttcctgctgctgcctatcttgagttctgcaaaagctcaggttaatccaggtaacatggctattactcagctatatgctagaagaccagcagaatgtttaaacccatcaatgttcaatggtgggtctaaaagctgccaagagggactacaaagctctttctttttaaatctccatggtgaaatatgactaaaataggaagaaaaatgaatatactttatatatatgtattttaatacttacaacctgttgaatattgtaaaatattttcttatatagagtaggggtgcagtaagagggcattttaaaaaatgggaggtggcagaagcaaccatttgcttctgcatcttctgagaaaaacaggacagaatttttagatgtcttggagaacttcttcaggttggtttaccagttgttttgggctgtcttagactttgattttacttggatgtcctgttatgcttttgggatcctggtcctgtgggatctcaggcaggttctctttcctctaggatgtggccatgctaaaaatagataggttaggagaatcttttgagcccaaatttgtgggattattttgtattacatgcatttttaaagtttaaatggaagtaaataattgtattatttattacacaataatgctgcttaacaacctatccaaagctcaatgtctttaaacgagcatttatttggctcctagctggacttgtttggactgttctctgttctgtgttgatttactcaagcataactggaagtcagctggctattggctcatctaggatggatgtggcactgatgaatggggcaactttgctgtgttctgtttcatcctcctgcagactaacctgggtatgttttcctggaaattgcacaggaacaagaccagaagccagaatactcaaacatttttcaagccactgctgaaatcatgtttactaagtctcattggccaaagcaattcatgtggccaagcccagagtcagagtgggagagcacaaaaaattagatggtaaaggtctgggatgcaggtattggagaagaattggagtcattttttttttcattttgctacaaatatgaacatggaaaagtatacagcttaaatgttcaattttatgaattcataaactgaacacatctaaacagtacctggattaagaaacagaactataccagcactttagaagctctcttcatgctcccttccagtaacttttctcaccaccccgcaaaggtagccattatcctgctttctagcaacatagattagttttgcccatttttgtactttatataaatggaattagatgatgcataaatactctttgtgtctggcttctttcactcaacattttgcttatgaaattcatcctactgttgcatgcagttgtcaactattcattttcattgttgtatattactttgtttgaacattttatttagccaatctactgtagatgggaatttgaataatttctagtttgggcccattatgaacaaaactcctataattattcttatataaaacttttggtagagataagtactcagttcctttgagtatacacttagaagtggaacttcatatgtgtagcatatgatatactattctgcataataccaaaaattttttcaagtactttaccattttaccatcccatagcagtatatgcaagttccagttgttccatgctatattttgattcttgagggtgctttaattttgtcctcttcatagcataagggtacatttgtgaaaatgcttgctctcctcccttcataaaagttccatgtgcatgggtttttctttataccttcaataggaaatatgatcaaacatccttaaaatcaaagaattattggctgaaggagcccagtgccttgttactttctcgtaataagctcagctgttgcatctcagatcctaacttgggtaccattttttcctttttctgttctgtattcctctcaatcaattgttgatgtttggttgcctcctactacattcttcatgctctgagttctaaggaagagtgctgtgagtgcatggaatggtgggatgttttggtggtaagcatagtcatggagactggcatgccacgaggacatttaaatgactaaccaggagagctgatcttctgtgttagagtccacactgtggccctggagcaggaaatgggctatttggagacagcaaatagtcatcttaatttttttttctatttctggtgtcaggtatttttgttggctctttctgacagggaaagagaaatagacttcttgctttgcaaagacctttataggaaaacaggacatgttgaaggactaatccttctctctgccatttctttctattttaccaagtcaaaccagagatgagtgtttgaggcagatgagacattttcattcattatcagtgataaagagtctatcatgaatcctgaggctcatagaatgttatagcttgcacactgctgagcataaagtcagcatatgataaatgcatgttgatttaaggatgactcttcaggagtccttactggtgtcaactgaaagactgactataactaaaagtattgaaaggtaactgaaggcactgaaagactgagtgaattcttggccagttaggtttttcccacagaatggccacatgatataacaaatagaacttaagccaggagacctgagttataagcaaatccaatatgcaaccaattattaaattactgaaacattttagttggttattagctataacatattggttggttaatagtaactgagctaagcattaaactcaataaaataaaaataaaataataattagttgaagctcattgttgaagatcttacaatgactattggtcaataagccttcagtattagcatgatttagttgataacaaacattaaacatgatatgatatgaaatatcaatcttggtgtctcagcagataccaagagaggataaataatcttgtttacatttaaaaaaactctctagtatttgaaatcataaatgtctcacaggtgtcatccatggaggctgcagagtagtggtggtatgacagagatagttggctgaagcacgaaggcagcagagtttttggctcactgttctaaagtatctgagttttggcaaagcaggcagtcaggcagatggtgttagtggcatttccagtaatggcagtgttaaaggtagcattgtcaatggggcctggagcgtaggctacgcaagtctttgtgggaaatgctgacatgaaggtgtatatacatagtcctgaattgtgggcagagttctcagctatcttccagctgcaacagtgcaccaggaactggaacctaatcatcattaatccagtgggagaggttattggaagaattagaggcagtttcttatgtcaaaatcatggctcagaaataccatttagctagtgacatccaaatcaaacaaataatcatcccaataatttctgaaaatcatttatacaaatcaacagatgattggaatgttattagttctgatgaatgatttggagttaacttagaaaaaagtatttagcttaacttttgagtaacaaccctaattataatcctgacttggtcataaattaattgtgtgacagtgagggagttgttacgtgtctctttatacttccttaatattttcacttgtagtaagattaagttggattagataatctatgggaccctttctgctacaaaattactgtgatttttatgatgtgagaactttatagcccatactggaagatttgggcttggaagtatagcccctgaagttgcatggctgttttttgcaagaaagactacttgtttccaactccctaccacttcccaggctcagggatgtgaagtctgaatttcaggagaatcttgcctttggggctaagcacacaggaagtgactgataaatacttaaaaattttaaaccctaaaactctgcttagtggcaggtgaatgcagaaaccctgccccagcctaacctgcaggagagtcatagtgctacaagctaccctgctccagagcatcttttgctctagaggtggggccaagaggtagcatttcaggctgaagatatagcgtatgcaatggctgagaggagggtgaggaacatttggggctcctggtggaggataatgagtgagagagccagcggggctatgtaggagatccattcccctgtgggatccttgagtcaagttttcccttatttccagcttgggctgggactgccaaacttgataggagaactaagggcatctccatgggaaagagaccccacaatcatgcacaaaaatacggggctgcagtagttgtttgagtggacatcagtgtcaggctcccctaggggatataaaaccactgtttcagtggttagtggggaactggcaccttacgtttttccaggtaggaggatgaatagaactatcctgatgatcctgaaattctagcccagcagtctgaagccctgggacccacccagccaattagaggattgttgtgtataaaaaacacaggggtgcttgttcttattcccctgacttggcctgtgacaactgtttgtgctcaggaaagggagaaacatctcttcttctcagcaggcaaaccaggcctttaggatccatggtataaagctgaggcagggcagtgctggaacttcccattttcatgtcacactttcccctcataggaagcaggcaacttactaccagttcagagtcctggggtgggagtccccctttggtatccagaatgcttccactttgaaaaagagtggcaaagccattcagggtttgggattaggagaggacgagcttttctcctcctggccccaaatttattttaggttcaccactgtggtttttgttctttccagcatcagtcccacatgtcagtgagttcttagggtcaggcaactagaattctagactgttcatgttggaatggaccttagaaatatctaagtcactcttcctcactttacagatgaggaaactgggagtcaaagcaggtgagtgatttgcccatgctccacatttagctaatagttaagctaggacgaggacccagggctacctgtctcccaatcccaggtgacttctacctgggccctcagggagcaatgtgctgaagtgacctttatctaaaaatcacatatatccatgcagcctcatgctttcctttctgcaaccaacttccaatgtatatttatggggatgagatgtaattgagatttgagggacagcctgaggccaaagaatggagtcagacgaataggatatacagtgctcacacctagtctcatgctaaatgaggaaggctggagctagaagccctgcgggccaacttacccccacccagaaactgaagcaccagggatgctttggttcccttctgcaccaggttgtgcctttatcaccgctcccttgtcttccaccaaggctgctatgtgttaattcacctacacatatttccaaattggaaactcatttttgtttccctggcttctcgtcattcgtgttcccagagatgtgctgagaaggtttatgtggcctcatctgttaacgagaaggtgatgctagtttcaggtttgtgaaaccaggcctgaggtactagtgttgtgatgtgtgtgtatgtgtgtgtgtaggtgggtggcgcgggggtgtagtgtgtgttagatagcctgaacaggccttgagaaaaagataaaaggccggcaaaagacctctctggttgaatttatcttaagtgagcaatgctagaagctgcccagattggctctttcttgcttgtgtgtttgttttttaagtctaggctgacgcctgagagtggcctttggcatccttcctgccagtaaaagagcctttctctgggtaaaacagaaactcatctgccccttgagccctcttggttgtgccaaatagggaaaaagagaatgcaaaactcaaagaatattcaatgaacacttaatatattctgggtaccattttaagtggtgtcaacaaatttaatcttcacaataatcttattagtattagtattattatataatagtagtattattattccagttttacagaggagaaagtgaggccaagaaacattaggtaactcatagcaggttacagagaaagctaagtggcagaaccggcattcgactctgctccagcaagcatgctcttttcttctacttcttttttctttatcccgtttttcaaatttccaacaatgtatcagttaagagtttttcgcttgtttttttgtttgtttttggagagggcatgttgctctgtcacccaggctggagtgcagtggcatgaacatgactcactgcagcctcaacctcctgggctcaagccatcctcctgcctcagctccccaagtagctgggactacaggcatgcgccaccacacccaactagtttgggtactttttgtagagaaggggttttgccatgttggccagactggtcttgaactcctgacctcgccctcctaaagtgctgggattacaggcatgagccaccacacccggccacaagcatgctcttgacctctgtgctctactgcctttggagtgtgagactcaaggaatgtcagggcagaggaaacccagattcatggaccagccacgaatgggctacagagacccgtgaatcccctgaaattgcatcccaaacttaatgtgtgaagacaaaagtacatttgcaaaatgaaaaatgttttctattatcagatgctcaaaagactctgtgaccagttctagaaaagactaagaatggtggatttaatctaatcttgtacaaatgaggaaactgaggtttagggagataaagtgatgggaggaaacatgtttgaaaagactattagcagacctaaccaggctttgcctactcgctggacgagcatggtcagagttttgggttctctgaactgcagtcttctcacctatcactgatcgctgccttaagggctgttaggaagagtaagagaatatatgtaaagtacctagcatagtgtcaaacacacagaatgtgattaataaatgctggaacttctgtcctcttcctcaattttgtatattgtgctgtgataatggcagacttcattagtctttccattattctatactgtcctttatattttagtttaatcatttcattaattaattatttaacttaattactatactgtaaaaatatttcattttctttgagggcagacttcacctaattcctgggctttgtatcttgggataaaagggttccaaatacatctactgcatcatcacctttccatccaaagtagccaggtgaattcccggttcataccctgaaactttgccttcaccctgttgttttgcattctgaggcctagattcctagttgtaaaaggcagtcagaggagctaaaagtaatgcaagaaaaaacaaagctccactttttttctgttgtcagtagggatagaggcccagggagacctagtctccttgagtctaaactttggggccaggagcatgatcatgggactccaggaagagcttcacacaaagtcccttttctggacctctcagttttcacaaccacctgcagagctcagttttgctcagggctctcgtgtggaaagactaagagtctacagaagaacaacagtgttggcaggagcagacaaggagacagggaccctgcttaccatggaaactgggcgcactggggccattaggtccgtgcatcactgctgcttcacatatttgcttattaatgttttgttctgaaagctgacaagaactctaggggcttcaagcccataagatcaagacatacaatatagcgatataagtatgtaagaaacatagattgatacagatataaaataggaaaaggatatgaaacaaatataatatatatgataaaaattataaatattataataaatatattataaatattataatatttaatattattaatacattaaaatataaacatatatttatattttgtaaatataaacatatatttatattttgtaaatataaacatatatttatattttgtaaatataaacatatatttatattttgtaaatataaacatatatttatattttgtaaatataaacatatatttatattttgtaaatataaacatatatttatattttgtaaatataaacatatatttatattttgtaaatataaacatatatttatattttgtaaatataaacatatatttatattttgtaaatataaacatatatttatattttgtaaatataaacatatatttatattttgtaaatataaacatatatttatattttgtaaatataaacatatatttatattttgtaaatataaacataaatataaatatatatataaaatatgtataaaaataaacataataaatattataataaatatacacacatatatatgtgagtatatttatgtatgtatttatatatagatatatctatatttatgtgtgtatatttatgtaagtatatttatgtatgtatttatgtatatatagatatatctatatgttcacatgttacatgttatatagatatatctatctatatatagagttaaaaataaataaataaataaataaaaataaaaataaaaataaaaataaataaataaatacagagaagcctgggagtttccttgacttcctttttccccctccctcttcttattcatcaaacatttgttgattgcctatataagccaagcactgtaataggtgctggtcatgacgacacaacagattatcactacaccagagacaaagaccaaagtcataaaaacctctgaagcaggaagaaaaaaaaagttgcataaatttttttaacaactcatcacctcccacttaggctcataaaaaaacctcactgattttagtgtcttaacttctactttactgtgtatgtgtccaaactactgaaaaattctgtgagggctatcttgccacatccatactcttcagagacccacaggccaggaccaagagctaagtcgacaatcacactatatatatctatatatatatatatatagatataatcacactatatatatctatatatatatagatataatcacactatatatatctatatatatctatatatagatataatcacactatatatatctatatatagatataatcacactatatatatctatatatagatataatcacactatatatatctatatatagatatatctatataaatatatagatagatatctctttatatatatatagatagatatatctttatatatatatagatagatatatctttatatatatacatacatagtccataaatatgtacataaatatgttcacattttacccaatcaggtcaaatctccaatgtcatgctagttgagatactgaaggtatgagagttagctggagctgaaagaatttgccaggccaggtaaaaagaggaagggaaagcttttgagctgaagaaaaggcacagaggcacaaatagaaaaacaagagtgaggatagtgattattgaggggtcatgaaggcaaaggtggggttaggatggcaccaaaagtaggaaccatataatcttgggatcctcagtatatgacaaatgttttatgatcaaaggccttgtcttcacctggtgttaacataatgctatgccatgctgtctttcccagagtgcaggttccttttgctatcacatttcaacaaatcctgggacaagcacattctaaaaattagacaagcaataatcctccctgggctctctgtccagattcttccccaacttggtgattcttgaccctagtgatcacatgataaacagggtgtgtgtgctggtagcagggtgtgatgaccacgtgatacggttactagacagactgtgacaatggagatcaagagatctagattctagttccagctctgtcactatctagctttgtgactttaggtaaatctctgcacctcactttgctcatttataacatggggtccataaactttgctctctgaacttcatagggttactgcaggggattgaaagagataatggaaataaatgggctttggaaaattacatgcaaatatcaaagactgtgatttgttacttttggaagaaaagaaaatgaaaataaacactatgaaacaacagtttctatcaagcagatgatgcaggaggaagaaagagaaaaaaactccattagtgatcattaaggtcccttgtggtccccaagaccgactcaagttgcttttggggaatggggcttctaacagtcctgaactctggccaccctaactttaaagggatgcagggaccctgtgctcaagccaagcatatccattttatataaaaaaaaaatttttttttttttttttttttttttccttgggagaatagtgtgattgttgacttagctcttggtcctggcctgtgggtctctgaagagtatggatgtggcaagataaccctcacagaatttttcagtggtttggacacatacacagtaaagtagaagttaagacactaaaatcagtgaggtttttttatgagcctaagtgggaggtgatgagttgttaaaaaaatttatgcaactttttttttcttcctgcttcagaggtttttatgactttggtctttgtctctggtgtagtgataatctgttgtgtcgtcatgaccagcacctattacagtgcttggcttatataggcaatcaacaaatgtttgatgaataagaagagggagggggaaaaaggaagtcaaggaaactcccaggcttttctgtatttatttatttatttttatttatatttatttatttatttttaaatggagtttcactcttattacccaggctggagtgcaatggcgcaatctcggctcactgcaacctccgcctcccaggttctagagattttcctgcctcagcctctcgagtagctgggattacaggcatgcaccaccacgcctggctaattttgtatttttagtagggacgaggtttctccatgttggtcaggctggtctcgaactcccgacctcaggtgatccacccaccttggcctcccaaagtgctgggattacggcgtaagccaccatgcctggcttttttttttttttttgcaaaaaaaaaaaaaaaaatctaaatgatgccatgtgagacttgatctcagaaagatgttgggaagctgggaaggaacccataggaatatcatccctttaaatgatgagatgctgagtatggtgtgagtaaattagaaggaagataatgaaccgaggccatttcagctgaagctaccaaagtgcagcaccaggtccagccttctagtgttagagaactgggagagcccatctccttgcagaggtagagcagcccgggactgcaggggagggtgaggccttcatgcttgttcctaaatgcctaaggtcttcgtttaggctacaagcggagcattttgattgttatacataaaggaaaatgtggttaaatttaattcaaatatatgtaaatatcttatgattggcatttcaagggaggaagtcagattcaatcttttggctactgtaacctatattaaagataggaagtatgcaatgatgtgtactgtctatgtacaggtattgctaacttgagaaatgtattggcatgggaggagccctgggcttgcccataggacaaatccacctcgaaagcagagcagagtgtcttcattctgggtagctggtaggatgtaagcctgaattcttggtcttccagtgcttcttaaaaactcccacgtgctctctttcctcaccaggtcctgaactctaatctgtgtcctgtccgactctcaaaaaatcagctcagctcttcagagggcttctccttacattccccctccacacagccccagcatttggcacatgtgctgagtgagatacactgcatgctcgagggataccaggtctccctcaaaaactctgctaattttgtcccgtagagaccgtctgctagtgccaaacccggagtcggcctcctgcccctgctccaaatgggcaaatggctgaaagtggctacagaagttccctcacctctctgagattctcccttctctgaagtcttggtctctgcattctcattgcctcagaaacaatcagattccttcaagtagatgatttatgaattttatttagctcttccagttacttttagagggagcactaattactgcacactactccatcccacctagaaacagagatattaataaaaagtgaatttatactttattgccactgtgattcatgttaactaatcatgttttactttttgacttgacttctaggaagctcagagccaaagttgaaacccatcatcagccagtggtatagaaccaaatgtaatactctttctgtattaaccttagctctagcttatctaattgttcctattttctttttcctttatccaaatttcttcacttatttatttatttatttttatcttatgcaactttggaagccgactccaaactttactgagtgagtcaaagtaaaaataattaaaaataaataatacctaactttattgaatattagtgctctaagtgcttgacataattaactcatatattccttatggcattcctataaacaagtgcaattactaccatgaaattgagaggctgaaagcttaagtaacctttctaaggtcataaaaccttttaattgtttaaggaagagtgaatgtactattttaaacaaatagttctctcttctcctcttagatatcatttattgagccccattacattctataaagtatgctaacttctttgtatacattatgttaaccttggcttggcaggattatgaaagatgaagaaaccgaagttcatagaggtttggtaactggtagtggggtcccataattcagaagtggcagagccaagtcttaatataaactttccatgattccaaaccgtggcctcagttttcttcttcactcctgatctgcatagctacccagtttcctcttcagcttaccttcttgttggggaaaggagatactatttactatgaaagtttcactgtctttgttaaccaggaagaagaattcattatctgatccctatgttagtatcctgaaacccactacagcttggggactgctctcctggggctctgcaagaattgtttctggaaagtattttgggcttccaggaaaactgcaatcctaaaggtctattcctaaggggaatttcaacttgtgcaagaggtctgggtgaccattatacccaaagaatagccctgtaggctgaagaaagaaacccaaataatctttcttggcccccctgtggaatcccattgtgtcaatatttatctgcacaaaggaccagtctgaaacagcctgctctgtgaagcttgtgggaagcagggcctcagtgacagtttctttaagtggactaccttgtcctttcagaaactggaagaactagaccatggtagcctagggttggaggaggaagaaccagggatcaggagacctgaatttcagtcctggttaccctagccctctgtgtgaacttgagtaagtcacttcacctttctgggcctcagaggttctgatatttaacacggagacattagagggattggcttcttaaatttgcttctgggctccaacgttttatgattgcagatgtccctttagattgtagactggcttgagaccgctgaccccaataatgcccctcagtcagtcttgtctgggcccagagaggcccaggtgtcaggtctctgcacctcaggcctcatgtgggccatgtgtgtgttttcctggaagctgcatataggacactcattgacggggagcccgtggtctggagctagtagtgagatggtaaacattatggaacaagcagccctttcaggctctcagccttggcaggatagtatgaaaaataattcttgggaagctggggactggtggcagctgcttctcctcagcctgcctgccaggccctaccagagcttggagggctggagctccctgctgggcctgccacagcctgtgctggtagttttccactctgggaaactggaaaagtgaattggcttctctgtccgggagattggtgggtagcggaagcatcagaaaaccgctaagacaactcagcaggaaaaaccaggagacacttctttgctgcagggtctcttgcttcccttgccattcccagctttttcatgcttctttacagttcatgatagaacaaagacagactggtgggatttgatgaacgaggaagtggaactgggggaaagcaaggagacctgacatttagggcttgggccaacttggcagttctgagtcttgactattggctgagatcccttccacagaaggagtttacccaaaataggcacattcaatgggaaaaccacactggtacagctgagaagtgccacgttggttgccctgggcttttcctggttccaaagattcagtaggatgagaaaggtcatccaagatcatcttgtccattttcctgtgccttttctctaaggcccttgggcatactgagtcactgagaaactttgcctattttcttaatgtgactattgctgatttactaagttcttatctctgaattgtctatcctcatccttatattactttgtcacaatttctagacctccatcctaactttcgttgtctggagattgtgtgcaatacttgtagccctctctgccttttcatctacttatttatttgccaaacgtgtgttaagcatctcatgggtgctgtgtgttggcaggtactgagggggaaaaggaagaatctgacatgattactattctcaaagttgctcacaatttcaacaaggaggtaaccaagcacaagagtaacagaaaatctccgttggagtttgttacttaatagagctcgcctacacaccatcatcactttaatcccatgccacgttttagtattttccatagcttcgtcacattatctgaatagaaagagccagtaatagctactgtcaaatacataatcaaattgtgcctatttgattatgaaaaatctattttcttttttctgtctcccctaccggaatgtaagatccatgagacaaattattttatctgtcttgcttactactgtatcttcagaagaacacccgatacacagcaaaaacttatttattaaataaatacatacacatttgtaaaagaaatacatttgtgaactcaatacatgcaggtaaagataggttgcaataaaatatgtcatgactcagacttacaaggaagtttcctgtatctcctgtctgctaaaacaccattagccaaggctacccttgaccaaactcccaggactttgtttttaagccttgtaaagtgatgaacaacagaaaacacttcctttatcacttttcaatagacgtttattgagcacttggttaatgccagacatcctactagaaattggagatacaacagaggaagatagatatgatccttgccctcataacacatgctgtttagtgggcagaccaaaattaaacaattatttacattacaagtctaaaaactgttatgaacgaaaaccagtttgttataagagcatataatagaaattcctaacttagctggggacttgggggaattccttgggggagtgactggctgacagctgaaggatgagcaggagctagtgagtgaaggagggaggatgcacatcccaggtaaagggagcatcatgcacagagaccttgaggctggaagatactttgtgcattcaggaactgaaataaggtcagcgtgcttggtagagagcaaagaacagggaatagccagagatgaggccagagagtaggctgagacccaatcgtgtggacctcaagggtcacattttcttaagaagaatgaaaacctgttagaaggttcatgacagaataaagttttaggaagctaatttgggctattgtgtggagaagggatgatagaggaacaacgaagaagagctagaaggcattatagtggctcagatgggaggtcatggaggttgcgcactgcatgggaagaatagaggagagaaacagctggactcaactgcaggaggtaggatttgtagaacttgctaatggactggatggttctcaaaggccaagcttacttctcattccttgactgccgcctgttgagagtaacatcttacctatcattcctggactcttcctctccaagaattctattttggtctccaggcagaggttgactcagggagagcctttccagttttcatcaatgtcattgccactctgctgtccaccacacagttgacctaaaccctctgtatgctggaagagctggacgagtcgaggaagaggggagcgctgacatgtgtaacaagttatttacatgaaatgaagcctcatgtcctcccctacttcctctagttctcaagcttgagtctgcattagggtcatctagagtagtggttaatacactgtttgctaccccctcccagcaaccccaccagagtttctgattcattaggtcaaatggagactgataattagcgttgctaatgagtttccaggtgatgctgatgctgctggtcctggaagcatattttgaggatcacagctctaaatggtaactgaaatgcaatcacaatacatagatcaaagagctttcaggaaggaaactggcactcctttgacaccacatagcagagtatcctatatggatctacctccacatctgttatataggaaaattcctgaatgggttcagttaggacacaaaatataaagggtttctatgcctaggaaatataatttaactgaaatgtgtcataaaagcagctgcagcagcagtagctctgataaaactccttagttgccattctcagaatgagcagtacgttagaaggaaagttatttgcaacaatatcatgattcacctcatgtgacccacattccctatttctgctttactttagatattccaagaagcagaggctctcattgcattcatggcctagtgtttagagatgcattaaagccagggatgaaagcccagtgggacggtcagtgtggctttctctggtgcccagcatggtcctagagaatcattacacgtccaggctgaagggacctgggagcagtggctccagagcctggctacacagcacagtcacctggtggactgtaaaaatatgcaggttactgggctcagcttcaggtataccaaagcaaaatctctaacaggaggctcacaaacatgtattctaaaacctctccaggcttttctaatgctattggtccatggactggctttgggaatcactgccttacagaaagcctaatagaactctcttgctttccacatgaagaaacagaccgaaagagagccaggagcttgctcagatcccacatggtataagtggtagaaccgggagtggatgcgaagtcttgattttcaagggttgtgtgctcagtggaattacaggctttagagccaagttctaagatgagttagtatttactcaaggaatggcctttgcagttaaaacttacctgtagaatgtgtgattagtgggaaacatgaaatattgggtggaaaatgcttatcatattgcctgacacttggtaaatgcttctaaatggatgtcatcattactgcattttactgaatttaagcaactcacgactctaagatgcatcattactttatgtgcctctaagaaagaaagaaaaactactgccagttaaactatgacactatttgcttgcgaagtgcatccagatttcagagatgtcagtacgtgaaagaatgggcagtgtggtatttcacttctcttttctcaactctatgaagattcttactttactgaattagacacttaacagtacatgaaaattcctgaaggagaagtatacttagtgtgtttgaggaacaacaaggaggccagtgtggctgatggggaaagtggggtaaggacaaggtccaagacagccaggggatgtctgattccatgtcttcactattgtgaatagtgtgaacagaagagtttcatgatatgactttcatttcttttatgactacatagtattccatgctgtatatgtaccacattttcttttcttttctcctttgctttttctttctttcttttttttcgtttctttttttttattacagttttattttttatttattttttttggaataattttttttttattatactttaagttttagggtacatgtgcacattgtgcaggttagttacatatgtatacatgtgccatgctggtgcgctgcacccactaacgtgtcatctagcattaggtatctctcccaatgctatccctcccccctcccccgaccccaccacagtccccagagtgtgatattccccttcctgtgtccatgtgatctcattgttcaattcccacctatgagtgagaatatgcggtgtttggttttttgttcttgcaatagtttactgagaatgatgttttccaatttcatccatgtccctacaaaggacatgaactcatcattttttatggctgcatagtattccatggtgtatatgtgccacattttcttaatccagtctaacattgttggacatttgggttggttccaagtctttgctattgtgaataatgccgcaataaacatacgtgtgcatgtgtctttatagcagcatgatttatagtcatttgggtatatacccagtaatgggatggctgggtcaaatggtatttctagttctagatccctgaggaatcgccacactgacttccacaatggttgaactagtttacagtcccaccaacagtgtaaaagtgttcctatttctccacatcctctccagcacctgttgtttcctgactttttaatgattgccattctaactggtgtgagatgatatctcatagtggttttgatttgcatttctctgatggccagtgataatgagcattttttcatgtgttttttggctgcataaatgtcttcttttgagaagtgtccgttcatgacaaacccacagccaatatcatactgaatgggcaaaaactggaagcattccctttgaaaactggcacaagacagggatgccctctctcaccgctcctattcaacattgtgttggaagttctggccagggcaatcaggcaggagaaggaaataaagggtattcaattaggaaaagaggaagtcaaattgtccctgtttgcagacgacatgattgtttatctagaaaaccccattgtctcagcccaaaatctccttaagctgataagcaacttcagcaaagtctcaggatacaaaatcaatgtacaaaaatcacaagcattcttatacaccaacaacagacaaacagagagccaaatcatgagtgaactcccattcacaattgcttcaaagagaataaaatacctaggaatccaacttacaagggatgtgaaggacctcttcaaggagaactacaaaccactgctcaaggaaataaaagaggacacaaacaaatggaagaacattccatgctcatgggtaggaagaatcaatatcgtgaaaatggccatactgcccaaggtaatttacagattcaatgccatccccatcaagctaccaatgactttcttcacagaattggaaaaaactactttaaagttcatatggaaccaaaaaagagcccacattgccaagtcaatcctaagtcaaaagaacaaagctggaggcatcacactacctgacttcaaactatactacaaggctacagtaaccaaaacagcatggtactggtaccaaaacagagatatagatcaatggaacagaacagagccctcagaaataatgccgcatatctacaactatctgatctttgacaaacctgagaaaaacaagcaatggggaaaggattccctatttaataaatggtgctgggaaaactggctagccatatgtagaaagctgaaactggatcccttccttacaccttatacaaaaatcaattcaagatggattaaagatttaaacgttagacctaaaaccataaaaaccctagaagaaaacctaggcattaccattcaggacataggcgtgggcaagggcttcatgtccaaaacaccaaaagcaatggcaacaaaagccaaaattgacaaatgggatctaattaaactaaagagcttctgcacagcaaaagaaactaccatcagagtgaacaggcaacctacaacatgggagaaaattttcgcaacctactcatctgacaaagggctaatatccagaatctacaatgaactcaaacaaatttacaagaaaaaaacaaacaaccccatcaaaaagtgggcaaaggacatgaacagacacttctcgtttctttttttttgagatggagtctctctctgtcgcccaggctggagtgcagtggtgtgatcactgcacctccgcctcccagattcaagcaattttcctgcttcagcctcctgagtaactgggattacatgggcacaccaccatgcctggctaatttttgtatttttgatggagacagggttttaccatgttggccagtctggtctcaaactcctgacctcaagtgatccgcccacctgggctgcccaaagtgctgggattacaggcgtgagccaccatgcctggcccacattttctttatcgaatccactattgatgggcacctaggctgatttaatgtctttgctattgtgaatagtgtgagcggaagaatttcatgatttgatttacattctaaaagatacatgggaaaaggtggacaaagggagatcagttaggaaattattgcactattcctggcaatggaagacagtgaattagcttattatgatagtaaaatatgtgagaagaagtaggtgggatatgggaatatttttagggtagccagtagaatcttctctcagtggatggactgaatacagggtattgaaggagtcaagaatggcctcaagatttttggcttgagtcgttgaaagaatggaacctgaaaaaaaaaaaaaagactgaaggatgagctttggagggagtctgtattttactcaatgttatctttattccttatttacatctatctctaaagtttacctctttttttaaataaatatttttaaatacctattttctccccaatatgcactgagaaataaaaatgaataagatacagtggctttattcccctcaaaattttgccacctgcaggggagataggactcacacgtggtacattacaaagcagtatgtatctaatagtataagaaagatatttaaaatgtgagaaatcagagaaaggaggcattcattgtaattggccctatcctcccctcaaaatgcttgcttttgttgagtacaagttcattacattggaaaaggagaatgctagcataataactttaactagttttttcactttgggtaaactgcctccttgctgtacctcaaaccacctccacaacaagcatgctttttcctcaagtttacctttgcatttgctgttccccttgcataaaccatcatccctgcaagagtcacctggttgctgtcttccttcactcaggtctctgctccgagtcaccttatctaagaagcctaccttgatttctttatataaaagaatgcctattccttttgcatactttttcttcacagcacttgccatcttctctcacattatatatttatttgctttattggctgtttccccacatgagaatgtaaactcagtgacaaaaggcactttgttttgtttaccactgtattcccgcaaggccaatgaattgcttaacgaattatttaataaatataggaattaaaataaaccatgggtttggaaagcaataagcaaatggggttggagataggactggactctgaacacagcgttggtttcagaagagagagaagacactagagaacagctctctgactaagctacatgcctctgtggcagcctggaatcttgggacacacggcttgcaccaggccactcttttggttaaagcaaaggttaaagtctggtgtattgggacaaactttggatagagatacagaatgtgatctacgtcaatccctactacttaatagctgtgggccttctgccagtttcctcatacaggatgagtatcccttatctaaaatgcttgggaccagaagtgtttcagatttcagaattcttggactttggaatataatataatataatataatataacataacataatacaatacaatacaatataatataatataatataatataatataatatagtataatgtaatgtaatgtaatataatataatataatataatataatataatataatataatataatataatataaatttacccaggtgagcatcccaaatccacaaatccaaaatccgaaatgctctaatgagcatttcctttgaacgtcatgctggtgttcaaaaagcatcagattttggattttagatttttggatttgagatactcaacctgtatatattttgagagtaatagtgtgtactctgccaactacatagggttattgcaagggtaaagcaaagataagccatgggacagcactttgcaaactgttaagaattctattatcagggtcaagatggcaatcagggacactatgacatggactacagtcaaaagatccaggaatgcctgccttggacagctagatcttctccccaggaggtgcctgagggagacatacacacaggtgacagtcacaaagggtaagtgaagttctacattattagtagctgggcttgggtcctaaatgccaatgtgagcgttctgataaactgacctgggcatgtagcccaggttaaaggcctccagaagcctctctttattcattaagtcactggtgacaaggactaaaacacttagcacactcagcgacatgtaagatcagtgttgaggagggattagagcaggcccctgagagggccattttctttgtgtgattttcaaaaagtacattgatctcatccattggaaattttggccccattagcatcctgtgttagtgtttcctcatccttactcttcccttcaatttcacttctcagaaagtggaatttgagaatttgttgcttcatccccaaacagttcagatttgcccttaagattcaagcataatgattacctgtggcacacattacctctactggagaaattatacttttgataagaataggcaaagtgatattacattcatatgttcatctcttgattcaaaactgacttggaaatcatagtggatggtgtgttaggctgttcttgcattgttataaatacatacccaagactggtcaatttataagaaaagaggcttaattagctcataattctgcaggctgcacaagcatggcattggaatctgtttggcttctgaggaggcctcagggagcttataatcatcgtggacggtgaagtgggagcaggcatgtcacatggcgaaagcaggagccagacagagagagtggggtggcggggaagggactgcacactcttaaatgaccagatcccctgtgaacttagagcgagagctcacttatcaccaagggcatggcccaagccattcatgagagatcttcccccatgatccaaacaccctacctcctctcccacacaccagcccccacctccagcattggggattacttttcagtatgagatttgggtgggcacaaatatccaaactatatctgatggtgtattaatccattttcatgctgctgataaagacatacccaagactgggaagaaaaaggggtttaattggatttacagttccacatagccggggaggcctcagaatcatggcacgaggcgaaaggcacttcttacatggcagcagcaagagaaaatgaagaagaagcaaaagcagaaacccctgataaacccatcagatctcgtgagacttattcactattacaaggatagcacgggaaagacgggcaggcccccataattcagttacctccccctaggtccctcccacaacatgtgggaactctgggagatacaattcaagttgagacttggtggggacacagccaaaccatatcagatggtgaacatagaagtgttcctgtgggtatatggccatgtttcttgccaaaacttcctgcatatgattctggttaattgcagtttctggaagtatcagctaatccttggcctaaagctatctttcccttttttagggtgagataagactccaggagttctccttggtatgatacaagcagaagggccctcttgccttcagttcttcatggttgtagtggatatcctcattcttcaagcccatgatgttccttagggaaggtagttctgctgtttctgtgccaagcctgggcattatgctcacgtgaaacctttttcccttgatttttgctacttctccagggcacttcctgggaatggggcttggtacctattaggactataaatttgcctctctctgacccctccaagctgagagaagtctcgcctttctccctgccacctctactccaccctgcagtccctttctgagggcaggctttctaggaagttctttgtcttcatgtagtttcttttttcttccctgtaaacataaatgtcccctagggtgaatgaacataaaggcctggccacaggctttgaaaaaggaagtgataatacacaaaaatcttcaaaattatctttctccagagattatttcaaaaacagttttattgaagtacaatagacatacaatagactgcacacattaaaaatgcacaagttggccagttttgacttacatataaacctgtgaaatcatcaccataatcaagataatgaccacatccatcactaccaaaagttgcttgtgtccctttatgattcctctggccgctcctccttcccccaggaaacaactgatctctttctgtcactatagattaacttgtttttgttttctaaagttacatataaatggaagcatacagtatgtgcttttttggtctgactttttttattaagcataattgttttgaaatttatccatgttgttgtagcatgcatcaatagttcattttattgctgaatagcaaggcatgatctagggtaggacaagtgaagtgcctagggttaaaatgcagtcagttccttatgatgataatcataatgatgatgactgtaaaaacatttaatgagacctgctctctgaacaagtttttaagtgtaatataccgtatcgttaagtataggcacaatgttgtacagtggatctctagaacgtattaatcttgtataaccgaactttatatccctcgaatatgaattcctcatttccctttcctcccaattcctggcaaccatcattctactttgtttctatgatttaggccatttttgatatgtaacgtatgtggaatcaggcaatatttacccttctatggctgggttatttcacttagaattatttctaccgggttcaaccatttagtcaaaaatgttaggatttctttctttcttcttttttgttcttttcattattattttttattatcattatactttaagttctggggtacatgtgcataatgtgcaggtttgttacataggtatacacgtgccatggtggtttgctgcacccatcaaaccatcatctacattaggtatttctcctaatgctgtccctcccctagccccccacccaatttctttcttttttaaagctgaataagattccattgtaggtgtatcccacattttctgtatctacttatctgctgatagtcatttgtgttgtttccatgtcttggcttttgtgaatggtgctgcaatgaacatggaagggcagatatctcttcaagatgctgatttagatcctcttgggtatataccagaagtgggactgctggagcatatggtagtcctatttttaattttttgaggagcctccatactgactgcatcattttacattcccactaacagtttataagggttccagtttctctacatccttgccaacatttgttatcttttgattttgttgatgatagtcatcctgacatgtataaggtgatatctcattatggttttaatttgcatttccctaatgattagtgatgttgaacaccttttcgtgtaacttggccatttgtatgtcttctttgaagaaatgtctattcaacttctttgaccactttaaaatcatattttttgtttcctatcaagttgtatgagttccctatatatcttggatattaaccttcaaatatataatttgcaaatattttctctcattccaaaggtcttttcactttgttcattgtttcctttgctgtgcggaagtttttgttgttgttgttcaattgtagttccgcctgtttttgcttttgttgcttatgtgtttggtatcatatccaagaaatcattgcttagaccaatgtttttttcatgtatcttcttccaggagttttatacttttagatatcatgtttaaatctttaatccattttgagttgatttttgggtacaatgtatgataatagtttaattttattatcttgcatgtggatatccagttttcccaacaccatttattaatgagatttttttttttgcccattgtttatttttgacactcttgttgaagatcagttgacctgtgtgggtgacttccaggctctctattctgtcctattggtctatatgtctgttttttcaggtaccatactgttttaagtaactttctaaaatattttgaaattaggacgtgtgatacttctgactgatttcttctttttcaacattgctttggatattttgaaactttttgtggttccatataaattttagggtttaaaattatttcaaaataatttctgtaacaaatgtcactgagattttgaaatgcaatcagttgtgaatccgtttcaattgttcttttttttcttacaatggtttctatttttctgctttgtcaaatgcctgataattttttatagtatgggacacacttacaccttaaaactttttgttagatggctgaataggaacagctccagtctacagctcccagtgtgagcaacgcagaagatgggtgatttctgcatttccagctgaggtactgggttcatctcactgggacttgtcggaaagtgggtgcagcccacagagtgtgagctgaagcagggtggggcatcgcctcacccaggaagtgcaagtggttggggaattccctttcctagccaagggaagctgtgacagatggtacctggaaaatcgggacactcccagcctaatactgcgcttttccaatggtcttagcaaacggcacaccaggagattatatcctgcgcctggcttggagggtcccacgcccacggagccttgctcactgctagcacaccagtccgagatcgaactacaaggtggcagcgaggctgggggaggggcctctgccattgctgaggcttgagtaggtaaacaaagaagccgggaaggtcgaactgggtggtacccatcacagctcaaccaggcctgcctgcctctgtagacgccacctctgtgggcagggcgtagctgaacaaaaggcagcagaaacttctgcagacttaaacgtccctgtctgacagctttgaagagagtggtggttctcccagcatggagtttgagatctgagaatggacagcctgcctcatcaagtgggtccctgacccccgagtagcctaactgggagacacctcccagtaggggcctacagacacctcatacagctgggtgcccctctgagatgaagcttccagaggaaggatcaggcagcaacatttgctgttttgcaatatttgctgttttgcaatatttgctgttctgcagcctgcactggtgatacccaggcaaacagggtctggagtggacctccagcaaactccaacagacctgcagatgagggtcctgactgttagaaggaaaactaacaaagagaaaggaatagcatcaacatcaacaaaaaggacatccacaccaaagccccatctgtaggtcaccatcatcaaagactaaaggtagataaaaccacaaagatggggagaaaccagagcagaaaagctgaaaattctaaaaatcagagcacctcttctcctccaaaggaacacagctcctcaagagcaatggaacaaagatggacggagaatgactttgacaagatgacagaagtaggcttaaaaatatcagtaataacaaacttctccaaggaagtttggaggatgttcaaacccatcgcaaagaagctaaaaaccttgaaaaaagattagacgaatggctaactagaataaacagtgtagagaagaccttaaatgacctggtggagctgaaaaccatggcacgagaactacgtgatgcatgcacaagcttcagtagccaatttgatcaagtggaagttcaagtgaatgaaatgaagcgagaagagaagtttagagaaaaaagagtaaaaaaaaaatgaacaaagcctccaagaaatatgagactgtgtgaaaagatcaaatctacatctgactggtgtacctgaaagtgacggggagaatggaaccaagttggaaaacactcttcagggtattatccaggagaacttccccaacctagcaaggcaggccaacattcaaattcaagaaatacagagaacgccacaaagatactcctcgagaagagcaaccccaagacacataattgtcagattcaccaaggttgaaataaaggaaaaaacgttaagggtagccagagagaaaggtcaggttacccacaaagggaagcccatcagcctaatagcggatctctcagcagaaactttacaagccagaagagagtaaaggccaatattcaacgttcttaaagaaaagaatttttaacccagaatttctatccagccaaactaagcttcataagtgaaggagaaataaaatcctttacagacaagcaaatgctgagagattttgtcaccaccaggcctgccctacaagagctcctgaaggaagtgctaaacatggaaaggaaaaaccagtatcagccactgcaaaaacatgccaaattgtaaacaccatcgatgctaggaagaaactgcatcaactaatgagcaaaataaccagctaacatcataatgacaggatcaaattcacatgtaacaatattaaccttaaatgtaaatgggctaaatgctccaattaaaagacacagactggcaagttggataaagagtcaagacccatcagtgtgctgtattcaggagacccatctcatgtgcagagacacacataggctcaaaataaagggatggaggaagatccaccaagcaaatggaaaacaaaaaaaggcaggggttgcaatcctagtctctgataaaacagactttaaaccagcaaggatcaaaagagacaaagaaggccattacataatggtaaagggatcaattcaacaagaagagctaactatcctaaatatatatgcacccaatacaggagcacccaaattcataaagcaagtccttaaagacctagaaacaaagagacttagactcccacagaatcataatgggagattttaacaccccactgtcaacattagacagatcaacaagacagaaagttaacaaggatatccaggacttgaactcagctctgcaccaagtggacctaatagacatctacagaactctccactacaaatcagcagcatatacattcttctcagcaccacatcatacttattccaaaattgaccacatagttggaagtaaagcactcctcagcaaatgtaaaagaacagaaactataacaaactctgtctcagaccacagtgcaatcaaattagaactcaggattaagaaactcactcaaaactgctcaactacatggaaactgaacaacctgctcctgaatgactactgggtacataatgaaatgaaggcagaaataaagatgttctttgaaaccaatgagaacaaagacacaacataccagaatctctgggacacattcaaagcagtgcatagagggaaatttatagcactaaatgcccacaagagaaagcagaaaagatctaaaattgacactctaacatcacaattaaaagaactagagaagcaagagcaaacacattcaaaagctagcagaaggcaagaaataactaagatcagagcagaactgaaggagatagagacacaaaaaacccttcaaaaaatcaatgaatccaggagctggttttttgaaaagatcaacaaaattgatagaccgctagcaagactaacaaagaagaaaggagagaagaatcaaatagatacaataaaaaatgataaaggagttatcaccactgatcccacagaattacaaactatcatcagagaatactataaacacctctatgcaaataaactagaaaatctagaagaaatggataaattcctggacatatacaccctcccaagactaaaccaggaagaagtcgaatccctgaatagaccaataacaggctctgaaattgcggcaataattaatagcctaccaaccaaaaaaagtccaggaccagatggatgcacagctgaattctaccagaggtacaaagaatagctggtaccattccttctgaaactattccagtcaatagaaatacagggaatcctccctaactcattttataaggccagcatcatcctgaaaccaaagactagcagagacacaacaacaacaaaaaagagaattttagaccaatatccctgatgaacattcatgcaaaaatcctaaataaaatactggcaaactgaatccagcagacaacaaaaagcttatccaccacaatcaagttggcttcatccctgggatgcaaggctgcttcaacatatgcaaatcaataaacctaatccgtcatataaacagaaccaaagacaaaaaccacatgattatctcaatagatgcagaaaaggccttcaacaaaattcaacagcccttcatgctaaaagctctcagtaaactaggtattgatggtaagagctatttatgacaaacgcacagccaatatcatactgaatgggcaaaaactggaagcattccctttgaaaactggcacaagacagggatgccctctctcaccactcctattcaacatagtttggatgttctggccagggcaatcaggcaggagaaagaaataaagggtatttaattaggaaaagaggaagtcaaattgtccctgtttgcagatgacatgattgtatatttagaaaaccccatcatctcagccccaaatctccttaagctgatcagcaacttcagcaaagtctcaggatacaaaatcaatgtgcaaaaaatcacaagcattcctatacaccaataagagacaaacagagagccaaatcatgagtgaactcccattcacaattgcttcaaagagaataaaatacctaggaatccaacttacaagggatgtgaaggacctcttcaaggagaactacaaaccactgctcaacaaagtaaaagaggacacaaacaaatggaagaacattccatgctcgtgggtaggaagaatcaatatcgtggaaatggccatactgcccaaggtaatttatagattcaatgccatcccccatcaagctaccaatgactttcttcacagaattggaaaaaactactttaaagttcatatggaaccaaaaaagagcccgcattgccaagacaatcctaagccaaaagaacaaagctggaggcatcacactacttgacttcaaactatactacaaggctacagtaaccaaaacagcatggtactggtaccaaaacagagatatagaccaatggaacagaacacagccctcagaaataataccacacatctacaaccatctgatctttgacaaacctgacaaaaacaagcaatggggaaaggattccctatttaataaatggtgctgggaaaactggctagccatacgtagaaagctgaaattcgatcccttccttacaccttatacaaaaattaattcaagatggatcaaagacttaaatgttagacccaaaaccataaaaaccctagaagaaaacctaggcaataccattaaggacataggcatgggcaaggacttcatgactaaaacaccaaaaacaatggcaacaaaagccaaaattgacaaatgggatctaattaaactaaagagcttctgcacagcaaaagaaactaccatcagagtgaacaggcaacctacagaataggagaaaatttttgcaatgtacccatctgacaaagggctaatatccagagtgtacaaagaacttaaacatttataagaaaaaaaatcaaacaaccccatcaaaaaatgggcaaagaatatgaatagaaatgtctcaaaagaagatatttatgcagccaacagatacatgaaaaaatgctcatcaccactggtcatcagagaaatgcaaatcaaaaccacaatgagataccatctcacaccagttagaatggcaatcattaaaaagtcaggaaacaacaggtgctggagaggatgtggagaaataggaatgcttttacgctgttggtgggagtgtaaactagttaaaccattgtggaagacagtgtggcgattcctcaaagatctagaagtagaaataccatttgacccagcaatcccattactgggtattcgcacaaaggattataaatcatgctgctataaagacacatgcacatgtatgtttattgtggcgctattcacaatagcaaagacttggaatcaacccaaatgtccatcaatgatagactggattaagaaaatgtggcacatatacaccatggaatactatgcagccataaaaaaggatgagttcttgtcctttgtagggacatggataaagatagaaaccatcatttgagcaaactatcgcaaggaccgaaggccaagcaccgcatgttctcactcatgagtgggaattgaacagtgagaacacctggacacagggcggagaacatcacacactggggcctgtcgtggggtgaggggacgggggaggaatggcattaagagaaatacctattgtaaatgacgagttaatgggtgcagcacaccaacatggcacatgtatatatgtgacaaacctgcacattgtgcacatgtaccctacaacttaaagtataataaaaaaaaaagagaaaagaaaaaaaaaacttttgttgcttatccgaaatttaaatttaactaggtatactctattttatctggcaatcaggtgtcctgagactctagcttcctttacttctctggactcccatttttgtctcctcaactcaggaaattctccaggctctgcctgagttcccactcattgtgttgtatcctggacacactctcatgccagtaagctgatgccaccgtaggggtcaacttttttgtttcctgactctcagattgttgtccttcattgtcagatgctcattatcttaaaacataatttttcatatattttgtcctttttggttgtttcacactggagagcaaatctggtctctgttactccgtctttggttgaaagtggaagtctgtatccagaagttattgtttatagccaggagccagaacatggttctaaccagggccaaaaatgtgtgtttgatcccttcataggtgagtgtgtagtttctttatagtttttatgcaattaactactgaaaaaaataattctttgggtcataaaggcgcctggtgattatgagggttcctcactactgtcaggaaattgattagaagtaaacatcttctaataagagaatgggatgggccactggggttattaccaagtacaaagcataaattggcacattacattgtattacattgattgtcagagtttgaaccaaaatatagatttggctgggggtcaaatctcggaggcccaaattgtatttggagtcagggccaggaagacaagtctgatagagtcagggtgatcaaactggggccatagaggaatttaggaagatgtaaattctcttattccttgttcaatattcagtgatattcttcctagggggcttggaaataaaaataaaagcatgtcctctcttttctctttggtttctcttggtctagctatatgccgctatcctctgggcatgtcaggaggccagattccagatgaggacatcacagcttccagtcagtggtcagagtccacagctgccaaatatggaaggtgaggatggttacatcaagaaagcccatgttctggggttgggcagatttcctgggcacagattcctgaccctaggggctggggaaggtggtgttattggcaggaactgttgagaaatgaaggacagacagcaagtgggcctgtcctgctctgtatgttttcagggagagaatttaggacttagccacatgtactggtctggcagccccatctcaaccacagaggccccagggccacattacccacagtgaatgggttcattgataggaagtggatttgctttccctgactttctcattgtgagctgctgcaggaggcaggcaacagtggcacctatgggaaggtgcagattatgtaggacactgggagttagcatccactcctcttctcagtgggtctatgaaacatcactcactgcaaagcatcactcactgccaagcatcaagacactgaggcctccaacaagttctccacctctctcaaggatctcttacacagaagggccatccttgccaacagacagagtgtggcagtttcctggggcgattgatttcaggggtcttgtacatcaataaactccctactgctctactggttggacccaatactctacctggaatcttattattttgtgaagtattgattttattaaaatggaattacccataagaaaatgaatcctgatgaacctttccccttaatttcttagtgtatgaaagactagagtgatggtaggtggaattggaagggagcaacaaatgaatgggtaatatctgtgagaaaagggagcaatccaagggagaggaaaagtggtagggagttctcaaagtaaactttataataatttcacaattttgctcagtggtagctcagcctgaaggtaataaaatgaaaccagattatttactacttccttgacatgctcttccccctcatcctccccatgtgtttctatggctccttgctggtctgcaatgcccatcctgctgcattgcataacccacactggagaccctactatccctcctccctattgccataacttgatgtccaagcaaagggtggctagctttgttaggctgagtttgaaagagggaagggaaatatgaaatgactcatgcgggaacagagagtaggaagagttttatttctctttatgcttctaaatcaggatgggaagtgaaggctatgtgtgatctgaaggcctcagctcactgtctttcagggtctcatggtactccagggaaagggatctgaccacaaatgggtactgtggtggcagtgaaaactgtggcaagaacccaaaatgtttataaggacagcctgctctctcccctcagtacagggcagctgcttgcctgtgaaccagtaaacagctctgtggtttcatggttgctccctctctccccaaccctcacctctcaaggctggactcagaagaaggggatggagcctggtgccctgagattccagtggaacctgatgacctgaaggagtttctgcagattgacttgcacaccctccattttatcactctggtggggacccaggggcgccatgcaggaggtcatggcatcgagtttgcccccatgtacaagatcaattacagtcgggatggcactcgctggatctcttggcggaaccgtcatgggaaacaggtaggaagaagagacatccagatcctggatgtccaagaccatattttgacttaggctaggagaagaagggtacaggttttctgtgtggatatgtgtgtccacagaccaggcatgcccttgtaaatgtgtgacccagggtgagggaggcagggaaggaatatcaaggctgtggggaaagcagagtagatgcattctgctcctcgaattaagaagagagagtccatcaaaaacgtggtggggtgaagaaaagtgagcatgatttaataccacctcttcactcattctcttctctctcctcaggtgctggatggaaatagtaacccctatgacattttcctaaaggacttggagccgcccattgtagccagatttgtccggttcattccagtcaccgaccactccatgaatgtgtgtatgagagtggagctttacggctgtgtctggctaggtaggtcactagcccaggaagcctatagactttattaaaaactccaacttctgggaaatgaaggcaatcaaatcagaaagggatgggatcagttactcctggaatggtgatgccctcttgggaagaatagagacagaagcattgctcattaacccagggcttagggccccacactgagtcatgcattcagagtcattacgttgactgccatggaggggcactcctccaaagtcttccctcggtgtccagatggagtcctgctggacacgctgtgcaagcttatacccttgaaactcacatagttccctgaggtaatgggcctgagcagtaggcactcacttggctgtgtttcctttgcagatggcttggtgtcttacaatgctccagctgggcagcagtttgtactccctggaggttccatcatttatctgaatgattctgtctatgatggagctgttggatacaggtaaatcctgggaaactttattagaatgggaaattggccactaagaaagaataatattttatcatgtcttgggatcaataatcaatcaaccaatccgtatttatttagttcttgtacaaggcatttggaaataatttagatgaaggaatacacatgacctttatttccagggaacttaaagcccggtttgggaagacaagttaattacccagaaaacaatcaattacacaaagtaatggctaaagtttgtgatatggctctaagtataatagccatatttttgaccctcaaaacaggacatgtagtctgacacaaatattgacctacttatggaaacaaagggccagagaattgaagtaataagtataatactctgggcaagtcaagaagtcagaaagaatagaccttatacatataaatgctttgaaatttgtaaaaaggggactagtaagacttacaatagacaaggaaagttctaggttaagatgagaattgtagcagaggaaggtaggtagaaggtagcagaagaaaggaagcagggctgaaggcaagactgacctggctatagtagaagctggagttgagaagaacagaatggaacaatggataagcctgaagtggatcaaaggagtgccatggcaaagaagtgtgaccagatatagtaggaacttagggttgggtacaggatgctcccacctataccgtttcacttcaagcctttcagccttgccattcttctagcccacactaacacttttctctctaagcttggtctgcatctgcaaagtgagcctgggagagaattcagtccatcgtgaagaccagaccagatgatggaggttgacagggctcgagagaaggagatactagtgagtctcaggaagggagtgtggaattacagccttctactggcttaggtgtggagaatgaactattgccctctagctgccatcccctgggtgaagacctgattcatccactcttctactcctagtcacttcctttccatcttcttaatcactgttctttcctttttgcttaaacggtcttggcataatttcgctcagtcacaccccaacaggcatgtattcaaggcacagaggaaatcagagatcaaccgaattcagtttaatttaataagcctttgttaatcaactgttactatatacaaggaatttggccaggcatgttaggtattcaaaggtaatggagtcattgatcctacctttaaagtgctcacaatttggagtaggggctaaaacagaatataagttactatgattcaagtatatgagcaagagatagcctatgactgctctggggttcaaaggaaaaagtaaactatagtaggaaagcacaaaaatggggatgaaaacatctggatttcatataataaaagttacttctgtttgctacaaggcttaagggattaaaatgtgtgtgaaaagcatttcgtaagataaattgctatgcacatataagttgttatctgattatcatttttctgaatgaaggaccagtaaagatatggtagaacagatgaaatctgaactgggtcccaaagaatgggtagtactttcacaggtgcagaatcttgaaatggaattttaggcagagggaataatagcatgaggaaaaaagaatcatggttataaagtttaggggactgtctgggagaaatcaacagtttatttaaccacgggccatatttatgtggcaaagtagtgcaggagaagcaaaacaaagcagattatgccatattttgaaggaacctgaagtcaaagccaaaaggagcaagaagtggaggaggaggaagaggagaaattgctgttcttattcttcataaacattatcattaatgtaatgagtcattgaagatttttaaagctgaggaaggacatgattggagctgtgctttagacagattaatcaagcagcatgcaaaggttagattggaatggaatgaggaggctatgaggaacattttaaaactcttagttctgccaagtaaaaagaattaatgaccaaggccataaccgtgactgtggggaatgaggaaaagatattcatttaggatgtttgaaatctgattggatgtatgaggcaaaacagtagggtgagaaaaagggtcagatgaagtttgacagtctaagtgactgaaacaatggggatgacatttatttattcgacaaatatattttgagtgcttaccttgcgccaagcattttccattactatgaagagaagtataatttatggaaaagggaaaccaaggagaaagacttagttcagtaggggatgatgatggatttagtttggagtgtaggtctgtgagactgagaagacattcagtagagaaataaggaaggtagccggaattatggctcttaactccaggggaaagataaaaaaaattacaaaaatgtagacatcattggctttcatttaataattgaagtaatgaaatatctggtggaggtggctgagtgaagagatcctctcagccactgagagatgacatcagagtctcaggaaatagtcatattagcaaaagttactttttaaatttaaaacaatttcaagaataatatatgcttactggtgattttaataactctaaagtatataaatattgaacatttattttcttatcccttcttcacttgatttaattttgaccaagggggaactgaacaggcattccttttaatttctgttgcttttcataaaactttcctgggatttatttttctgaggataatgggaaatatatttattgcaagtaaacttacgttctcctagctttctgatctgtagagagaagaaaaagatggcaaaaccttggaagggagatccaggctctggtcactgtggataaggccagtcaaattttataatttaccaaacattttcaatgattaaatatattttaaaaggctggcataatcacccttagtatttttttattttttgcgattcacaaattttacatattattgatctagctctaaacctcaagggtcacaccaattattgcttgagggtgagtatcccaatctcgtcatttgggaaatttgtgtcatatctgccagagcttgagatgcagagcttgaggaaagagaagttccacatgatggtttttgctctgtccctccataaaaagaaggaaggagcctcttcgtgttctctaagtagtcaaataagcatacatgcagttatattccatccagcagtcaggcttctggaaaactcagcctttaaaacagagcctcttactcagaagtcaaaaaagcctgctaagctagaacacaaaactaaatccaatacctgggattctcatgaaatccttgcatcttacttcctgggtctagtatcctacaaatttaattaaaattaaatagaaattattatttaaatttagagcttgtattttcccccttagtttaatatcaaactgggttgttggatatgtggaatagaagagagtgtgactggattctctgaaattgattcactgaacaatgacaatatgtagttaaaggagagtcagcaccaagctctggaaacatttatatgatagtggggcaagtgctactatgtatggtagcattcattctatgcatttatccatttcctcatttactctatgaattagttcatcaaatgcatttgataatattaagtcattatgtgaagacatattcagtatataagaataggcaaggtgcaataaattatagaaagcttttcatattaaataagacattgtttaaaagttttactactaaaggagtaagcatcaaatattttataaaaattactaatatgaaattcttagttctccattgatgcaagataaacgagtcaatactataatgcaaatctgattatttacaatccttcaattccaagataataagctcatacaaaatctggagtgaagatgccgggtaaaagctcttccacgaatgtgtggttaactcagatttctctctccttttcctcctcttctcctggcctgagcagcatgacagaagggctaggccaattgaccgatggtgtgtctggcctggacgatttcacccagacccatgaataccacgtgtggcccggctatgactatgtgggctggcggaacgagagtgccaccaatggctacattgagatcatgtttgaatttgaccgcatcaggaatttcactaccatgaaggtcagtggggtcgggtgtggtggaacttctttaaggaggcacaaatcatagtgtggtagagaaaaggcatgctagaaaaaagtctaggctgatgccagttcaatgacatattctgttactaactagctaaatgcatttcacaagtcacttcatctctaagggcgtgattctccatttgtgtgtaagggagttagaataggtcagtgagctctcttttttttgttgttttgacactaaaggtgacatatccattaagccaataacacagtgtccagggcccacagatttttaagacgcataaaaatgctctaatttcttttaatatcaggtgaaaaaaataaatttttagggtcaaagattatctttttaccagcacagttgtgtgtgtgtgtgtgtgtgtgtgtgtgtatacacacacaactatatatatatacacaatgatatatatatatacacaactacatatatataaccatatatacatatacaactatatatatacatatacaactatatatgtatatacatatacaactatatatgtatatacatatacaactagatatatgtatatacatatacaactagatatatgtatatacatatacaactagatatatatatgtagttggtgttctgcagtcttctgaatttttccttctaggaacctcacagtggcagtgatagttggtcaggccttataaaacctgggctgcaaccctggttacctgtatgcactgtctgcccttggccacctcacttcatgttgctggactgcagttttctcatctgttaaatgaggactgcaccagcatcttctcagcccttccttgccttgaactctctcgagtctataatcctctcagccgcagttgccgtctaccctgattcgtgtgtgtatctatacacatagatacatacacacatatgtgagaatatgtgtattctcatttagaaatgagatttctaaaaaaaaaaatgaaattgttttagattgtacactattttgggtttctcacctagccctgtgaaaagaagaagactggctctgaaatgtacctaggaggaagcaggatggcagtcttcctcttacctcagttcagaatagctcgaatcagggtagacggcaactactgagttggctggcactgtgtctccatgcaccttagcagggccaacctatcactcacatgcctctttctctaccaggtccactgcaacaacatgtttgctaaaggtgtgaagatctttaaggaggtacagtgctacttccgctctgaagccagtgagtgggaacctaatgccatttccttcccccttgtcctggatgacgtcaaccccagtgctcggtttgtcacggtgcctctccaccaccgaatggccagtgccatcaagtgtcaataccattttgcagatacctggatgatgttcagtgagatcaccttccaatcaggtagggagctcaggtcctctttgggaagtgggagcaaggtgatgaaggaggaatgcacatgcccagaacttctcattagcaggtctctgagaggagtgggattgtacaggcagcttctcattgacggatacggtgaatcctttgtgtgactagttttaattgtggaggggatgggatgagaatggaagtgaacaaaatatgcacgtaactcttcttagaaagaatgtttttaaatgagagtacagtgtgttaaaaattttatataatttaaggtagttaacgagtgcgctgttaaggaaaagcacacctaagcattactgagatatttaaatgaaaatttctaaatatacacaaaagtaaagagaacaataaaccactcatcactcagctttactaatcattgatattttgccatatttgtttcacccattccttccttttggctgtagcattttaaagcaaatatgagatactacttgatttcattagcaaataattggactgcatctaagaaaatagcatcattttcataggtataatgccatgataacatctaacaacctttattattaaataatttcttaataccacccaatatcctgtccatattcaagtatgactaactgtccatcaatgtcttaattcagttgactttatcaaataaggatcaaaataaggatctgttggtgagtttctttattctatttgctctgtgtctcttttaatctaaaaaattccttccatttttatttctttttaaatggattctggcttggctgatggctttctgtggtgtcattttacttgagcttctgttctctgtcattcctaatgactggtgcttacatctacaggttaatttgattccagttcaatatttatttttgtcaagaattctttataagcattctatatatctcagtaatgctgtatattttatgctgaacttcatcatggggatgtaatgctagatcctctcactttttgtgatactaagattgatttctggttcctcatgaactttttccctaagttttatcctccatcaataaccactgtctgaattatttatttcactagggttgctaaatgacgattttctaattcttttattttttctgcatttcttagctgaatttcttccgaatagagtaactattcttcatcatgcaccagtttactcagaaatcacattgaaagagcagcatacgtgacttatcttcccctttaattgttaattttcagaataatgacttgataccgtagcaaccctcaataatgtctaattaattttggtttttacccttatttttttggtatcattataaactcattgctttttatcaatttaatgcttaatcgattgcagttattattattagtagtagtatgtttatttttagacagagtctcgctctgtcacccaggctggaatgcagtggtgtgatcttggctcgctgcaacccccgcctcccgggatcgagtgattcttctgcctcagcctcccaagtagctgggattacaggtgcctgccactgcgcctggctagtttttctatgtttagtagagatagggtttcgccatgttggccaggctggtctcgaactcctgacctcaagtgatccgcctgccttggcctcccaaagtgctgggattacaggcatgagccaccgtgtctggccattattctttttaatactcaagttgtgctgtctttgactagagtttgcatttttttttttttgagacggtatcttgctctgttgcccaggctggagtactatcttgagtcattgcaacctccacctcccaggttcaagtgattctcctgcctcagcttcccaaatagctgggattacaggtgcctgctaccacgcccggcttttttttttttttttttttttttttgcatttttagtaaagacggggtttcaccatgctggccaggctggtctcgaactcccaacctcaggcgatccagccacctaggcctcccaaagtgctgggattacagatgtgagccactgcacccagcctagagtttgcatttttaagggggctctttgctcttttgatctgaccctagaagcctttgataactttcttgttttccgaaagaacaaggtatttcaagctcattttgaacatgtacagcatccgacgtggaatcaaccatttcaagaaatcttgattccttttagtaggaaatggtatttagaaaacacaaactgggtagtagggatgctcattactaataggttgtcattgtttcttggatttttcggtggaagaaagcaatgaaatatgtatatttaaaaagaaagattgtgagtttacattgttacttccaattcaaattaaagataaggtttttatttaaagttgattttatacgttcatctctattatttatgctgaatatcatgtttcctaacaatgttaacagcattttcttcatcctattattcaaaaagcaataccaatattattactagcaacgtaactattgaacattaagatttcttagcaattctcttttctttgtcctgagaatatatcctactaagaatgtgcagtcaaagcactatgttctaaggtcagttgggtaacagtgggataattcttttctgtatatagttatatcaccagtgtggtatacagttagggtaacagtgggataattcttttctgtatgtagttatgtcaccaatgtgatatacagttaggttcattgtattccatttgtttcaacctttagggattccttttaaactttaaacactacttttgattgaacagtaactgcagcaaatagtgatttaacttactacagccagaaactgtgccaaatcttgaaaagttaaaaggtgtttagaacattgttcataccattaaatttaaatgggaagatgaaagatacagaatgctttaaaaaaaaaaaaaaaaaaaagaaatgtccaaagcaatatgaacaataaatggtcaggaggagagaggcactagcgtgggtttgtcatagacagcatcaaaggaatgagacttgtactgggcctggaagaaaagtccaggtgtaaaataacataaaagagaggaagagactaatttaaagataaaccacactttgggaggccaaggcaggaggattgcttgtattcaagagtttgagactagcctaggcaacatggcgaaatcctgtctctataaaaaacacaaaaattagctgggtgtggtggcacgtgcttgcagtcccagctacttgggaggctgaggtgggaggatcacctgagccctggaggcagagcttgcagtgggtcgagattgcaccactgcactccagcctgggtgacagagtgagaccctgtttaaaaaaaaaaaaaaagaaagaaaagaaaaataaatcagaagaacccatcctttcagatttgatttttaagggaaaaaaatttcaagatggtttgcttattaagatgtactgataagaaaatagagcatatttttaggaaaacaggtttggtgtttaaatgccttctgtgctaatgatttaatctaagagtaagttgattgattgtttcatctgaatactgagagtagaaatcaagatgctcaaagtcagtgccacttacactgtaagtgttaactgggggacaaatagattcccacccatcctcagggattctcctggcatagtaactggtacacttattatagctaattatagctatgaaccatggtttttactcctggggtctcttgagctttaaatccaatgcataataatattagttttcaccggagcctgacagccgaactccgaaagcacatgcagaggccagatacctccttatttatataataatattaagaagaagaaaaattaggatacctggaagaaatgtctcttagaaaggaaatacatattctaattcttgacccccttgattagacaaatcagagggaaaaactctggcaaagctgccaacatcaatctggcaaatacgcttttgtggtttagtctcaaaagctgtaaaatcacagaaaaagacactccaatgtcagtaaatatctataaagattaagccttaattcataaattgaagggctaggccgatgaggcatagtggagactcttttataaacaatctaatatccttgaaggaaaaagcatcttaacactatgtctgtcccttgcccatttacccgctatattctgtctatattttcgctgaatttgggtcctgcttcttatgctttatgacaatgtgtggtacagccctttgaatcactgtttcttaaacttttttgtaccatagcatctagtatgtaatatgtgaaacaaaaattttacaaaggaaaacttgcttttactatttagataaatggtgattttttattcaacgtatttatgattttatctttttaaaagactgatgacaactcactaaattgatcttgtaatgtgctaggtcacaatatgccttcagagaaaacactagctgtctgtcttctccctggctctgactcacccttgttttataacagatgctgcaatgtacaacaactctgaagccctgcccacctctcctatggcacccacaacctatggtatatgtgattcctaattacacaaattaatttgaagggacttactgggggatgaagaagggtggagagttgcaaagccctggctgtgtgggaggctttacaccagttggctttggatgaagagtagccctggaaaggtaggactgtctacctccaagttatggatccaaatatactctcttcactatggattcatgtgcttcttcagctgaggcagagtctggagttgtcctaatttctccatgaaagtttgggaatttggggtcagaaacagggaaagggacattcctgggtcagacccatagtgggtatttctaaggaggggtggaaatcaaagaaacaaaatgctgatatctccaattggagataaatatgccatgtatgcattgctttaggcagtcattggtgacactagccagcaatgtgggaaacatgtgggattgaatgtgtccaaagaggactttcagctaccttggcatgtctcaaagaatgcagagagtgaaactggttcctcacctgtttttcatgaggtgtgattaagggactacagactcaggccataataatacagagacaaaattttgggaagaatagaaaaactcaccattattctgtctgacacatggagagggggagactactgtcttatggaagagggaaataggataggggaacaaagtaataaacagattgggcgtggtggctcacacctgtaatcccagcactttgggaggcagaggcaggcagatcatgaggtcaggagttcgagaccagactggccaacatggagaaaccccatctctactaaagatacaaaaattagccgggcgtagtggtgcatgcctgtaatcccagctactcaggaggctgaggcagaattccttgaacctgggagggggaggtttcagtgagccaagatcatgccattgcactccatcctgagggacagaacaagactctatctcaggaaaaaaaaaaaagtaataaaacagtagcaagaaaaaaaaaaaaacagtagcaagagcaagaataagcagaagtattaaggtggcatcttccataattatcctcaaggaacagggtctacctccatgtttccagttcagtccctcatacttttacttgacctgtgagatgattgtattctctgccttctctccctggtcacagatccaatgcttaaagttgatgacagcaacactcggatcctgattggctgcttggtggccatcatctttatcctcctggccatcattgtcatcatcctctggaggcagttctggcagaaaatgctggagaaggtgaggaggtgcagaatggtcatgatataagaaactgctcctttctttcttaagccactgttgtcccaggagtaaaaggcaaattgcaaacatttattaatggttggaattaactgaggctaccaagaaacataggaatgaagccagaatagaattagctaagtctattttctcatttttagagtggacatgttggaaccttcctaacgttcctcggaaatgcagaaaactcttcttaatacattgaatctccattcaggcattttccttgaagattctgattcactggattttgggtagagtccaggcatccatatttaaaaaaaaatttaacaagtgcttctgatgcacattcgaggttaagaattactctcctaatgccaagctgaaatttctgataatgctgttgaagttccttctcatctttttcactttgcttgtctgtttggtgtgtgtgtgtgtgtgtgtgtgtgtagaaaaacatccagcttcattaatattcaagccaagtttctcactattctatttctacttttgtgtacttgaaggttgtgattatgtatccctctgagtccctcttcagactctgtctatgccaaatgatctgaataactttttacattgtctaacactttacaggaagcagaatttttcctcatgcataattttatatacacctcattgagtaataactcataggcattgttatgtttaactatttttctgatgagaaaatgtgatgtgcttaaggtcatacaactgatgtccagtcttctatgctttttccaattgttaatattgaaatgcattgatttctttcttcaaaactatattcatttcatcaaagatggaatatctatgacttgtcttggtttcttggaccaaatagcaactcccttggaccaaatagcaactcactgctgcttagtgtctgattcttttggggcctgctgacgactaagtgtttctgcctttggccatgatcacctctcctggtcaattagttcctctcaatagacatggactagtagaggccacaggaactctgagctgtggggctttgaactgcctcctgagggcagggaataggaaggaggagaaatcctgattgatttctgtgtttgggggtggggactcagaggagaccaatgcctgtgtggaacctctattccagaggagaggaaagggcaccatgagaatgggcttgagtctctagagctttctagatgcaggatgggagaaaaatggctcaaatcaggggtaaggaggagcaatcctgatgagtagcctgcaattccttctgatctgtgccaccctcaggttcctgagatggttgatgtttgttttaaggtttttaggaaggaatatttcatggaagagaaggtctccttgcttcccacaagtatgtctaccagtctgaaaacacttaaagctttcaattcgcaaatagcaacagaagactgaaatacagaatccacagagactcactcgctgtcacgagtatgtctcaaggcatgaatgaggcaaatatcaaaatttttcctcctttagaatgctggaaaacactagtgtttaatgaggtattccagagtgagggtggtggtgaactgaaggttcattgaactgcttgaagaggatatgtgaccttcttaaatagtctgttaggaccacattttagccaagggggaaagtctgtgttctctgctatatgagctctttttctctttatttgagccacaatttaccatacttctctgagtctttattctgaggcctgttggaatatcttcatgggctaagagagaaatgttggaatctccaggtaaaaggtagagcaaacattttgcccttgaatatttaacttggtcctccaagaaattctacccctgtacatcctgagtaagatgactcaaggtgctctggaatgacacccagtgtttcttcctgggaacaaaattttatgtggaaaatcattaagtacacacatacattctaagaacattacttaacatagctgtagactgtatgtagcattatttgtaggataattttggtggtgtcctcaacattccttctttgagagatttaacccacatatattgagtacctactttgttctgagcttcatgcttagtactggggatattactgcaacaaaagaccttcagtctagtggaaaagtgcacatctaagtttcgccattgagcaccaaagctgtgtttgttggagtggagcattttacatgtttaaacccaaatagtcacatacatgcaaatgctggcatttgccttttgatggagcaggcaggttatattagataagataccacagaagtagttgctttgttgttctccctcccttattaggtgtaagtcacattgttatctctggacacccagggctttcctgtcccatgttgtagccattttatttttggttagtgaaaatatgggtcagtggtgggtattatcctaatctagggtatcaaaatgatcaagtagaactactgattcatcatgttatagcacatgcattaagttaataaacaatttatgtctattccaaaaccaagtagttaaagggtaagccaggaaaacccatcatttaataaaacatagaaaactctataagattgagatctttggctactgatgggttcttatagcaacagggagataatcttttttttttaagtgtttcagaaagcacatcatagaaattagaagatcaaattctaccttgaagaaatgaaggattattctaagttcctacaacacaggcatttgtggaaccagactgcattcctagcacgtgcagtgttgctggggttaaacagtagtaaagagttatttcatttgagtgggagagctgagtttaagaagaggaggcattgaccatctcttttgtgccaacatgcctttctccttgctcttctcttccaggcttctcggaggatgctggatgatgaaatgacagtcagcctttccctgccaagtgattctagcatgttcaacaataaccgctcctcatcacctagtgaacaagggtccaactcgacttacgatcgcatctttccccttcgccctgactaccaggagccatccaggctgatacgaaaactcccagaatttgctccaggggaggaggagtcaggtgaggatgatgtggtgggcagggcgtcaagggagaaacctcagcaagcatcaggtaggtatgacacgcctgctcccagttcattgcatctatttttagtctctgctaacctcctgagaagtccacattctctttctagatttggtctgccgctgctcctggcctaatttgagcaactctcctttgctactgaatataagatgtgtggagggacccacataccagaaaagaaagaaaaaaataataaaacatgtgaattaggtgttgacaccagaagaacctaaacagtccaaccagtctaacctcattttacatgtcgggaaagtgagaaagtccagatagagtactcacccaacaccaaatttcatgagtgggtaaaggcaggactagatttttacctggagaaataaataaataaatgaagctaaagacattccgaaattcccagtggtgtagccatttaaataactaaaataaataactacttgagttatctattttttgttaatttctctttggtaaacatttattagagtaatatgagattttattatgagagtaaaacatttctcaccttttctcaataaaagcattgaaataaaacaataaaacaggtaaaacagtaagtagtgtcagttgattcaaatttcgatgtctttcaaaaaatgatgcagagtcatatcagaagggaagctggagtcacctctttagctcagagcaacttttctataagatcatcaacctgagggacccgagtcagtagaaaagaacttgtagtgttcaggagagaggagctaggcctgagctggatgtagaagcagacaggactaaattcaagagcataggattttataggaaggagcctgaaggggtcttttcaaaggataaaaggaaacttgcatctattttattattcaatggatagaagacatgaaagagcatgctaaattcaagtaatttcacagagacagcaagaataaaggatataaactaatttatttcttggggtgaatggaagtaatttacctatttcctaagtctaaaacatcccccacttcatattttaaggcttttttaagttagaatatgtcttaagctagatcatatgtctttaatctgaaagttttttatacctaaaatcagtttttaagtcaataacagtgtcttaaaattaaggaaataagttattaaaccttcaacctttaatattcccaccctgatataccatgagccttcctatagcttcaccacacaattccacaagtttagccacagaatttgttaatgatcatgtattatgaggaaaagaatgagaaataaaatgatgttctacattctgtaggccacaagaaaatctctagaggaagcaaaaccattttccaagtaagaatgtcatgaagcaggttaggctttcacaggggcatgttttagccctcctctcagagttccttcctgaagagatctccaaagacactccacggaatgagggctcgttgcccttgtcttcccaggctgcagcggtgttgtgaagccagtccagcccagtggccctgagggggtgccccactatgcagaggctgacatagtgaacctccaaggagtgacaggaggcaacacatactcagtgcctgccgtcaccatggacctgctctcaggaaaagatgtggctgtggaggagttccccaggaaactcctaactttcaaagagaagctgggagaaggacagtttggggaggtgagttgattctttgattcccttatagctcgaagaaggtggttggataaaaatgatcagtagaacaaagagtcccttccagaggtggattcacaacagaatgtctcttccatttgtctctccttgcattgtcctctggattccagtattgggtcaacctaatctttgtcaaatagctgtggagttcctgggacttctgatttctatataggagtttttaaggcaggcaagtcactagacttcagatatcttgaaaaacattcaatattttcaaaaatgtttacaatagattatggagggtgggatccagaagatgtgatcatcttttatgaactgtccaggaacattctgctactcaatagccactttgtttttttcccctttaatgggagttatatgtaaaatggtcaaaaacaacctcgcccctgcctttggtcccagaatcagccactagggaatgaatcaccaactaggataaggaggagtactcttttcatttgccctcagagtgatgcatgcattattaaacttttcattcttgcatcagtcacatgaaccttctgggagctcaaagcaatgttttgaattctaataggaactcttcaccactgccgtctaaactccaaataaaacatttggtttcctaagacatgttattggttttcagtgtggatctcatgttctctccttagataggtctggtgttgcaagaggtggagggacccatgttatctgttcatggtgtgacatgtactcattctgtcccctgggttgaaaacccacatctgttatactgttactaatacacaggagtttcttataatgctaaaccctatactaagggattattttaggaaattgccttacgttttacatgatccagtgactaatgaatcgaagttcaagcatttgtaataaaagacattttatattgggctatgctgtaatataatattgttattgattcattcattcacttagtgttccaagcaatgtgtatttctaaggcaggagagtggcacattagctgggtactttaccattgttttaaatcttatcaattatttgaatcatagatatgttacacatatcttcttattggtcttttgatcattttgcctgagttgtaagagttagtttatctccaggaaatgcccagcaagagtactgagacatcttcaggagaaatgatgatgctgagactagatgacttttgtctaggttcatctctgtgaagtggagggaatggaaaaattcaaagacaaagattttgccctagatgtcagtgccaaccagcctgtcctggtggctgtgaaaatgctccgagcagatgccaacaagaatgccaggtctgtggtctacattttgaattttcctttatgtatttcatctttaggaccaggaatactcctggatacttctgagcaattttttcttttgagatgggaaggtcagtgagctgcctcccatttccactgttatcctttttcttattccgatggggtcggcagtcctcatctttttctccacctctctcaaacacaaaggtacattttccattgtacttgccacatatttacttcctaaccccctgtgcacaagcactgtacttgttcccaacatatacaactgtctaaatgtgtacttctttggtctttatacacagacatactcctgcatgtcattacctcctcttgacaaagtcttcagaatcacacatgactttcttgctaagcctcttccagtctccttttttcacatttctatttattttctcatcccttttttctcttttatgctccttttcttctatctccagcaaccctcaaaatgagaagctacctctatttggaaaattatctatgaacctcaaagcaaaaggatccacagttctctagcagttttccaaactggctaataatctcttggatctttttctacataaattgcagtttccagccacacttcattgtctgacagcctttccattacaataatggtgagttaatcctcacccagagagacaagctggttgaaagctggctgtatgtgtcccagagaaatctccacacctggataacatatgcattttcccatttgtgttgtcttgatttgtctcactgatattcatagtgaaaaaaagtttattattcttattttccaaattatcataaattccaagaatggtgatagacttcattaaaagtcttgcaatggacaagatgtaagataaagaagagagaaaggtgaggaaatgaaactggaggctttagaaatttaactgataatttcaatctttaagatactggtaagaataaaaagtgacattctctgggtcttatagagagacgaagtatttcttatattaatcttagcacatgattggagaaagtggcatgaggggaaacaaaaccaaaccaaaccacaggacataggatatgacaaagcctttctccgttgttccgatcggtgaagtttgccattcctccacctgtgtccttagcaatgatggatggccatgactgcgaaccctcccaagccatggaaacccctggtttgagacggaagggggaatgaaagaggggaggtgttgcatcaggacggcattgattccagtggtttatattgacgtagtatgacttccagtccaggattcctagcaaactcttggagggcttataactcatctgctccaacagttttgggaatgtgggctagaggcctcactaacaaaatcttgctactttatgacccaagggtgtctgtcaccatgtactcaaacaattattagtcttggtcaaatgaatacttcttttgacatgattaccaccacagcctttaaagagctctgttttcgacaggctactaaatacatgttgcaactgactgatggttcgtactgcattaagaaaagtcagtatgagaaaataaagagtaatcagataagccaaagatggttgttcacatcatacaaagtttcttcactagtaatagagtgactccatggctttaaaaaaaaaaaaaggtaaatatcctcgtgcacttaagatatgattttcagtgaaacattttactctgtagagtggtttttagcagcctatttttgattcagcaaatattaatcactttctgtgtggcagggattttgttagatgtgagggatagaaatgtgaataagtcatggatcttgttctcaaaaacattacaattgaataagggcccatgatatttcaggaggaatagaatgagacagatccaggtgtcaatttctctgtcctctcaaaagttatccaaagggaaacaagatttggcataatgtccaggaataggccttggtgtgcattcttctctctcttgattctgactctggcaacttctgagtttatctatgtctgtatcctcccaaggaatgattttcttaaggagataaagatcatgtctcggctcaaggacccaaacatcatccatctattagctgtgtgtatcactgatgaccctctctgtatgatcactgaatacatggagaatggagatctcaatcagtttctttcccgccacgagccccctaattcttcctccagcgatgtacgcactgtcaggtaaacaagccaggtcttccttctcctccctgtggtcatgagagtaacctgggatctgaaaatagggagcagtgagccttaaagtgtatcaatgttctgggatggtgggggaagtcagtgtgcagggaataatggagcagctgccctttggggaaacgcaagggattcatcaagagtagagaaagaatgttgagctttcaaccctagtttgttgataccattttagaatgtgtacctttcacatcttcctgtttccataggctaccttctgtcttcttgtctatttcctcagttacaccaatctgaagtttatggctacccaaattgcctctggcatgaagtacctttcctctcttaattttgttcaccgagatctggccacacgaaactgtttagtgggtaagaactacacaatcaagatagctgactttggaatgagcaggaacctgtacagtggtgactattaccggatccagggccgggcagtgctccctatccgctggatgtcttgggagagtatcttgctggtaagttctcagcattttaaagccctgtctaacaactggcttgtgggctcacatgcatgacacgtggagacaaacctgagacagcaggaggcaaactcaatagactgtagtattttctctgatttgaaattattttctttgtgtactaattcttattatttaatgcttgcctatttctgctaaaaaattaacacacataaaaatttagggagagaagttaaaaagtataagagatttattatctttgtttctctttatcatttctacctagtgattgttcttaatttaagatattaaaaaccttatcatttaaagaaatgttacctatacaaaatattttcttctccattagtttcataagcatgtttctcataattacatagactaattcctataattgtatttcaatacttttcaacatgttctttttaagttcatcattctttgctttataatttttatttgattcttgatattccataccataagtgagtaatttttcccaaatatctctattagaggtatattttctgtccatgcatacctgagactttttattgttgattttataaccactcagctgatttatagactcattagactatacacttttacttcctacaatgccatgtacatgttattttatcttttttcttgtgtgacattgcagagaaaagtctgagaccaatttggttttgttcatttatgattaatctgcttatttcctgctaatattcttataggatttgtaaattaattttgaaataaaaaatgtatagttattcccttgcactcaccaggataaccactatcaatactttggtatattttcttagaggatttttttctatacatatattttttctatgcatgcaattttttttctgtgcatgcatttatatacatatgtacatatatgtaatttatattacataattgggatgacactatgccatacaattctctatctctatttttaacttaacattttattatctgcataatattccatgtgtagatatatactataacttaataatgcctctataatttgatatttaagtactttccaatttcctgctattatgaatgatgctgtgatgtacacgtttacataaatccttataaagatctttttcacctatatatgtgaattgctatattttacccatttctaatgggatagttaggcattactctccctaaaggtattatatggtgttcaaaacaatatattagactgacattcagaggaccttggttcaaatccagtttttccactactaatggtcttattaaccagaagaatttgggaaacctctcctgtttcatttttctgatctaaaaaataaggataactggcatggtggtatgtacctgtagtcccagctactcaggaggctgaggcaggaggatgaaaatctgggctgcgctgcgctatgacaattgggtgtcctcactaagtctggcattaatatggtcacccctaggagcagtggaccaccaggttgcctaaagagggatgagccagcccaggtcagaaacagaggaggtcaaaactcccgtgttgatcagtaatgagatcaaacgtgtgactggccattgcactccaggctgggcaacataatgagaccccatttctcaaaggaaaaaatatttaataataaataatatcatccacttcacagtgtggttgtctgtattgagtagaaaatgtgagtagtcaatgcatgctatttacacctgaatctcattgctgtcacttgttaaagtctatctttcaacactgtgattatcactgaactggtaaatgagagtcctggattcactgcaggcacttaaactagattcctctatctctaccataaaaaccattgacttcccattcagattttgcctttctcaggagcattttcccaaggctaccctagagttgaaaggttgacctaacactcagttgcagagtcaaatagcttatggctgcatttttttcagctcttggatctcatccccagagaaacagaaccaagctgagatcatgagaatgaaagaatgggctgtttctaaatactccatgcacatcttggcattttcagaattccttgcctgtggtgggggaaggggtatagctgcagattatgaaatttaacagggtgttgttgtgcacaggttattctgatttcccattcttttctttacttaaatagggcaagttcactacagcaagtgatgtgtgggcctttggggttactttgtgggagactttcaccttttgtcaagaacagccctattcccagctgtcagatgaacaggttattgagaatactggagagttcttccgagaccaagggaggcaggtaagaactgttggggatgaatggatgtggacctgtgtaccttgaaggatggagaatggcaagtcctgacttagcaggagtgggccgagatggaagacagactatccaggtgttagtctttgtcactaactatccagatgatgtgaaagaccagtatcctccccaggcatccatacactttgctttatctatgtgtcaactcattgactcttggagagcataaagggtcatgtcaggtttctccccagctcaaaggtagcaggaaacaaagtcctatctctcatgatttatctatttcttgatctagaccatgtggtttttcttctgggtcaaaaaataaaagtgtaaaagggatgtattagcattcattaaaaatatagcttagtataagaaatggggttggttttgactatctagcaatgtttctagacttggatgtctgaaaatgggcagatatatcctaaacttgttgctcttggaaggcatctctgggcccagtattgtgacatctcaggactcagggaaagatgagttcccaagctccccaggagtctcaattcctagccaagatactccaagcttttttttgggtggcttagatttaaaattcctgtgagatctggaatttaaagcttgccagtaactacagcaccgcacttccccaaaggggcctggcaacagcatacccttggattatggtatctttaccaggaaaaggataatagctgggggaaggatcttgcagacaataaaaagtggatcttctgtggcttgaacagatccaagcaagccaaagatagataaggtattgacaagagataatacattatgcatattaaaaataagagaggggtctgagaatttaattgtatcttgatactctgtaaatattttggcagcagggagtctaaattagctatcttggttatgaggcaatttgccttcttactatagtcaaaggaaaatttactcctgagtacatgagataagtgagtgggccaaagaaaaatgttgttttctgcctctgccatgatcggctcagccaagatgaacttcaatatgggttgcccataaatggaagatttggtctctttttggttgtttcatcttttgcatgaaggtagggaccacataatggcccatcaaaaaattctgctgcagacaactgcagaagacaaatggaacagcttagaaaagggctgatatgattcagaactttcacgagtaggaaaaatggacaccacacccatttcagttatcaagttcaagaaagtgggcagggggcaaatcaaaccatgatgcaaagatacttccctttcccccgtctttgtaatattctctctctctctctcttttgttttcctttatttttgttcccaaagacttacctccctcaaccagccatttgtcctgactctgtgtataagctgatgctcagctgctggagaagagatacgaagaaccgtccctcattccaagaaatccaccttctgctccttcaacaaggcgacgagtgatgctgtcagtgcctggccatgttcctacggctcaggtcctccctacaagacctaccactcacccatgcctatgccactccatctggacatttaatgaaactgagagacagaggcttgtttgctttgccctcttttcctggtcacccccactccctacccctgactcatatatacttttttttttttacattaaagaactaaaaaaggaaaaaaaaaagcctagggcagatacaatctagtaaaagaaaatctttgatataccaaagtgttggataacaaaggctagaaaattcagataatttataaaggttaactatacttgtgcttataaatgtgcagattctacaatatttttccatgtcattctaaaagaatcttcagaaagaaaaacttgaagaatactaatgtcttgggaaacatgagattaagtttagggaaaacacttgatagatgtggagaatctgaggactcagaattcagcaactaatcacaggtggttttctaatttggcctctggacatgtctcactgtttgtatttctctctcctgtcaaagtgaatgatatattcttgaaaacccccaatttcttgaaatgggtgttctgttcattcatgggcaggggtcaggattgaagttcatatatgaaacaactggggatgtagataggaaagaatgtctgctgcaagagtgtatgaagggggattgtcatttacaaaaaaaaaagtacctcatggatggaaggattcatgaatagataatggacataggaaaggaggtcaatggaggacacataacagacatgctatccaccatttatttgtgattttgtaagagggttctcttctttgtcttgttcagatattttcatgtgtgtgttttagtgagaatctgagtttttaatcagtaaagtctgatgttttgataacttgatgttttgatggtagactcttgagttcatcttgtccaaatcttctagcattttcaaggatgaagcctctgtgggatctttgggcttggggctgaatttctcaggcataaatacctaatggccttgtctaagagggaatagatctgttctgagtgtccccaaaaaagttgtcctaggaactgatgtggagaagttacagggagactgatttccattccttattggggaaaacgaagcactcagaacatacaaggataaatgggctgccaccagaggtgaggagtctcttgtcactggagaggttaagatagaggctcaagaacaatgcaaggaaaatggaggttttcaaacacaaagtggatggtggtatgagacaatgtttaatgtccttctaactccgagagtccttgattctggagaggcacaggatgaacatctgttgctactgctgagtatacacactcttgcctctgagatggcgtgaccagcagaaaagaaagctcagggctgtggcttcagaattcatggaaacagagccactgtcaagaaggaatctgctcagagcagattctgagttttcacactccacaaatcctcagatttagtgggaagctggaaaaaggaactcttaattccaattgaggagaaacaagaaaacattacaaatcagtttcccaagctgagaaggattagccttgaccccttgggtctgcctctgttgccctcaccagtttaccttctacaacagtttctcaggaacatgtgtatttccccattcagctttcagcattgctccacgccacagcataagcatagatcccaagtccacaggctccattttgcaggtcatcttctgatcctagcaaatgtcctttccccatagttgtcctatgcctttgggctttagtctatcccaggactaactgtggagaaatcattggtttgagagtcaagagagcattggtttgggagctttaatcctctttctgcttcacactaagtgtgtcatcttggctaaatcacttggtctttctgcattttgttttcttatttataggatgaggaaattagattaaatggttttgaggtcctttcttgttctgatatgtccagtactcactggaaaattggatctataactgatgggtttagtaatctgctcatttcttgctctgaaaattgtagtcagcaaaagagatcatggaagaaatcactgtaatggtagtaatagtaacacatgccatttgtattgtgccttaggtttaccaggtgtttccaaatacattagcatatttgatatgtgcaggactagataccttgggacctgccacactccactttcaagatatgtattagcttcattagaattaaagggacttgaactcaggacctgcagcctattctttatccacatgtctctggtagggctacatccagatcacaccatgacttcttatagagcaagagaaaataatattattatatcttcctttgcctaaaatctctccacttattcttttttatgattctgcaccagttcactgggttattctatgattccatatttttttttaaaaaaatcatatttaaaatgaacttacaatgtctgaattttcctggccttgagtcacagaagtaatatgtttcagatggctgcccaatatgtattatcatgtaatacatatctgtgtccttttctgggatgaggaaggcttcaacttctggcactgagaactttgtattacagacacaggtttagtttctagcttagtcatgcctttagagtttagtagcacaaatccatgcaacccaacagaatacatggtgagggcctagtatgtagaatttgaaagtagttcaaatttgaattagaagaatgaagctaggacttatttggaaaaggagatagaaaaaaaatgatcagaaactgtggggccttattacctttgcagtaagttatcttcttcatgatatatgtgaattattttatgtgcagattgtgttttgggattgtcagatctaaacttatattcttgctggctaatgtgctgatagccaggtctgaaacttgatgtgctatccagacacatatgatcagaaaagatctagagtgcaaagaggtgtctgaggagcaaaatgtggttttaatgttgtggaaagatcacttgcaagtatataagactgtataaagaagaggactgtgtgcaagtggggtgaaaaaaaaggatacgcgaatgtgcatatgactgaatagggaggaaggtcagggctagaaaggaggctacataaaaaggggcaatggagagtgcacaggaaagacacaggggaaggtcaagtcgagcaaggtagaaacaggagtagctagagccattgggaatccattttgaaacaagaaggagttttgaaagggaataggaaagtaagtgtcttgaagtaaaagataaatatggatggagaaagaagaaattctggatgatagagatgataaaaatatttattaagaaatgaagtcaggttcagtgtatgaaatggaaaggaatttttcagaattttaagaaaggggaagttcctcttggaaaagatatagcaaccatcggggaatgaccttttcatttcagaagtggatgaggaaggtggtgtgagcatcaggtatattctggaccatttcaagtgctggtgagaagaaaggaactctttgcctgaactgggcttggttttccaagtgctgctttggaaatgaagacccagagatgcagagcttatggtagttcataaatcttcatgttctattatctttcatctgccaataaagttcattttcaataatgtccaccattgctgtgcccagaataaccacaggcaaacatcaaaacaatacgcataagttagacaagattaaatcttgtctgatatctgcacaaacagatatgcaccatgttggaaacatgtgttttcctagtcccatccaggcttcccacaagaaagccatgatgtgggtctaaaccatatgttttgagtaaaggagaatagaagaaggggagtgtccgcaaaatggaaagagatgaagatgttccaaggaagtatgctgaaacagaacagtgaatgttttgcccaaaactacaaaaataaaagaaaaaaagaaaattgcaatacatggctactaagtctttgatcataagtcgaatttatagacctggaatttgccatcctagtctttcctttttagtaagacttctgtcctctggcagtgcatatggtaggtctctaatgtttctgcatctccaggaagatgcagatccttatttttgctgggaaatccttctaaatagaaatgtaacatttttataaaaacagattaatgtgtttttcacttagtaaatgttttcaagagctgaattgagaaggaaagagactggagtggttaatggtgatttgatttctggcattctgagttttctgctacaattagctgcattacttggtgccaaagagcagtggggaattgttgagttgctgtatcctttaaaaaaaaacaaaaaacttgttattttgaaagaacttaaggctcacaagatgttacaaaaatagtagagtggccttaccctagatccagttttccccatttataacatttcacttagtccattttcggaaccagaaaattaacattggcataatgctattaactaaactacagaccttttttcaatttcgccagtttttccacacatattcatttagttgctggatacttttaattcttgctgatttgtaaactggccttgcttggatacaacaggaaagatactatctggataaagttctacagttttagagagactattaacacactaatgtgttcctttgtcatgagcaataccctgcctacactgcttctaaattttctgatttgtttggctgtttggcatctgaaacaatccaagacaaacttagaaagattaggcaacacaaaacacagtaagacctgttcatagcttgttgcctagaaaaccaggtagcaggatattctagatgcttcctgctgcttctacgtgagtaggattagcactggggacaaaataaggagtttagagtaaaccagtatttcagtcaagagttagttggcacttagttaatggcactggaaatagcttgtggagagaacagaatacaatggtatagactcctaatgtttgataaaatactattttcagcgtggtagagaggttttatttgcctaaatagctgttattaaatggaataacaaccacattagaccaaattaattgcaaacacagcggcaacctggggagaagttgaaactccagttttgtggattacagttttgagttttatgattgacatttttaagtcccctatttaaggggtcaagattataacaatgtgtgtcttattaagtctccaggtcattgtgagcacttaataaatatttgctgaatgttgtttttttgaatgaacataagatagaaacaaaaacttctcatccaattaactagagtgaacgtagggagaattgttttgctgtaacatggagagtttattttcaaatgaggaaagagaaaaaattactcagacttgttcctggtgaagtgcattctctgtttgtatactttttgatggagaaattgatctatagaactgcttaattttttgaggcatttagacagcaatgaaaggtagttctccacaggacaccgaatcaaaaggagagaccagactctggcctcatacccagcctatttgaaacaagctatctagtttctcctgcagacaccttgtcaacaacatgcaacagtgtcaggtgccttgcaggaaaataatctgagtcccaagctagcctgtgctcatccacaatcacaatgaacatgtcaaggaagaatttgcagagactcaagggaagcacaatgggataaggtaatcactttcagtgaaaaactgttttcttgaaaacaggcttggacacaattgaaagctggcttcctgcaaacacaccaagagtctgtaatctagcctatccattatatgtcctttattattcatgatatcctattcttctaccttgttgcctggtaactttttctgaggactgagtttctgcagcgatgtggtgcactcttcctgtgatgaggaaacatctgggcccccttctgcaggctttggaagatgatgtgtcttgtcaaggggtaaagggcaaatggatttaatttctgcttaaaactatcatagacgttccaaatagaatatgtaaaatttctctgtattagaaaaagaaacgtgataccaattgtatattttcttttctttatttattctctgtaagtctgtcagatgataaattgtaaataacaatgattaaagagtcatgctactgatggatctccctttctgtataaacagtgccagttctgggctttgtaacctttgctctttatagtcttatcattcctggggaagtgatggggcatgggcccagagctggggtgtatgtggtatggacacctgtttgtggggctttccagcaaaggattatttaaatagacctctaacatatgagttgactgtttattgggaagaaagcatcttggtctctgacatatccaaacatacgagacactgggattttacgtcctcacattaattagtccagttctggggaatccagtctagaattaactggtgatcccttatcgttatggttacagacttgtcttgtttgatacacagaaatcctttttaaatccaaatatagtctgtctcagactacctgcacatgcacaaaccaaaaaaaactatgaaaaccagaatttagactcagtcattatactagagattagaatgaaacgaccccaaacaacccatttcttacctggtctctgagaataagtttatacttttagttttctgagaatatttctcagaatatgtgagttttctgagcacatttttcagcatggggtatggtagataaatcacagggccaaggtttggcagggatagatgggatcattgtgtaccctattgttcttctgatttccaggagaacagaatgagcccatgcaaaacataaacttatgatgattaaaaaaaacacacctatccattcactcatcaataaaaacatattatgatggttatcaagctgtgtcctatgagtgataaaatatttgtaaaatataaaattaaatggcatctattgtgaactctattctagtctctctgagcacctctagcagttcagcccatctttcaaaagtcataacaccttgaaagcagcaactttagtgcagaaaaaggaagaagagagcagtttcatcacttggcttgaatgaaaatcttggggaaaggagagacagacggtcttgctctgaagctgtctggacttcacttaattcagtctgtcttaggctggcggtcatcccgagactgcggtaatgctgagcctccacagcccaggccctctcccttctttatagaaatgatttttttatgggacagccacacaaccaggtcttcttcttattccttatcacctctgagctctagaacattttaaaatgagtctttgggtctagactctcacaattaggcttaattttactccatgnnnnnnnnnnnnnnnnnnnnnnnnnnnnnnnnnnnnnnnnnnnnnnnnnnnnnnnnnnnnnnnnnnnnnnnnnnnnnnnnnnnnnnnnnnnnnnnnnnnnnnnnnnnnnnnnnnnnnnnnnnnnnnnnnnnnnnnnnnnnnnnnnnnnnnnnnnnnnnnnnnnnnnnnnnnnnnnnnnnnnnnnnnnnnnnnnnnnnnnnnnnnnnnnnnnnnnnnnnnnnnnnnnnnnnnnnnnnnnnnnnnnnnnnnnnnnnnnnnnnnnnnnnnnnnnnnnnnnnnnnnnnnnnnnnnnnnnnnnnnnnnnnnnnnnnnnnnnnnnnnnnnnnnnnnnnnnnnnnnnnnnnnnnnnnnnnnnnnnnnnnnnnnnnnnnnnnnnnnnnnnnnnnnnnnnnnnnnnnnnnnnnnnnnnnnnnnnnnnnnnnnnnnnnnnnnnnnnnnnnnnnnnnnnnnnnnnnnnnnnnnnnnnnnnnnnnnnnnnnnnnnnnnnnnnnnnnnnnnnnnnnnnnnnnnnnnnnnnnnnnnnnnnnnnnnnnnnnnnnnnnnnnnnnnnnnnnnnnnnnnnnnnnnnnnnnnnnnnnnnnnnnnnnnnnnnnnnnnnnnnnnnnnnnnnnnnnnnnnnnnnnnnnnnnnnnnnnnnnnnnnnnnnnnnnnnnnnnnnnnnnnnnnnnnnnnnnnnnnnnnnnnnnnnnnnnnnnnnnnnnnnnnnnnnnnnnnnnnnnnnnnnnnnnnnnnnnnnnnnnnnnnnnnnnnnnnnnnnnnnnnnnnnnnnnnnnnnnnnnnnnnnnnnnnnnnnnnnnnnnnnnnnnnnnnnnnnnnnnnnnnnnnnnnnnnnnnnnnnnnnnnnnnnnnnnnnnnnnnnnnnnnnnnnnnnnnnnnnnnnnnnnnnnnnnnnnnnnnnnnnnnnnnnnnnnnnnnnnnnnnnnnnnnnnnnnnnnnnnnnnnnnnnnnnnnnnnnnnnnnnnnnnnnnnnnnnnnnnnnnnnnnnnnnnnnnnnnnnnnnnnnnnnnnnnnnnnnnnnnnnnnnnnnnnnnnnnnnnnnnnnnnnnnnnnnnnnnnnnnnnnnnnnnnnnnnnnnnnnnnnnnnnnnnnnnnnnnnnnnnnnnnnnnnnnnnnnnnnnnnnnnnnnnnnnnnnnnnnnnnnnnnnnnnnnnnnnnnnnnnnnnnnnnnnnnnnnnnnnnnnnnnnnnnnnnnnnnnnnnnnnnnnnnnnnnnnnnnnnnnnnnnnnnnnnnnnnnnnnnnnnnnnnnnnnnnnnnnnnnnnnnnnnnnnnnnnnnnnnnnnnnnnnnnnnnnnnnnnnnnnnnnnnnnnnnnnnnnnnnnnnnnnnnnnnnnnnnnnnnnnnnnnnnnnnnnnnnnnnnnnnnnnnnnnnnnnnnnnnnnnnnnnnnnnnnnnnnnnnnnnnnnnnnnnnnnnnnnnnnnnnnnnnnnnnnnnnnnnnnnnnnnnnnnnnnnnnnnnnnnnnnnnnnnnnnnnnnnnnnnnnnnnnnnnnnnnnnnnnnnnnnnnnnnnnnnnnnnnnnnnnnnnnnnnnnnnnnnnnnnnnnnnnnnnnnnnnnnnnnnnnnnnnnnnnnnnnnnnnnnnnnnnnnnnnnnnnnnnnnnnnnnnnnnnnnnnnnnnnnnnnnnnnnnnnnnnnnnnnnnnnnnnnnnnnnnnnnnnnnnnnnnnnnnnnnnnnnnnnnnnnnnnnnnnnnnnnnnnnnnnnnnnnnnnnnnnnnnnnnnnnnnnnnnnnnnnnnnnnnnnnnnnnnnnnnnnnnnnnnnnnnnnnnnnnnnnnnnnnnnnnnnnnnnnnnnnnnnnnnnnnnnnnnnnnnnnnnnnnnnnnnnnnnnnnnnnnnnnnnnnnnnnnnnnnnnnnnnnnnnnnnnnnnnnnnnnnnnnnnnnnnnnnnnnnnnnnnnnnnnnnnnnnnnnnnnnnnnnnnnnnnnnnnnnnnnnnnnnnnnnnnnnnnnnnnnnnnnnnnnnnnnnnnnnnnnnnnnnnnnnnnnnnnnnnnnnnnnnnnnnnnnnnnnnnnnnnnnnnnnnnnnnnnnnnnnnnnnnnnnnnnnnnnnnnnnnnnnnnnnnnnnnnnnnnnnnnnnnnnnnnnnnnnnnnnnnnnnnnnnnnnnnnnnnnnnnnnnnnnnnnnnnnnnnnnnnnnnnnnnnnnnnnnnnnnnnnnnnnnnnnnnnnnnnnnnnnnnnnnnnnnnnnnnnnnnnnnnnnnnnnnnnnnnnnnnnnnnnnnnnnnnnnnnnnnnnnnnnnnnnnnnnnnnnnnnnnnnnnnnnnnnnnnnnnnnnnnnnnnnnnnnnnnnnnnnnnnnnnnnnnnnnnnnnnnnnnnnnnnnnnnnnnnnnnnnnnnnnnnnnnnnnnnnnnnnnnnnnnnnnnnnnnnnnnnnnnnnnnnnnnnnnnnnnnnnnnnnnnnnnnnnnnnnnnnnnnnnnnnnnnnnnnnnnnnnnnnnnnnnnnnnnnnnnnnnnnnnnnnnnnnnnnnnnnnnnnnnnnnnnnnnnnnnnnnnnnnnnnnnnnnnnnnnnnnnnnnnnnnnnnnnnnnnnnnnnnnnnnnnnnnnnnnnnnnnnnnnnnnnnnnnnnnnnnnnnnnnnnnnnnnnnnnnnnnnnnnnnnnnnnnnnnnnnnnnnnnnnnnnnnnnnnnnnnnnnnnnnnnnnnnnnnnnnnnnnnnnnnnnnnnnnnnn

SEQ ID NO: 89 - DNA, 3142 bp, Homo sapiens
catcttgcatcagcctgtggatgtatgcctaccaccgggctccttcaccagcaaagtggaaaaagaagcgtttcacaacaaattcttctttttgggttggggaaacgcagtggattatagctctgttttcttctttccaaaactgtgcacccctggatgaaacctccatcaagggagacctacaagttgcctggggttcagtgctctagaaagttccaaggtttgtggcttgaattattctaaagaagctgaaataattgaagagaagcagaggccagctgtttttgaggatcctgctccacagagaatgctctgcacccgttgatactccagttccaacaccatcttctgagatgatcctgattcccagaatgctcttggtgctgttcctgctgctgcctatcttgagttctgcaaaagctcaggttaatccagctatatgccgctatcctctgggcatgtcaggaggccagattccagatgaggacatcacagcttccagtcagtggtcagagtccacagctgccaaatatggaaggctggactcagaagaaggggatggagcctggtgccctgagattccagtggaacctgatgacctgaaggagtttctgcagattgacttgcacaccctccattttatcactctggtggggacccaggggcgccatgcaggaggtcatggcatcgagtttgcccccatgtacaagatcaattacagtcgggatggcactcgctggatctcttggcggaaccgtcatgggaaacaggtgctggatggaaatagtaacccctatgacattttcctaaaggacttggagccgcccattgtagccagatttgtccggttcattccagtcaccgaccactccatgaatgtgtgtatgagagtggagctttacggctgtgtctggctagatggcttggtgtcttacaatgctccagctgggcagcagtttgtactccctggaggttccatcatttatctgaatgattctgtctatgatggagctgttggatacagcatgacagaagggctaggccaattgaccgatggtgtgtctggcctggacgatttcacccagacccatgaataccacgtgtggcccggctatgactatgtgggctggcggaacgagagtgccaccaatggctacattgagatcatgtttgaatttgaccgcatcaggaatttcactaccatgaaggtccactgcaacaacatgtttgctaaaggtgtgaagatctttaaggaggtacagtgctacttccgctctgaagccagtgagtgggaacctaatgccatttccttcccccttgtcctggatgacgtcaaccccagtgctcggtttgtcacggtgcctctccaccaccgaatggccagtgccatcaagtgtcaataccattttgcagatacctggatgatgttcagtgagatcaccttccaatcagatgctgcaatgtacaacaactctgaagccctgcccacctctcctatggcacccacaacctatgatccaatgcttaaagttgatgacagcaacactcggatcctgattggctgcttggtggccatcatctttatcctcctggccatcattgtcatcatcctctggaggcagttctggcagaaaatgctggagaaggcttctcggaggatgctggatgatgaaatgacagtcagcctttccctgccaagtgattctagcatgttcaacaataaccgctcctcatcacctagtgaacaagggtccaactcgacttacgatcgcatctttccccttcgccctgactaccaggagccatccaggctgatacgaaaactcccagaatttgctccaggggaggaggagtcaggctgcagcggtgttgtgaagccagtccagcccagtggccctgagggggtgccccactatgcagaggctgacatagtgaacctccaaggagtgacaggaggcaacacatactcagtgcctgccgtcaccatggacctgctctcaggaaaagatgtggctgtggaggagttccccaggaaactcctaactttcaaagagaagctgggagaaggacagtttggggaggttcatctctgtgaagtggagggaatggaaaaattcaaagacaaagattttgccctagatgtcagtgccaaccagcctgtcctggtggctgtgaaaatgctccgagcagatgccaacaagaatgccaggaatgattttcttaaggagataaagatcatgtctcggctcaaggacccaaacatcatccatctattagctgtgtgtatcactgatgaccctctctgtatgatcactgaatacatggagaatggagatctcaatcagtttctttcccgccacgagccccctaattcttcctccagcgatgtacgcactgtcagttacaccaatctgaagtttatggctacccaaattgcctctggcatgaagtacctttcctctcttaattttgttcaccgagatctggccacacgaaactgtttagtgggtaagaactacacaatcaagatagctgactttggaatgagcaggaacctgtacagtggtgactattaccggatccagggccgggcagtgctccctatccgctggatgtcttgggagagtatcttgctgggcaagttcactacagcaagtgatgtgtgggcctttggggttactttgtgggagactttcaccttttgtcaagaacagccctattcccagctgtcagatgaacaggttattgagaatactggagagttcttccgagaccaagggaggcagacttacctccctcaaccagccatttgtcctgactctgtgtataagctgatgctcagctgctggagaagagatacgaagaaccgtccctcattccaagaaatccaccttctgctccttcaacaaggcgacgagtgatgctgtcagtgcctggccatgttcctacggctcaggtcctccctacaagacctaccactcacccatgcctatgccactccatctggacatttaatgaaactgagagacagaggcttgtttgctttgccctcttttcctggtcacccccactccctacccctgactcatatatacttttttttttttacattaaagaactaaaaaaggaaaaaaaaaagcct

SEQ ID NO: 90 - protein, 855 aa, Homo sapiens
MILIPRMLLVLFLLLPILSSAKAQVNPAICRYPLGMSGGQIPDEDITASSQWSESTAAKYGRLDSEEGDGAWCPEIPVEPDDLKEFLQIDLHTLHFITLVGTQGRHAGGHGIEFAPMYKINYSRDGTRWISWRNRHGKQVLDGNSNPYDIFLKDLEPPIVARFVRFIPVTDHSMNVCMRVELYGCVWLDGLVSYNAPAGQQFVLPGGSIIYLNDSVYDGAVGYSMTEGLGQLTDGVSGLDDFTQTHEYHVWPGYDYVGWRNESATNGYIEIMFEFDRIRNFTTMKVHCNNMFAKGVKIFKEVQCYFRSEASEWEPNAISFPLVLDDVNPSARFVTVPLHHRMASAIKCQYHFADTWMMFSEITFQSDAAMYNNSEALPTSPMAPTTYDPMLKVDDSNTRILIGCLVAIIFILLAIIVIILWRQFWQKMLEKASRRMLDDEMTVSLSLPSDSSMFNNNRSSSPSEQGSNSTYDRIFPLRPDYQEPSRLIRKLPEFAPGEEESGCSGVVKPVQPSGPEGVPHYAEADIVNLQGVTGGNTYSVPAVTMDLLSGKDVAVEEFPRKLLTFKEKLGEGQFGEVHLCEVEGMEKFKDKDFALDVSANQPVLVAVKMLRADANKNARNDFLKEIKIMSRLKDPNIIHLLAVCITDDPLCMITEYMENGDLNQFLSRHEPPNSSSSDVRTVSYTNLKFMATQIASGMKYLSSLNFVHRDLATRNCLVGKNYTIKIADFGMSRNLYSGDYYRIQGRAVLPIRWMSWESILLGKFTTASDVWAFGVTLWETFTFCQEQPYSQLSDEQVIENTGEFFRDQGRQTYLPQPAICPDSVYKLMLSCWRRDTKNRPSFQEIHLLLLQQGDE

SEQ ID NO: 91 - DNA, 35425 bp, Mus musculus
  misc_feature (1)...(35425): n = A,T,C or G
ctggcagcttatcaagttgaccagggtagccaaagtgctgtaccagactggttcacagggacagtgagaacacctgtgcctagaattcatggacggcatcaaacgttatgttttctgtaactctaaaggttcagtgtggcaggagagggtgaggtgctcagtctactggagttggaaagcagtctcgagatgcacgaaacttgcttgcaaggtcccggacatccaccatttggtccgtgggatgatctgcaacagttaaataaagcttttggagagaggggaggaggaggaggaggagaagagagaaagggagtggaaagcagagaaaaacgattattcagtgagggcacactgggaagaggaacatcctagccggggtttctatttccagtgctgacacaaaatgactagaagcaacttcaggagaaaagggtttatcttgtcttacagcttgctgtccaccatacagggaagcccagggtaagaactcaaggaaggaacctggagacaggagttgacgcagaggccatagaagagtgctgcttattggcttgcccagcctgctttcttatagcacccaggactaccagccctggggtggcactgcccacaaccagctgagccctcccacatcaatcaccagtcaagaaaatgtacgcttctctggaggcaagttcctcttctggctggcactaaaattttctctccctggtctacgattctgtgggaaattttaattctttggggtccattgctttaatagtatgataggtgcaaaagtgtcattgtagtctgtctttcgactaccagggtagttacagttagagtgagccaataagtctcatttgcacccacccctatctgacaaggaatatatattggacggccatcgcttcccaaagttcagagaagtggcactttgctcaaggttatgtgaaaccattgttgggccaaaaatcaaatttccttttttccctcccctgctccacttaggcaattagagataaacgttcctttgtagtttaagaccttcactatatcaaaggtcttggcttccttagaaataactgtctcttactccctcctcccttctcattagacctcttcagcctattgctgctctgaagaaaagaaacctatgaacaaatttacattctagagttaatgatccacaaaacctaggccatttgcatttctaaaaggttaccggagacctggtttccttggtgacattttaaggctagataggtgccactactgtctggatctagctgagatctctcaaaccagagcctctctaactcagccgcctctgtgattccgtctttgtggttgctctgccttcccctggagtcggcttctgcctgtagtgtttagggagatgcagtccagtggtggtaaccaagaaaccctaaagggggctgataaagaaatatcacagggatccactgaaatggtggtcagggtgttaagaggaagagaaagaaaactcaaccaagaagaaagaacacacagagaagatgcaggatctgagaaccacctaggtttacaacactcatctaccctgttcaatttgaggctataaacacagttgctactgaaagcagcaaactagattgttctagtctttaattacagtactttttttttcttttttaaagatttacttattttatttatatgagtacactgtagctatcttcagacacactagaggagggcatcagatctcattgcagatggttgtgagtcaccatgtggctgctggaaattgaactcaggacctctggaagagcagtcagtgctcttaactgatgagccatcaatccagcccccaatgacagtactaaaaagaatttatgacaatgtcttagttagggttttattgctgtgaagagaaactatgatcatggcaactcttataaaggaaacatttaattggggttggcttacattttcagaagtttagtccattatcatcacagcaggaagcactgcagtgtgcaggcaaacgtggtgctggagaagaagctaagagttctacatcttgatccacaggcagcagaaggaaacggagtgcctgccatactgggcatagcttgagcatagcagacctcaaagcctaccgtgccacagtgacacacttcctccaacaaggccacacatacttcaataaagtcattccctgtgggccaagaatgcaaacacatgagtctatggggaccatacctgttcaaaccactacagtcaacttttaagtgaacctttattcatgagtttacttattaatcttcacaacataagtacagttaaacaaaaggaagcaagaaagagggaggaagggagggacagagggagagagggacggagggagggagggagggagggagggaggggagagagaggggggcaaaggctagagcagaagtctctttggggagaatcagccttcattcacctctggatcaacctccataaggtgtctcggactgatccccaaaagaaaggaaaagtctgactttttgtaaagttttggagagggtgggaaacttcatacaacatgatttagttttccatcgagcttgtgacaaaatgaggaggagcccaagtagcgtgaattgaaagctgccacatcacagcacggagtgctgcttaccactgttccagagagagcagcagagaggcccagcctgattcaggcctggtaacagtgcagacttgtgttttaacactaagaaaaaaaatctccatttcacagagcttgaaaacaatgaagaatatatgtgggactgcatgtctgtaaaagggtcaggctttggatctgggtctgtctctgaaacctgtggtccttggttgttactcttgtttgtttgctttaatttctgaggtaaggtctttctatgtggtccagagtagccttacgtcatccacgtcttcactgaagccaccattctcctgcctcagtctcctgagtgctgagattacaggtgtaatcctaccaccatagtcattttgttctttgtcagcggacttttgatttttcttacagatcttttccaagactagaaatacacacttcctatcacatgttccttttgaagaaatttcctttccagctggcatatttcagttttcagttgtgtgttcctatgtttgcaatcatttcttttacaagcatctcctatgttgtcccttccagctgcatcaggaaagagtctccgggtttggcttcagcttagtgtttctggaaatgccctacctggttttgttactttctcacttgatagtttttccaaaagatattgtcttgatctgccatctcagtgaaatggttgggtctgagaaaactcagtgtgcaaacctttctgaccctcttcacatctgagtgctcagagaaaaccacacatgcagtataaacaaatgaggctgctcgaagctgccacaaccatgccaacaggcatggagcttcagggacactagctagagttgtctggaagttattgaaaaaatacctccacaagatccagctttaaggcattttcttagtggttggttggggaggtcccagcccattttgggtagggccacccctgggctggagattctgggtcctataagtaaatcagtacacagcactcctccctggcctctgcatcagctcctgcctccaggttcctgccctgtttgaattcatgacctaacttccttcaatgaagaacagcatatggaagtgtaaggcaaatacatccttctctccccaacttgctttttggtcattgtcttagggttttactgctgtgaacagacaccataactaaagcaacttttaaaaagaacatttaattggggctggcttacaggttcagaggttcagtccattattatcaaggtaggagcatggcagggtccaggtaggcatggtgcaggaggagctgagagttctacatcttcatatgaaggttgctagcagaatgctggcttccaggaaactagaatgagagatttataacccacacccacagtgacacacctactcaaacacggccacaccttctaatagtggcactccctggctaagcacatacaaaccatcacattctactccctggtccccatagacttgttcaaacatatgagtatatggggaccatacctaaacatagcataatgcaaaatacatttagtccaatttccaaagtccccataggctatagcagtcccaataatgttaaaagtccaaagttcaaagtctcttctgagattcatcaaatcacttaactgttatcctcaaagcaagacaggaaaccagctaggcaaagtccaaactctgtttctcaaaggctgatgttaacgcattcttcagatctccaactcctttttcatctttgttgactacaacaaacttctttctcttgggctggttccactccctattagctgctttcctcggcagataaccaatggctctggcatctcaaacatcttgaggtctccaaagcaacttcaatgttacaacttcttgtttcaatgtcggggatccacacatgatcttctggtctccttcaaagggttggtgtcacttcctcacctctgccctctatagcactgtaggctcaggttgatctactccactgctgctattcttggtgatcatcccacggtactggcatctccaatacactgtggtcttctgctgcacttaggctttatcaatagcctcttatagactttcttcatggtgccaagcctcaactcaaggtgatcatcccacggtactggcatctccaatacactgtggtcttctgctgcacttaggctttatcaatagcctcttatagactctcttcatggtgccaagcctcaactcctttgcatgaccccttcagtcctgggccatcaactgcaactgaggctgcaccttcacgaatgggcttccatggccactaacagtgccaatcctcagctgttattcatgtccccctcatgccttcaaaaccagtgccagctgggtgattcttacacattaccaagtacagctgcagtgcaaggtataaccttggccatctctggaacacaggttctttgtggtctcataaaacacttctcagaagatttcacctcagtgatgctggcttcttcttaatcaccagtaatttcttagctccagctaaccagcatcaattgtcttttcctcttaaatataaagtcagagacatttgtccaaggctgctaagttctgctgcttgcagaagctggaacatggcccctttgttctattacattatcattaccctcctcttttccaaccccttcactacctaagcttggctgtcctggatcttgctctgtagattgaccttgaactcatagatctgcatgcttgtctcctgggattgacggtgtgtaccaccatgcctggatttaagctttcttcacctagaacttgctctgtctcaggctggccttgaactcacagatctgcttggctttgtttcctgggactaaagacaccactatgcgggatctaaacttaactgggtaggatcttgccccaaatcccactcccttaattcagtgtaatatccttgaacacaggattcagctccatttcacttcttggtgcctctttaatactcaaaccacccctttctcagcttgctatgcttgtttaaaatgctctttatgcgacttaactagagaagtctatggtgggcgtttctgagacttcttttgtcagtgcaataaatccgagtctcttcacctcagactcaggcacactcttcagacaagtgcaaaaattagccacatttttttccaccaaaataccacaaaaacagtctctaggccacgtactgaaattattctccactgaaacctcttgagccaggtctgcccaattcaaatcgcccacagcaacaaagtcttccatattcctactaggatggcccattaagtcccacttaaagcattccactacttttcaaatccaaagtcccaacatccatattcttcaaaacaaaagcatggtcaggcctatcacagcaataccccagtccctggaaccaacttcttagttagggttttactgctgtgaaccctatgaccaaggcaagtcttaaaaggaacacttaattggggttggcttacacgttcagaggctcagtcaattatcatcaaggcaggaacatggcagggtccaggcaggcatggtgcaggaggagttgagaattctacattttcatcaggaggctgctagcagaacactggcttccaggcagctagaatgagagacttataacccacacccatctactccaacagggccacaccttctaatcatgccgctccctgggctgagcttatacaaactaccatcatcttggtgttttgttgcatctatagaaaccctaatgaagatcgagtcagtgcgagagttcacaaacacagactcaaaggttcccgaagagtttggaaagctgactgaacactatagtcagcacaaagctttaatactcaacacactggctttgtgctctgactctgtcccttagggtcatctagcctagaacgaactattttagcttctttgaagtgaagtttcttcctgtgcaaattgagcatgacctgggattgctgtaatcaggtaagtctagagcctgcttcacagttagttagcatctctatgtttacataattacattttgtttcttagtatggtaactatatactgttcttatgtttccttgtcttttggtcttttaaaaggggtatagtttttttaatgtcccaaaggaaaaaaagtcaaagtttggggggcagcatatcacactggagtgtgacttcactgatccaacatgactgagaaacttactcatctttttttttcccccagatggacacattttatattattattattacttttaaactttttaatggttctgtgagttttgcagcacacaccccagtcccactcattttcccatcctctagtatctactctctgcccttgtaacctccctcaataaaaatacacaaacaaacaaaacaaaacaaaacaaaacaaagcatagaaacctctcacagaggaagctgtggtgtgccacagtgtgtctgtcccacaatatacctctttgtccacacatcttcacttgcaaatgttcactgcagtgagtcattggtctggtctgaggtctctggcttctgtgacaccatcagtactggatccttaccgcgactccgccttgttatcctgttgttgccctgtgtcatggagatcctgcagctttggatcagcaggaccagcccttttgcaagtgcccagcaattcacagttcacagtgaggggtggggccggttctgcacatcacctgggtagctggtggctgcccagaccccaggacaacctcatggtctctagtggcaatatgagccaccgatactgacatcgacccctgccactgcttagccacggatccagatccaggtcctcagcaatagcatgggcggggacgtcatcatggcctcaggtagggggtctggctattccacaacaggctttgcctctcttccctctagtctccagttccatcttccttcacagtactcaaatgactctacttctctttctctcccatctgtgcactacacacttgcacattgtagtggctcccactccaggcagggcatgtggctggagagcctctgggtgacctctgcctgcacagcgtggcatggcttggtctatagcctctcctaaggcatggcagcagagggtctatggctggttccccccctccccccttctgtaccacgtagcatggagtcaggcaagcttctgtgtgactacggctgggtgcctgaaaggaacgctggggctgtgtgggaggggtggcaagagaagaatgagaccaagacaaagtttctgatcaaggcccgatgtttcctttttgaatctgaactctaaaaggggggaagcccatctcctactatgccaggatctcgtggcttgtcaggaactcacaagctcagcctctcagcaggtagtggcatcttggaagaagctgcagatatggcagggcaatagtctttacctaggtcggaagactccacccgaggtggaatagccggctgtagcataaacaaggtctaaatcagcctctcaaggctaggggaaggcacacagagccttcacacagagtagcagcaggcaggtctgaggatatcttccttctctcacgctgttcaggctgatcatcatggcggcaggcaggactctgtctgcagcctgtctgggctttgtggtagagagcagatctcggggtctttccctgccaagcaccagaactgggtggcatggtggttggcaggtctctggatgtctcccgggtttacttttaacctctactgccatcagcacagtcctgggtgacactgcgatgacctccttgtcactgacctccgcacagcaatcaatggtcccagtcggaggtaaatcaggatgctctctattctaatgatatatttaaagtactgatgtcatcccattgctctcttcccataggttaaaattcagataagagctggcaggggcggggctgggagatgagatggcacctgtagtaaagtcatagggtagatagggtggaactgttgaaggtttctgaagaccacagagtgtaagatggttttataatgtcatttcctttactattacagcatgcttcctgacagagcattttggaaagaggcctcagaagagctccccaaaactggtccccaaaattgcatcatctggggatgctgacaggaagcaagaaaaacaaaaataggatccatccgtgatacattcatagtccttttttttttccccaaaaaacctcgagtacagttgattctttaccagtgacagttttaaccaccttgtttgggaggaatgtttactaaagccttaagtctcttttttttcacgaccaagagagattttctgcgacctagtgggtagcagcaggctgtgttgctaagcattctacagtgcacaggacaagccctcaccagagttatgtgacagccatcctggcactgcatacctgcaatctcagtatcctggagactgagggtggaagagctcaagcctgaggttaccctgggctaccctgggctacacagccggttccaggccagcctgcattatacaacaatacacttctttaaaaatgtttttctgctaaaaatgtcattgctgcagaatctgagaaactttgttcgaatgggtagaaatgttgatcttcattttacagaccagggagccagatgttctcagaagttctggtgcccacaacttgttcttacagcttggaaccctatgatcttttatcatgccatagcagtgagaagagtaagtagtgcagtggggcgggggagggattcaggactagggcacagaccgatgctcgataggtacttacagaggagcgagtggagaggaatgtatgtgaaggatgagtgttctactgctgttctcacatatggcctagcttttggtctacaatccaacagtgagctggggattgtgataacagagaaacccagatggtggtaagtggttgtgggtacctttattcagtttctggaggagtccagatcccacagactggaccttcaagactcttgccatcctccatcacagactgaggcaaatgacttctgagctgcgttggggtgaagttttccctctctgtaccagacgtccaggtcagctacggctccagcagaacatgaagggagttgtttctcagtgtctaaaaaattttctgtgatttgagctgaatccagtttattctggtaagtcctgagtcttctaatagagaacggatgaaaggaaagagggtggaaggggaggagcccaggattaaacagaccgtttcttttcacttccccatttggacttcacaattttgtctgttctctgggtactatctgccaagccgggagggaagcctgtgcctgcagctgactcgctccagagctgatgggaatcctgccgttcctactgatccccatggagagcaactggactgtccatgtgttctcacggactttgtgccatatgctactgtggacagccgtgctaagtaagtcgggacctccagaagagaggcaggggaaggacacctgggttggggttggatgaatcagcctggcataggaggcatgtcaggagtaagtaggaggctaatagttaaaatgtaacaacctggttggcctttgaaacaaaatcaaagctggcaggagtttttgctgtttcttcttttcctgtctcttggtaccaccttcccctcctctgatcaaaatctagagtcctagacttgagtgagcaattaaaagaccagtttctctttgaactcgtgattcacacaggaccaaatcttaggcaagatgtctagtactgcttaagacaagggctgggagaaagctcaaggatgcttttgaggggtggtggtggacactttattatataaggagaggtgctggagagatggctcagtggttaagagcaccgactgctcttctgaaggtcctgagttcaaattccagcaaccacatggtagctcacaaccatctgtaatgagatctgatgccctcttctgttgtgtctgaagacagctacagtgtactaacatataataataaataaagattaaaaaaaaaaaggagaggagtaggaaggtcaaggttgacctgggaacttgggttcagggtttcataaacatggacaagtctggcattgtcagttgtggggccagagaaatctctcatgcttccttcattgtgtagaccatgggacttggttctggccctgcttagtaagaaagtcatggtcagggtcttaggctgagatggaggaagactttctggtcctggtctcatctgtgggcagaggacagaaactgatggtgccaggtcattagcagagtctgggtgatgctcagtaagggagccctattccaggagcatcttctaagctcagttcctggggcatctacgcatacctctgagaagaaggcatactggtatccactcaccccaagttatgtggtatgactcatagtgaaatctggtcagcgctgagggacctcagctgtccaaatatatatttacacatacacagacacacacacacacaggtatatatatatgtatatatatatatatgtgtgtgtgtgtgtatgtatttatataaaatataatatatatatatttgataccagatagtttagttttcacatgggaagatcagtcctaaagaggcaatatgcctttctatttgtgctgtatagctatcaatcacttggtgaaaactcccaaggatgacattttcttccattttccttgggtacatctccattttcccccccatttttttttctgggcctccacacttaggtaggacatcctaacttccttcagttgtataataccctctgactttggtcctgagtagctatagaatcttccatccagctatggggaggcacggtgctttcgaagggcctttggtggaggcctgttatctcctgatgaagctccaggactgttctgcttctcccagttcccatttctcccacagtggatcgtcctcagccaggcaacgtgcccactgcacttggcttttactgcccgtgtttctgctgattcttaaagttgtttgcgccagacgctattctggatttgaggtcatatcagcaaacaaaactgttttcctgacctaaagtacaaggtctttgtcttccttatggggaacattagacacgaacagagttctcattactgtctcttgggtatagaatgaagcatgagtggtagtttccctcttctgcatctctttgttttttgtttttgctttgttttctctttttcatgcactgcacttgcccccttgccagtcctacatgctcaggggttttagcaattacttctccatcactagctcccagactcatttgtccttccttcctcggtatactttaatttctctgtctgttgatcagacacctatagatttatcagcatagacacaaatttatattcaaaattcaaaataacatcatttccttacatattttcttatctttgtaatatttctatctatatgagcaaagccaccttttccttggtcatccatttttatcaaccttatgtctcattagaagccaagtttcctcagtcttgtctcttagctttccctcacgtgtgtcttctttgcttcctattgtcaatgcagatgagtaagcaaggccacaagggaatatgggtacatttgatggagtcaaaggataaacaagttaaggggacctgcccacagtatctgagaagtaaaggcaggaagaactgtagttcaaagccaatatgggctacatgacaagtttgtagccagcctaggctacatgagactttgtctcaacaataataactacagcaagaaaaagataaagggatttgcaattaggtgatgataatgatgaatgggatgtgtgtgcatgcgtgtgtgtgtgtgtgtgcatgtgtgtgcaagtgcatgtgcgtgtgtgcatatgaaggtaaatgtggacttacgggtagacagcgatgatgaggtggtggtcagatgatcacagagactgtacttgggcaaatggaagagaagaggactggagggggattgtgatgaaacctcggatatttcattttgtggcctttgaagttggtgtggtttggagcggtgatggcaaggccttgaggtatagcatgggctgtgtggctaaactgtatgagagaatattcactacagatgaggaagtcatggcatgatgcagccagatgctgcacaggccactgacacatgttctagattaccggtaaccatctttttcttactaatctctgggacttcctctgtcccaattagtctgacacagcagtttcagctccaaagcaaacctctcattgtttactgagctaaacagcaaactttggaaatttgcctatgatcctttaaaaggtagccacgtggtatgtttggaacttcacagataccttatctggattgtcaccaatccttacaacaattatgtcgtaggtattgttgtcatcatctccatttataagccagggaatcaaggcagagaaaagtaaagttgtctctgcaaggtcactgagcatcagtcatattactttcttttctcattactttgtcaagacgccaggcaaaagcaacataagaaagggtttattttggcatatttttttagggcattgtggtgggaaggtgtggtggtaccttggctgaccaagtcacacccatagtcaggaaacagaggtggatgttagtacgtagctggctttcttctctactcttgtttattcgagccaggaccccagccctttggatggagacattcgtattcggagtgggtcttagcactatagctaaacttttccagaaacacctttgcagacacaatgagagatgtttccatggcgattctaaatctagtcaagctgataacataaactaaccaccaccgtggtaaagtcaacgtgtgaattttgtgtgcgttctcacttgctgctgttccagttggctttgacaatcctccagaatatggccgccacctccattttcgactgcgttcctcattatcggggtggtttttgtttctttgtttttaaacagaccaaagaagcattcaggctgcaacttgctgagagtgtttgcaagcatccgtccatctttcttggggaatattcctcttctgtttgtcactatgacagaacacttgcagctgcacgatgaatatttcctcactttctccgctagactaaacccagccaagtacagtgccccaagtcccttcctctgcagaacttcctagcctttgtccattctcttttataagatgtggtggcacaggactagggatgcagagcagggtagatctcgggaggagaaggccaacttggtcattctaggctagtcagggttatgtaatgagaccgtgtcaaaaccaaaagtggtttttttttttttttttgcacacatgcgtattcttatcatcagacttcagtgggggaacagagacttatatcttttcttttaggtatgctctgcaaggcacaaggtggtcaatgcagtctctaggaatacaaagagatgcattagcagggatttaagtgtacatcctgagatgtggggtgtggggatcagaatccagttttctagactgccagaagaatgctctttcacgaaacgccccctcctcttatccctgaaagtattcagacttggaaggctcttgcctttttcatctcaattgtaaaatcccatcatggacaggtgcataaacacacatgcatatgcacacacacatgcacatgtacatgcacacacacatgcacatacacatgcatgggcgctcatttatctcaagactacctttactatcatacccaacagtggtgccacatgtccatctttgtatttagcattcctgtcccatgtcccttcccctcaccatgtgccgttctatcggctcctgcaggaatcacagatctagtgtacttttctttcaatttaagttttagttttgtgaatgactgttttgcctgcatgtatgtctgtgcaccacatgtgtgcctggcgcctgaggagtccagacgaggatgtcagatccatgggaactggatggtcatgagacaccacgagggtgctgggaatcaacccaagtcctctgagagagcagcctatgcccttaaatgctgggccatctctctagccccatgatgtccttctgtaatttcttttttttttaattaggtattttcctcgtttacattttcaatgctatcccaaaaggtcccccatacccacccccccaatcccctacccacccactccccctttttggccctggcgttcccctgtactggggcatatgaagtttgcaagttcaatgagcctctctttgcagtgatggccgactaggccatcttttgatacatatgcagctagagtcaagagctctggggtactggttagttcatattgttgttccacctatagggttgcagaccccttcagctccttgggtactttctctagctcctccattgggagccgtgtgacccatccaatagctgactgtgagcattcacttctgtgtttgctaggccccggcatagcctcacaagagacagctatatctgggtcctttcagcaaaatcttgctagtgtatgcaatggtgtcagcatttggaagctgattatgggatggatccctgcatatggcaatcactagatggtccatcctttcgtcacagctccaaattttgtctctgtaactccttccatgggtgttttgttcccatttctaagaaagggtccacactttggtcttcgttcttcttgaatttcatgcgtttggcaagttgtatcttatattttgggtatcctaagtttctgggctaatatccacttatcagtgagtacatattgtgcgagttcctttgtgattgggttacctcactcaggatgataccctccaggtccatccatttgcctaggaatttcataaattcatttttccttctgtaatttttttaccctaccaaatttgcctagcagcaaaacctggaatacctaaatcctttttaaaaaaagatttatttatttattcatttatttaatttatttaatgtatgtgagtacactgtagctgtcttcagacacagtagaagagggcatcagatcccattacagatggttgtgagccaccatgtggttgctgggaattgaactcaagacctctggaagaacaattagtgctcttaaccagctgagccatctctccaacctgaagacccaaatcttaagcaatgggcatatgaaataaatcacaagaaagtcagttgtagggtagggcacaaatgctcaaatgacaataaacagactaagctattaggtcttgtattgcttagtgaaaagtcaggcgggagagcactcttctggtgtggtctctttgctctgtgtgtgtgtgtgtgtgtgtgtgtgtgtgtgtgtgtgtgttcatgagggaaattctaaggacatatatacccagtgataatattttgtcatgagtattttctatttgtcaacaaagatgatggactatccacaggatctgtagtccctcctcatgaaagaaaaaccctactcccaggatggaccttggcaaagtctgatgtactaaaccactaattctatgtaaacttcaaccggggccttagcagtcaaaggtgttcggccctttaaagtgtcacaacacacatgctaaggggaaggggcctaattatctctgaaagtgtgctttatccaggaagtcccagggaagggccaggccttgaagggtgggctgtgggagtgagttggggctctgggtctgggtaggcatgtctcagtacagaaggccctggttgatgcttacttcctttcttacagatcttgctgctgggactcatggtaagtcttctttttatatctcctcactctcttctttgtcaccgtctctttgtctgtctggagctgctctgaatggatcagcaaccgggctcagtatcaggtcaggaccaggaatggaccattgttctcagaagatgccctgcacttctccttctctctgcctgggaaggaagatgatcaaaagccatggctagctaggatatcaactcttttagtcctgttagagtgagatgtggccagttatcacaaactgtccttgttctcaactgcccttcactctcttagtaaaattgtttaaaaggttgacctcaaagaagcagggagtgaatgcccagagcctgaggaagtggaggagaggtaaggatgaagacaaagtggttaatgggcacaggggtcgagtttgatatgaggagtaacttctaatgtgctgtagcaagaaaggtgtcttagttagggtttctatttctgtgtagaggcaccatgattgcaacaacatttaattgaggagttccttacagttcagaggttcagtccattatcatcacagcaggaagcatggcagcatccaggcaggcatggtgctggaagggtagctgagtgttctacatctggatctgtaggcagcaggaagagagagtggcactgggcctggcttgagcatctgaaacctcaaagccaacccagcgacccacttcctccaaaaggccacacctactccaacaaggccacacctcttaatagtgccactccctataaggggccattttcattcaaatcatcacaaaggccttttcccaattgaggctccctcctttcagataactctaatttgtatgtcaagtttatgatactagccagcacagagctccatgccctgttcttctgattagagaaccatctgcaactgggggtggggtaggggggagtgacaggagggatggagaagagaaatggaaatatatcttggtgagagatatttctggggtgtctcctttgccccctcctatcttctcttgctttaccctgctgaggatcaattacactccttgtgatttccctggggctcacaggatggaataagtagaagaattcaatggaagaagcttcctgggcctggtcccacccttggtgctctcagtaggaatgctggtgtctttttagcagaaacttggggcctgctgaggttcttggggcttccttgcctcacactgcctgctctctccaaaattgagcagatcttccaaaggctgtggtcaaactcgagcccccgtggatccaggtgctcaaggaagacacggtgacactgacatgcgaagggacccacaaccctgggaactcttctacccagtggttccacaatgggaggtccatccggagccaggtccaagccagctacacgtttaaggccacagtcaatgacagtggagaatatcggtgtcaaatggagcagacccgcctcagcgaccctgtagatctgggagtgatttctggttagtaaaggctggccctgggaggagatgggataccaagaagttgggggtggagtggggtggatctgcttactgcaaagtttgcaggaaatggggtgggctggtttctgggaagcatcccagggagctgcttcaagggctttttgtccacccgtttccgcttttgccagcccctgtgctcagcctgcagtggagggcacacaaattcctgagaaactgtgtgaacagtttgttgtggtagtcctggttgagcaagagagttcaagggcacgggcagctgaatgtggcagaaaaaggaagtccctatttcatagaaacccttctagttcatgacacccagaaaaatgccaatagtatgcaactgaatccaagccctggggaagaactgtgtatacaaagctgactgatgtatttaaccttgagctcaggattctcatctgctcagctgaaggtgcggagacctctccccagaaggttctggggagcactcacctctcccccttgcagttccagcaggtccttgactttcttttttttttcttccatcaccttgtgagcactcgacgtgaaaagctgtgtctcgtccatcttcatatttgcagtatccgaaacagggcatggcttgttaaaactttgccgagcagatcattgattttacaaggctcctggcaaaaagtaggtttcccttctagaagaactaccaggtgctattagcaactgctattgctgtcgttttacgtagttccctcctatcatccggtccagggtttcctcaatggtatacccacagcaagctaacgatttgctccaaccctgcttggactgtggttccacatttattactaatcattagagacaccgacagttttggaggttcaagctgttcttccatcccccaaatggaagactctgttgtatctgcttcatacttgtctcctctggccgactgaattccttcatctttcctgccaagaagggaggaatcgcatccccatctcaggagaggaagggcaacacgcgtgtatcttggatacctgttgcgcgccatgaactactgtcgccgtgaaatctgatcatgtctattttcacagatgaagaaagtgaggcccagaagccttaactttcttgccccaaattgaagagctcccaaatgaatggagctagaaacagagatcgactgcctgacgtcaaactaaagctctcccccttagcatatcgcatcccactaggaagaacgacctgaccctctgagtgctatggtcctttcgtgtctttcagactggctgctgctccagacccctcagctggtgtttctggaaggggaaaccatcacgctaaggtgccatagctggaggaacaaaccactgaacaggatctcgttcttccataatgaaaaatccgtgaggtatcatcactacagtagtaatttctctatcccaaaagccaaccacagtcacagtggggactactactgcaaaggaagtctaggaaggacacagcaccagtccaagactgtcaccatcactgtccaaggtaagtggactctgtcaagatattggaaaaggagaagaggagataagcaaaggtttatataaacctacagtttatatagctccacatggagatctaggagtgccacagagcaaagctgagctttaaggcaaaggcaagagctatgaaggccttgccaagtgatgccaagtgggctcgggccagagttcctcacttgcaggcagtgggtgacaaggctgctgggcagcagagccttgttgttgctacatagatactttatgctcctagacattcctaagagctgaagtttaacttcttgtccctcatgtaacagccgttcactcttgaacactgttctagatagtggtagtaccagccactctgggaggcttcagatccatcctccctgccacctctgacggctgtcccttctgctactacactgttaccagtgtgccttcattagtttggtttaaggtttgtggggaggcacgagtctgtccactaaaggtatgcttatgaggtctcagggaaatgtactacacctatgagtgaccagacacagtgactgggcataggattggaggagggatggattcatggagagtacttaatacctgtcctcatgtctgtcttctccagggcccaagtccagcaggtctttaccagtattgacaattgtggctgctgtcactgggattgctgtcgcagccattgttattatcctagtatccttggtctatctcaagaaaaagcaggttccaggttggtggctctctttggtgcctcttattctcagctagctaggggttactcatttgattttgatattgtcccatcctattcattcacctacttacaaatatatctgttaagcaagacttgaacaaacctgatgatgtgccatgacctgtgctagacactgtaggcactggattccatttctacccccagctggctctcagcattgtgaggaataccaggcacaccagtgggtacttataagaagggattagaggcaatgctaaagacctgcttgtgtcctgccatcccaggacagtaatgcagaagaactgaagtctgaagccagggtcagtgagatggtccagccagtgcaaattcttgcagttcaagccctgtgatcttagttcaatcgctgggatccaagttaagttggagagagagagagaactgatcctacaagggtgtcctttgacctttgtagatgggctatggtgtgtaccgcaccccaccacagcaataaataccttaaaaagtatgtttttttttccaaagagtctgatgctagcttggactgtaggataaacttgaagccagcctgtgctacacagaaagactctttgtaaaatataaaagagagaggcgagtctataaccctgtgtgtttgtcagctttctgtcagtataacgaagtgcttcagataatctacctatgaaggaaaaacactgctaggcatggtggtatatatatacatatatatatataattttagcattcaggaagccaaggagggtcacaagttcaagattctatcttaaaatagctaagtaaataagtaagtttagttgagcactgttttatagacttggtccatattcccttggccctattgctttgggcccagcaaagctgtaatatcccacattcacaacaggataaaactctcacttaaggccagtaagaagagatcaaggaagagactggcaatcccacaatcttcttcttcaagagcatgtccctaatgacctaaagacttcccactaggcccaaaacactgaagggtcagcttcctcccagttattccaccttgaccaatcacttaacacatgagattttaatggacatctcagatctaaatggtggcaggcagcctggctggaacagttagaaaatgtttcattggggagccagtgtgatgttgtgactgaaatacacacacggggaccaaattgctgtggtccaaacctcaactcacagcttaccagatctataatgttgagtaaattactcagcctttgggccccagtttaccagtctggaaaatgaacactatggggcccaccttacaggaatattaggacaatgaataaggccaaagcctttgtaccagaacctcaaagacaaaaaagaacacatacatagaggttggagagatggctcagatgtaaagagtactgactgttcctccagaggaaccaggttcaattcccagtacccacacgacaggtcatagctgtaactctggctctaagggatctaacacccttgcacagacataaatgcaggaaaaacacagattcccatatagtgaaaatacatcattaaaaaaaatacataagtataagctgtcaccactgtggagaaggatgatgtcccgggggtaggcatcaaggcaaagtggaagagcgttctaggatctgtggccaagcgtggaaatgaggaatgttgtaggcaggtcaatggaagccattgaaaaaggggaaatactactactaactaatacctgatacctcaaagcacactctgcattggctagttatggaagattagtaaatactgagatatgcagatagaaaggttacactgttttctttagacagggtcttgctttgtaaccctaactagtctggaattcactgtgtagaccaggctggcctcaaactcacagagatcttcttgcctttgtctcctgggtgctgggattaaaggtctgctccattacgcccagccaaaagatcacacctttaaaaggctggacgaacccaggaaagttgcaggggggttgttttatgtcacacctctgggtgtcctgttgggttagtcactatgggctggagatgtttctgggcaggggagctgggaattggggaagagaggtgttgctggtgtgaggggaaggtctctgttgcttttaactctgttctgaccctgctccttgatcctgggctcaccccataatcctactaacttcctacgtgcccctcctagctctcccaggaaaccctgatcacagggaaatgggagaaacccttccagaggaagtaggtgagtacagacagccctctgggggctcagtgcctgtcagcccagggcctccatctggactggagccaacaagcagcagcccatgtgagttcagtgggagtacaggagagggaggagccgtgggagaaggctgtgactcaaatctcttggtcagttctgagtctaactcttggacctaaggaagatctcactagagatgagaacaggaacgttgattccggatcgaggaagagggtgggccgtgactaaactctagtaaaacaaggaatccggacacatttccagtacaggactgcaaaggcatttgcatcttttgggggagatgtggcagagttccaaaggacagggttagcagttgtgagacagaggtcaatggggtggggcagcctaggacaaaaagagatctgaggtaaccctggagatcttttcaggaaggtgtccctgtgtagaggtactgctgcgcttagaacagctcaacttttagtaaaatattgagaggagatttgagttgaggaaattctaggggattggagctattcataggatacactttgtgggcacaatgtggctctaatgcccactcatgatagtttataaaacattgacctgatcgttgatccatgatgatacaactgaatctggagtaggtcattccccaaagtgcggaaggaataagtgggtggatgagtggtttagatggcctctgaacccttatatagttccgagatttgaaagcctggtgcaggaggaagaatataggagtgggagttgtctcactgtagttaaagacaaagcataaaggctagtggagttctctagaggcttccatgacagcagaactaggcaggaggaagggtttcatgtagattgcatttcaggaggctggagtgtgactcagagctgagccaacagataagagagcttgagcaaaacagcattcacttagcttggcttagagcaaggtctgcattcttcagccaggctgcatagatccatgtccaggattgaactagatctataagaaaatcacaactggactcactttcttgtctggctctgtctactctggtataaacacatttcacatggcatttatgcagcctggcacctgagctggggtttcccctgaaggcatagttagctactgggattgctaagtagtatataaaagggaggagcaccgaatgcgttgtggggcagaatttagaacatagcaaatagggctctttgtgtttggggagcgagtgaagagactgaagacattgtctcaacctctttctcctcttccaaaaatgaaggtttatagacactggggttgcttttcctactggcaaagggaactttgggcaaaaatataagagaatgtggtgtttgggatattagagaaacatctttttcttctctttctttcccatttccctctctctttccctccctttctctcttctctttctttctccctctccgctctctttttctttctttaaaatatatttatttactttatgtatatgagtacacagcagaagagggcatcggattccatgatggatggttgtgagccaccatgtggtttctgggaattgaactcaggacctctgggacagtaatcaatgctcttaactactgagccatctctccagctcgctctctctctctctctctctctctctctctctctctctctctctctctctctctctctctctctctctctctctctctctgtcatagcatacctacttctccagtgcttcagcaagaataaactacacttgtccagtatggaaacagccatctgagaagacaaacatccgggcttgatttcactctgatctaaaccctgatctaaacccttctgcactccgttctccaacctcacagagcctcagtgctgcctagtctgctgctaggaaagttgagcgattttctgacaaggatgtggcatgtggtggggtttgtttccctttgccagtatggcctgcagagaaagctggcttccacgatggtcagggaaggaggcagcactgcttggcccaatagcctgggttggggttggcaagccgtgtctggggtcttcgctttgagctttggttttgcagcctcagtagcagcccatctggccctctttcccagcagtgcccatgctgatcacttattttcatccacagacaatcctcctgatctggaagaagctgccaaaactgaggtgagggagcccagccctgtcctatccctctccccgttcatctgcttccccacgacctctcctcagctctcatggctcgtttctgctttccctaggctgagaatacgatcacctactcacttctcaagcatcccgaagccctggatgaagaaacagagcatgattaccagaaccacatttagtctcccttggcattgggaaaagcaagccagaaaggccaggatctagtgtctcctggtccaagggatgctgtagatattaaagaaaacatccagagtcacttctgtgagtcctgaaaccaacagacactaagagattggttcccagtggttgactgtactaatgactcccataacttacagcttcccaactcaagactcttctgctatcgatccacactgccactaaaattaatcaacttactgccgttaagagactgcagcaacgtgggaactgcttataattcacgctaagataaggagaacaattaatgttaggatgcatcatctcggtgatgataaaccagacttgtaccaacctgtcaaaggtgatgcttctttataaggaacttcaattttttttatttttctataaaggtcgcatgttactttaatagtaaaatgttgtaaaaacaaaccatctttctatttactttttcaaggctgcaatgattggaatacaggctgagctctctggggtttgttggtcttctgccagaagactcttggggagatgggttaactttcccctggggagacataagagtcttaggtagagccctcatgacagaccaaagtcatatgattacactcaagtctagtttggtgcaccagtgagtttatccagcttatttgtggggacatgagtgaagggttcctttcaggggtgtggaagatcttataacaacagtcttagcaccaatgacgtctttacagccacatagatggtcccccaccccctctttagtttgtctccctcaaactcccagtcctgaagcctgtgcctttagacctccaggataatgagcatgcacgactatccaccaccacacctggcctggtagcagtagataggaggtagaggagaggacagacagggatttggagtagagggccagtgcccctcccctccaaactgaacatgcttccagtgaacttgtctttttgtttccacttccttcttctcttttctcctatgacaaacagagtaaccactttgttatgtaacaggagttctcaggaagtcaaactttggatgaaagccagtggtaactgaaggatgaccttgaactcctggtcttgctattcccacctcctagttgctcggagcatattatgtttgtatgttcgcaaaaatcactcaggcagctatttaagcttgctgtaaccacatgagttcagagtgtagacatataaagggaaaaaaagggagaaattctatgttgtcctcattcctctttcttcttcttcttcttcttcttcttcttcttcttcttcttacttcttcttcttcttcttcttcttnnnnnnnnnnnnnnnnnnnnnnnnnnnnnnnnnnnnnnnnnnnnnnnnnnnnnnnnnnnnnnnnnnnnnnnnnnnnnnnnnnnnnnnnnnnnnnnnnnnnnnnnnnnnnnnnnnnnnnnnnnnnnnnnnnnnnnnnnnnnnnnnnnnnnnnnnnnnnnnnnnnnnnnnnnnnnnnnnnnnnnnnnnnnnnnnnnnnnnnnnnnnnnnnnnnnnnnnnnnnnnnnnnnnnnnnnnnnnnnnnnnnnnnnnnnnnnnnnnnnnnnnnnnnnnnnnnnnnnnnnnnnnnnnnnnnnnnnnnnnnnnnnnnnnnnnnnnnnnnnnnnnnnnnnnnnnnnnnnnnnnnnnnnnnnnnnnnnnnnnnnnnnnnnnnnnnnnnnnnnnnnnnnnnnnnnnnnnnnnnnnnnnnnnnnnnnnnnnnnnnnnnnnnnnnnnnnnnnnnnnnnnnnnnnnnnnnnnnnnnnnnnnnnnnnnnnnnnnnnnnnnnnnnnnnnnnnnnnnnnnnnnnnnnnnnnnnnnnnnnnnnnnnnnnnnnnnnnnnnnnnnnnnnnnnnnnnnnnnnnnnnnnnnnnnnnnnnnnnnnnnnnnnnnnnnnnnnnnnnnnnnnnnnnnnnnnnnnnnnnnnnnnnnnnnnnnnnnnnnnnnnnnnnnnnnnnnnnnnnnnnnnnnnnnnnnnnnnnnnnnnnnnnnnnnnnnnnnnnnnnnnnnnnnnnnnnnnnnnnnnnnnnnnnnnnnnnnnnnnnnnnnnnnnnnnnnnnnnnnnnnnnnnnnnnnnnnnnnnnnnnnnnnnnnnnnnnnnnnnnnnnnnnnnnnnnnnnnnnnnnnnnnnnnnnnnnnnnnnnnnnnnnnnnnnnnnnnnnnnnnnnnnnnnnnnnnnnnnnnnnnnnnnnnnnnnnnnnnnnnnnnnnnnnnnnnnnnnnnnnnnnnnnnnnnnnnnnnnnnnnnnnnnnnnnnnnnnnnnnnnnnnnnnnnnnnnnnnnnnnnnnnnnnnnnnnnnnnnnnnnnnnnnnnnnnnnnnnnnnnnnnnnnnnnnnnnnnnnnnnnnnnnnnnnnnnnnnnnnnnnnnnnnnnnnnnnnnnnnnnnnnnnnnnnnnnnnnnnnnnnnnnnnnnnnnnnnnnnnnnnnnnnnnnnnnnnnnnnnnnnnnnnnnnnnnnnnnnnnnnnnnnnnnnnnnnnnnnnnnnnnnnnnnnnnnnnnnnnnnnnnnnnnnnnnnnnnnnnnnnnnnnnnnnnnnnnnnnnnnnnnnnnctctctctctctctctctctctctctctctctctctctccctctctcgttctctgtctgtctctgcctctctcaaatgaataaccattgttgtaggtgttgtgtacattcagggtatatatatttgttattgtttttagaaagcctatacatgtgattatattgttgacttattttgactgggcctttctggatgtcagcctagcttcaggctcattgaaagaccctatctcaaaggattaagcagagagagatagagcagggtatcagatgttttcctttgacctctgcacacccacacataggcagcccacacacatgtgtgcctatgacacatacaaataaaataaataacaataatttttaaaaatcactccagaatttctgctttgaactccctgataaccaagccgtggttgcacggatccatccttgtgtggatcttagtggttcaatccaaacacacagaacaaataaggttgtctgacaccagggagacctcccgaagctcttgcctaatgtgcacctttgagtgtgcctcatggaatcaagtcagttctttctcatatcctctttagcaagacccttcctggacactgctctttgtttttattttctccatggtacagtgtagataattatgcatctccttcttttatatattctcatatatactaaaatgtaagctcacaacagccctgtgttttcatttttcactaacatagtccagagaccagaacaacgcaatagattgttgaatgaattaataaataaaacttgcctctcatagtttctgggttatttgatattcttgcatgctggccaagtgctctaccactgagctacccggtgttatttgacgttcttgatgctgtggcttagatttgttcccctgaaaccatacattggaaacagtccccaatgcaagagaggtgggaggtggggtctgatgggaggtgactagcccacagcagagagctagttctgtgggagtggcttccttctaaaagggtgagtttgctatcttttggctgtttatccttcctgctccatttcccccttcttaacccatgaaatgacagggcaagaaaacctttaccagattctggtccctgggtcttgaacttcccagcctccagaatatgttaataaataaaaactccctgaggggttgtcatagcaacctgaaaaggactttctgaatctcaagaggtcaatgaaaacctatctttccttgaaaccttagcaaatttatctaaaattcttacatgcattggaaaagatttgaacttaaatagacttgggagtccgttttgaatttggtgtaaggtgagtacctgacaattttttcctgtcttgaggctaggtattccaaggttattccttgagcaaatgattgaaaatggttcaaatatcattatcaactcccacacacaggtctacacccatgtccagtcctctttggttgccttatttcatttctttcttcccacctcagtagcatacacattattattattattatattttgatgtgtagaaagccctgttttctctcatttgtttgtttcaagattttcttggctgttgttctcttctagataaacttcagaatttcacaaaccatagggccctgggataattgtctgtgtagattacttgcataaggttttacatctgtgttatactgagacctcccaaggtatagcttcttgcttgtttggataatagacttctcttataacatggccttttaaaaataggacatattagatgggctatggtggtgcacgcctttaatcccagcacttgggaggcagaggcaggcggannnnnnnnnnnnnnnnnnnnctgtcttgaggctaggtattccaaggttattccttgagcaaatgattgaaaatggttcaaatatcattatcaactcccacacacaggtctacacccatgtccagtcctctttggttgccttatttcatttctttcttcccacctcagtagcatacacattattattattattatattttgatgtgtagaaagccctgttttctctcatttgtttgtttcaagattttcttggctgttgttctcttctagataaacttcagaatttcacaaaccatagggccctgggataattgtctgtgtagattacttgcataaggttttacatctgtgttatactgagacctcccaaggtatagcttcttgcttgtttggataatagacttctcttataacatggccttttaaaaataggacatattagatgggctatggtggtgcacgcctttaatcccagcacttgggaggcagaggcaggcggatttctgagttcgaggccaacctggtctacaaagtgagttttaggacagccagggctacacagagaaaccctatctcaaaaaaaaaaaaaaaaaaaagacacactttatgtgcatttgtgttttcttgggtattgtatccatggagttacagagagttgtgagctgccaaatgggtgctgggaattgaacctgggccctttggaagagcagccagtgctcttaaccagtgaggcatctctccaaccccaacatggccatggtttgcatgagagtttagactccgtttcccccactccatatcactattactctgattaaaattttctatactttttgaagacaattttgaaaaggtgtattttttttcctggtaaatcacacattttattaatttaacagccagctactgcttcctctccttctttctctttctttcttcctttctctctctctctctctcccttcctttctctctctttctttctttctttctttctttctttctttctttctttctttctttctttcttcctttcttcctttcttccttcctttctttcttcctttcattgtaaggatctcatgtagccaagactgacctcacaatccctttatatagctaaggatggccttgatcctcctatctccacctcccacatgctggaattaaaggagtgtaccaatacccgatttgtgtggtccttcagatcacactcagggtttcctgcaaacaattacagcatttttttcctaataatttgtgtgtttctacttacccatggactcttccccccttcttagcttttgggctgtcttttatcaggatgacttggttgggaataacaggaaatcgtgattaaaattggtttaaacaataaggaaatctannnnnnnnnnnnnnnnnnnntcggtaccctaaaagtaagctcacaacagccctgtgttttcatttttcactaacatagtccagagaccagaacaatgcaatagattgttaaatgaattaataaataaaacttgcctctcatagtttctgggttatttgatattcttgcatgctggccaagtgctctaccactgagctacccggtgttatttgacgttcttgatgctgtggcttagatttgttcccctgaaaccatacattggaaacagtccccaatgcaagggaggtggggtctgatgggaggtgactagcccacagcagagagctagttttgtgggagtggcttccttctaaaagggcgagtttgctatcttttggctctgtttctccttcctgctccatttcccccttcttaacccatgaaatgacagggcaagaaagcctttaccagattctggtcccagcctccagaatataaagaattatattaataattaataaagaatcatccaagtccctgagggattgtcatagcaacctgaaaaggactttctgaatctcaagaggtcagtgaaaacctatctttccttgaaaccttagcaaatttatctaaaattcttacatgcattggaaaagatttgaacttaaatagacttgggagtccgttttgaatttggtgtaaggtgagtacctgacaattttttcctgtcttgaggctaggtattccaaggttattccttgagcaaatgattggaaatggttcaaatatcattatcaactcccacacacaggtctacacccatgtccagtcctcttccgttgccttatttcatttctttcttcccacctcagtagcatacacatcatcatcatcatcatcatcacatcatcatcattattattatcattatctttattatattttgatgtgtataaagccctgttttctctcattcgtttgtttcaagattttcttggctgctgttctcttctagataaacttcagaatttcacaaaccatagggccctgggataattgtctgtgtagattacttgcataaggttttatgtctgtgttatactgagacctcccaaggtatagcttcttgcttgtttggataatagacttctcttataacatggccttttaaaaataggacatattagatgggctatggtggcgcacgcctttaatcccagcacttgggaggcagaggcaggcggatttctgagttcgaggccaacctggtctacagagtgagttttaggacagccagggctactcagagaaaccctatctcgaaaaaaaaaaaaaaaaaaaaaaaaggacacattttatgtgcatttgtgttttcttgggtattgtatccatggagttacagagagttgtgagctgccaaatgggtgctgggaattgaacctgggccctttggaagagcagccagtgctcttaaccagtgaggcatctcttcaaccccaacatggccatgttttgcatgagagtttagactccgtttcccccactccatatcactattactctgattaaaattttctatactttttgaagacaattttgaaaaggtgtattttttttcctggtaaatcacacattttattaattggcatacagccagctgctgcttcctctccttctttctctttctttcttcctttctctctctctctcccttcctttctctctctctctctctttctttctttctttctttctttctttctttctttctttctttctttctttctttctttctttctttctttcttcctttcattgtaaggatctcatgtagccaaggctgacctcacactccctttatatagctaaggatggccttgatcctcctatctccacctcccacatgctggaattaaaggagtgtaccaatacccgatttgtgtggtccttcagatcacactcagggtttcctgcaaacaattacagcatttttttcccttataatttgtgtgtttctacttacccatggactcctccccccttcttagcttttgggctgtcttttatcaggatgacttggttgggaataacaggaaatcgtgattaaaattggtttaaacaataaggaaatctattatctcccataacaaaaagtctagagacagagagtctccttgcatcaggattctgagacatcccccctccccttttctgcaattctctggctactgtccttgggcaagtaagaacacatagcaactctacaggtcatatcctggtatctagaaaaagaaggggactaacttttttggtatgtctcttaaaagcaaggacaatattctcagaagccctgggcgatgctcttgtcatagtatactcaggatagaccattcttttttctttaatttttttattagatattttcttcatttacatttcaaatgctatcctgaaagtcctctataccccccgccctgctccccaacccaccctctcccacttcctggccctggcattcccctgtcctggggcatatgatcttcgcaagaccaaaggcctctcctcccattgttggctgactaggccatcctctgctacatatgcaactagagacacagttctgggggtactggttagttcatattgttgttcctcctatagggatgcagaccccttcagctcattgggtactttctctagctttttcattaggggcactgtgttccatcctatagatgactgtgagcatccacttttgtatttgctgggcactggcatagcctcacaagagatagctatatcagggtcctgtcagcaagatcttgctggcatatgcaatagtgtctgggtttgatggttgtatatgggatggatccccgggtggggcagtctctggatggtccttccttccgtctcagctctgaactttgtctctgtaactccttccatgggtattttgttccccattctaagaaggaacgaagtatccacactttggtcttccttcttcttgagtttcatgtgttttgcaaattatatcttgggtagtctaaatttctgggttaatatctgcttatcagtgagtgcatatcatgtgtgttcttttgtgattgggttatctcactcaggatgatatccttcagatccatccatttgcccaagaatttcataaattcattgtttttaatagctaagtagtacgccattgtgtaaatgtaccacattttctgtatccatttgtctgttgatggacatctggattctttccagctcctggctattataaataaggctgctatgaacatagtggaacatgtgtccttattataagttggaacttcttctgggcatatgcccaggagaggtattgctggatcttccggtagtactatatccaattttctgaggaaccgccagactgatttccagagtggttgtaccagcttgcaatcccaccaacaatggaagagtgttcctctttctcctcatcctcaccagcatctgctgtcacctgaatttttgatcttagccattctgactggtgtgaggtagaatcttagggttgttttgatttgcatttccctgatgattaaagatattgaacttttttttcaagtacttctcagccattcggtattcctcagttgagaattctttgtttagctctgtaccccatttcttaatgggttatttgatttttctggagtccatctttttacgttctttatatatattagatattcatcccctttctaatttaggattggtaaagatcctttcccaatctgtggtggcctttttgtcttattgacagtgtcttttgtcttatagaagctttgcaattttatgaggtcccatttgtcaattcttgatcttacagcacaagccattgctgttctgttcaggatttttttctctgtgcccatatcttcgaggctttcccccactttctcctctataagtttcagtgaggatagaccattcttaaagccctgatttaaaaggagaccaagatgaccatcacatacctagcttaatcccgtcaaagaagagtgactgttgagactgaaacctaaccgctgtgtctttgtccctcctggatgcctcgataaaggtttacctggttgatttgttttgctttctttttttctgacttgtgataactttgactttttttttttttttttttttttgagacagggtttctctgtatagccctggctgtcctggaactcactctgtagaccaggctggcctcgaactcagaaatccacctgcctctgcctcccaagtgctgggattaaaggcgtgtgccaccactgcccggcaactttgacttattaatcaagtattttgccttttgcttggtttcaagcatgatattttctactttatttacatttatgtgatatattacttatttctaaatttcttgttttcaaacaaattaataaaaggctgtaacttctccctgtattgatgttttggccataagcatttgacttaaatatgcatgtctgtctatgttctttctgaatagtttataattttagctttattttcttccttttttaggctttattttattttatttattaatatttatttatttatgtatttatttatgtcaccacgacacaagccaggat

SEQ ID NO: 92 - DNA, 1341 bp, Mus musculus
tgtgcctgcagctgactcgctccagagctgatgggaatcctgccgttcctactgatccccatggagagcaactggactgtccatgtgttctcacggactttgtgccatatgctactgtggacagccgtgctaaatcttgctgctgggactcatgatcttccaaaggctgtggtcaaactcgagcccccgtggatccaggtgctcaaggaagacacggtgacactgacatgcgaagggacccacaaccctgggaactcttctacccagtggttccacaatgggaggtccatccggagccaggtccaagccagctacacgtttaaggccacagtcaatgacagtggagaatatcggtgtcaaatggagcagacccgcctcagcgaccctgtagatctgggagtgatttctgactggctgctgctccagacccctcagctggtgtttctggaaggggaaaccatcacgctaaggtgccatagctggaggaacaaaccactgaacaggatctcgttcttccataatgaaaaatccgtgaggtatcatcactacagtagtaatttctctatcccaaaagccaaccacagtcacagtggggactactactgcaaaggaagtctaggaaggacacagcaccagtccaagactgtcaccatcactgtccaagggcccaagtccagcaggtctttaccagtattgacaattgtggctgctgtcactgggattgctgtcgcagccattgttattatcctagtatccttggtctatctcaagaaaaagcaggttccagacaatcctcctgatctggaagaagctgccaaaactgaggctgagaatacgatcacctactcacttctcaagcatcccgaagccctggatgaagaaacagagcatgattaccagaaccacatttagtctcccttggcattgggaaaagcaagccagaaaggccaggatctagtgtctcctggtccaagggatgctgtagatattaaagaaaacatccagagtcacttctgtgagtcctgaaaccaacagacactaagagattggttcccagtggttgactgtactaatgactcccataacttacagcttcccaactcaagactcttctgctatcgatccacactgccactaaaattaatcaacttactgccgttaagagactgcagcaacgtgggaactgcttataattcacgctaagataaggagaacaattaatgttaggatgcatcatctcggtgatgataaaccagacttgtaccaacctgtcaaaggtgatgcttctttataaggaacttcaattttttttatttttctataaaggtcgcatgttacttt

SEQ ID NO: 93 - protein, 298 aa, Mus musculus
LAPELMGILPFLLIPMESNWTVHVFSRTLCHMLLWTAVLNLAAGTHDLPKAVVKLEPPWIQVLKEDTVTLTCEGTHNPGNSSTQWFHNGRSIRSQVQASYTFKATVNDSGEYRCQMEQTRLSDPVDLGVISDWLLLQTPQLVFLEGETITLRCHSWRNKPLNRISFFHNEKSVRYHHYSSNFSIPKANHSHSGDYYCKGSLGRTQHQSKTVTITVQGPKSSRSLPVLTIVAAVTGIAVAAIVIILVSLVYLKKKQVPDNPPDLEEAAKTEAENTITYSLLKHPEALDEETEHDYQNHI

SEQ ID NO: 94 - DNA, 35460 bp, Homo sapiens
  misc_feature (1)...(35460): n = A,T,C or G
nnnnnnnnnnnnnnnnnnnnnnnnnnnnnnnnnnnnnnnnnnnnnnnnnnnnnnnnnnnnnnnnnnnnnnnnnnnnnnnnnnnnnnnnnnnnnnnnnnnnnnnnnnnnnnnnnnnnnnnnnnnnnnnnnnnnnnnnnnnnnnnnnnnnnnnnnnnnnnnnnnnnnnnnnnnnnnnnnnnnnnnnnnnnnnnnnnnnnnnnnnnnnnnnnnnnnnnnnnnnnnnnnnnnnnnnnnnnnnnnnnnnnnnnnnnnnnnnnnnnnnnnnnnnnnnnnnnnnnnnnnnnnnnnnnnnnnnnnnnnnnnnnnnnnnnnnnnnnnnnnnnnnnnnnnnnnnnnnnnnnnnnnnnnnnnnnnnnnnnnnnnnnnnnnnnnnnnnnnnnnnnnnnnnnnnnnnnnnnnnnnnnnnnnnnnnnnnnnnnnnnnnnnnnnnnnnnnnnnnnnnnnnnnnnnnnnnnnnnnnnnnnnnnnnnnnnnnnnnnnnnnnnnnnnnnnnnnnnnnnnnnnnnnnnnnnnnnnnnnnnnnnnnnnnnnnnnnnnnnnnnnnnnnnnnnnnnnnnnnnnnnnnnnnnnnnnnnnnnnnnnnnnnnnnnnnnnnnnnnnnnnnnnnnnnnnnnnnnnnnnnnnnnnnnnnnnnnnnnnnnnnnnnnnnnnnnnnnnnnnnnnnnnnnnnnnnnnnnnnnnnnnnnnnnnnnnnnnnnnnnnnnnnnnnnnnnnnnnnnnnnnnnnnnnnnnnnnnnnnnnnnnnnnnnnnnnnnnnnnnnnnnnnnnnnnnnnnnnnnnnnnnnnnnnnnnnnnnnnnnnnnnnnnnnnnnnnnnnnnnnnnnnnnnnnnnnnnnnnnnnnnnnnnnnnnnnnnnnnnnnnnnnnnnnnnnnnnnnnnnnnnnnnnnnnnnnnnnnnnnnnnnnnnnnnnnnnnnnnnnnnnnnnnnnnnnnnnnnnnnnnnnnnnnnnnnnnnnnnnnnnnnnnnnnnnnnnnnnnnnnnnnnnnnnnnnnnnnnnnnnnnnnnnnnnnnnnnnnnnnnnnnnnnnnnnnnnnnnnnnnnnnnnnnnnnnnnnnnnnnnnnnnnnnnnnnnnnnnnnnnnnnnnnnnnnnnnnnnnnnnnnnnnnnnnnnnnnnnnnnnnnnnnnnnnnnnnnnnnnnnnnnnnnnnnnnnnnnnnnnnnnnnnnnnnnnnnnnnnnnnnnnnnnnnnnnnnnnnnnnnnnnnnnnnnnnnnnnnnnnnnnnnnnnnnnnnnnnnnnnnnnnnnnnnnnnnnnnnnnnnnnnnnnnnnnnnnnnnnnnnnnnnnnnnnnnnnnnnnnnnnnnnnnnnnnnnnnnnnnnnnnnnnnnnnnnnnnnnnnnnnnnnnnnnnnnnnnnnnnnnnnnnnnnnnnnnnnnnnnnnnnnnnnnnnnnnnnnnnnnnnnnnnnnnnnnnnnnnnnnnnnnnnnnnnnnnnnnnnnnnnnnnnnnnnnnnnnnnnnnnnnnnnnnnnnnnnnnnnnnnnnnnnnnnnnnnnnnnnnnnnnnnnnnnnnnnnnnnnnnnnnnnnnnnnnnnnnnnnnnnnnnnnnnnnnnnnnnnnnnnnnnnnnnnnnnnnnnnnnnnnnnnnnnnnnnnnnnnnnnnnnnnnnnnnnnnnnnnnnnnnnnnnnnnnnnnnnnnnnnnnnnnnnnnnnnnnnnnnnnnnnnnnnnnnnnnnnnnnnnnnnnnnnnnnnnnnnnnnnnnnnnnnnnnnnnnnnnnnnnnnnnnnnnnnnnnnnnnnnnnnnnnnnnnnnnnnnnnnnnnnnnnnnnnnnnnnnnnnnnnnnnnnnnnnnnnnnnnnnnnnnnnnnnnnnnnnnnnnnnnnnnnnnnnnnnnnnnnnnnnnnnnnnnnnnnnnnnnnnnnnnnnnnnnnnnnnnnnnnnnnnnnnnnnnnnnnnnnnnnnnnnnnnnnnnnnnnnnnnnnnnnnnnnnnnnnnnnnnnnnnnnnnnnnnnnnnnnnnnnnnnnnnnnnnnnnnnnnnnnnnnnnnnnnnnnnnnnnnnnnnnnnnnnnnnnnnnnnnnnnnnnnnnnnnnnnnnnnnnnnnnnnnnnnnnnnnnnnnnnnnnnnnnnnnnnnnnnnnnnnnnnnnnnnnnnnnnnnnnnnnnnnnnnnnnnnnnnnnnnnnnnnnnnnnnnnnnnnnnnnnnnnnnnnnnnnnnnnnnnnnnnnnnnnnnnnnnnnnnnnnnnnnnnnnnnnnnnnnnnnnnnnnnnnnnnnnnnnnnnnnnnnnnnnnnnnnnnnnnnnnnnnnnnnnnnnnnnnnnnnnnnnnnnnnnnnnnnnnnnnnnnnnnnnnnnnnnnnnnnnnnnnnnnnnnnnnnnnnnnnnnnnnnnnnnnnnnnnnnnnnnnnnnnnnnnnnnnnnnnnnnnnnnnnnnnnnnnnnnnnnnnnnnnnnnnnnnnnnnnnnnnnnnnnnnnnnnnnnnnnnnnnnnnnnnnnnnnnnnnnnnnnnnnnnnnnnnnnnnnnnnnnnnnnnnnnnnnnnnnnnnnnnnnnnnnnnnnnnnnnnnnnnnnnnnnnnnnnnnnnnnnnnnnnnnnnnnnnnnnnnnnnnnnnnnnnnnnnnnnnnnnnnnnnnnnnnnnnnnnnnnnnnnnnnnnnnnnnnnnnnnnnnnnnnnnnnnnnnnnnnnnnnnnnnnnnnnnnnnnnnnnnnnnnnnnnnnnnnnnnnnnnnnnnnnnnnnnnnnnnnnnnnnnnnnnnnnnnnnnnnnnnnnnnnnnnnnnnnnnnnnnnnnnnnnnnnnnnnnnnnnnnnnnnnnnnnnnnnnnnnnnnnnnnnnnnnnnnnnnnnnnnnnnnnnnnnnnnnnnnnnnnnnnnnnnnnnnnnnnnnnnnnnnnnnnnnnnnnnnnnnnnnnnnnnnnnnnnnnnnnnnnnnnnnnnnnnnnnnnnnnnnnnnnnnnnnnnnnnnnnnnnnnnnnnnnnnnnnnnnnnnnnnnnnnnnnnnnnnnnnnnnnnnnnnnnnnnnnnnnnnnnnnnnnnnnnnnnnnnnnnnnnnnnnnnnnnnnnnnnnnnnnnnnnnnnnnnnnnnnnnnnnnnnnnnnnnnnnnnnnnnnnnnnnnnnnnnnnnnnnnnnnnnnnnnnnnnnnnnnnnnnnnnnnnnnnnnnnnnnnnnnnnnnnnnnnnnnnnnnnnnnnnnnnnnnnnnnnnnnnnnnnnnnnnnnnnnnnnnnnnnnnnnnnnnnnnnnnnnnnnnnnnnnnnnnnnnnnnnnnnnnnnnnnnnnnnnnnnnnnnnnnnnnnnnnnnnnnnnnnnnnnnnnnnnnnnnnnnnnnnnnnnnnnnnnnnnnnnnnnnnnnnnnnnnnnnnnnnnnnnnnnnnnnnnnnnnnnnnnnnnnnnnnnnnnnnnnnnnnnnnnnnnnnnnnnnnnnnnnnnnnnnnnnnnnnnnnnnnnnnnnnnnnnnnnnnnnnnnnnnnnnnnnnnnnnnnnnnnnnnnnnnnnnnnnnnnnnnnnnnnnnnnnnnnnnnnnnnnnnnnnnnnnnnnnnnnnnnnnnnnnnnnnnnnnnnnnnnnnnnnnnnnnnnnnnnnnnnnnnnnnnnnnnnnnnnnnnnnnnnnnnnnnnnnnnnnnnnnnnnnnnnnnnnnnnnnnnnnnnnnnnnnnnnnnnnnnnnnnnnnnnnnnnnnnnnnnnnnnnnnnnnnnnnnnnnnnnnnnnnnnnnnnnnnnnnnnnnnnnnnnnnnnnnnnnnnnnnnnnnnnnnnnnnnnnnnnnnnnnnnnnnnnnnnnnnnnnnnnnnnnnnnnnnnnnnnnnnnnnnnnnnnnnnnnnnnnnnnnnnnnnnnnnnnnnnnnnnnnnnnnnnnnnnnnnnnnnnnnnnnnnnnnnnnnnnnnnnnnnnnnnnnnnnnnnnnnnnnnnnnnnnnnnnnnnnnnnnnnnnnnnnnnnnnnnnnnnnnnnnnnnnnnnnnnnnnnnnnnnnnnnnnnnnnnnnnnnnnnnnnnnnnnnnnnnnnnnnnnnnnnnnnnnnnnnnnnnnnnnnnnnnnnnnnnnnnnnnnnnnnnnnnnnnnnnnnnnnnnnnnnnnnnnnnnnnnnnnnnnnnnnnnnnnnnnnnnnnnnnnnnnnnnnnnnnnnnnnnnnnnnnnnnnnnnnnnnnnnnnnnnnnnnnnnnnnnnnnnnnnnnnnnnnnnnnnnnnnnnnnnnnnnnnnnnnnnnnnnnnnnnnnnnnnnnnnnnnnnnnnnnnnnnnnnnnnnnnnnnnnnnnnnnnnnnnnnnnnnnnnnnnnnnnnnnnnnnnnnnnnnnnnnnnnnnnnnnnnnnnnnnnnnnnnnnnnnnnnnnnnnnnnnnnnnnnnnnnnnnnnnnnnnnnnnnnnnnnnnnnnnnnnnnnnnnnnnnnnnnnnnnnnnnnnnnnnnnnnnnnnnnnnnnnnnnnnnnnnnnnnnnnnnnnnnnnnnnnnnnnnnnnnnnnnnnnnnnnnnnnnnnnnnnnnnnnnnnnnnnnnnnnnnnnnnnnnnnnnnnnnnnnnnnnnnnnnnnnnnnnnnnnnnnnnnnnnnnnnnnnnnnnnnnnnnnnnnnnnnnnnnnnnnnnnnnnnnnnnnnnnnnnnnnnnnnnnnnnnnnnnnnnnnnnnnnnnnnnnnnnnnnnnnnnnnnnnnnnnnnnnnnnnnnnnnnnnnnnnnnnnnnnnnnnnnnnnnnnnnnnnnnnnnnnnnnnnnnnnnnnnnnnnnnnnnnnnnnnnnnnnnnnnnnnnnnnnnnnnnnnnnnnnnnnnnnnnnnnnnnnnnnnnnnnnnnnnnnnnnnnnnnnnnnnnnnnnnnnnnnnnnnnnnnnnnnnnnnnnnnnnnnnnnnnnnnnnnnnnnnnnnnnnnnnnnnnnnnnnnnnnnnnnnnnnnnnnnnnnnnnnnnnnnnnnnnnnnnnnnnnnnnnnnnnnnnnnnnnnnnnnnnnnnnnnnnnnnnnnnnnnnnnnnnnnnnnnnnnnnnnnnnnnnnnnnnnnnnnnnnnnnnnnnnnnnnnnnnnnnnnnnnnnnnnnnnnnnnnnnnnnnnnnnnnnnnnnnnnnnnnnnnnnnnnnnnnnnnnnnnnnnnnnnnnnnnnnnnnnnnnnnnnnnnnnnnnnnnnnnnnnnnnnnnnnnnnnnnnnnnnnnnnnnnnnnnnnnnnnnnnnnnnnnnnnnnnnnnnnnnnnnnnnnnnnnnnnnnnnnnnnnnnnnnnnnnnnnnnnnnnnnnnnnnnnnnnnnnnnnnnnnnnnnnnnnnnnnnnnnnnnnnnnnnnnnnnnnnnnnnnnnnnnnnnnnnnnnnnnnnnnnnnnnnnnnnnnnnnnnnnnnnnnnnnnnnnnnnnnnnnnnnnnnnnnnnnnnnnnnnnnnnnnnnnnnnnnnnnnnnnnnnnnnnnnnnnnnnnnnnnnnnnnnnnnnnnnnnnnnnnnnnnnnnnnnnnnnnnnnnnnnnnnnnnnnnnnnnnnnnnnnnnnnnnnnnnnnnnnnnnnnnnnnnnnnnnnnnnnnnnnnnnnnnnnnnnnnnnnnnnnnnnnnnnnnnnnnnnnnnnnnnnnnnnnnnnnnnnnnnnnnnnnnnnnnnnnnnnnnnnnnnnnnnnnnnnnnnnnnnnnnnnnnnnnnnnnnnnnnnnnnnnnnnnnnnnnnnnnnnnnnnnnnnnnnnnnnnnnnnnnnnnnnnnnnnnnnnnnnnnnnnnnnnnnnnnnnnnnnnnnnnnnnnnnnnnnnnnnnnnnnnnnnnnnnnnnnnnnnnnnnnnnnnnnnnnnnnnnnnnnnnnnnnnnnnnnnnnnnnnnnnnnnnnnnnnnnnnnnnnnnnnnnnnnnnnnnnnnnnnnnnnnnnnnnnnnnnnnnnnnnnnnnnnnnnnnnnnnnnnnnnnnnnnnnnnnnnnnnnnnnnnnnnnnnnnnnnnnnnnnnnnnnnnnnnnnnnnnnnnnnnnnnnnnnnnnnnnnnnnnnnnnnnnnnnnnnnnnnnnnnnnnnnnnnnnnnnnnnnnnnnnnnnnnnnnnnnnnnnnnnnnnnnnnnnnnnnnnnnnnnnnnnnnnnnnnnnnnnnnnnnnnnnnnnnnnnnnnnnnnnnnnnnnnnnnnnnnnnnnnnnnnnnnnnnnnnnnnnnnnnnnnnnnnnnnnnnnnnnnnnnnnnnnnnnnnnnnnnnnnnnnnnnnnnnnnnnnnnnnnnnnnnnnnnnnnnnnnnnnnnnnnnnnnnnnnnnnnnnnnnnnnnnnnnnnnnnnnnnnnnnnnnnnnnnnnnnnnnnnnnnnnnnnnnnnnnnnnnnnnnnnnnnnnnnnnnnnnnnnnnnnnnnnnnnnnnnnnnnnnnnnnnnnnnnnnnnnnnnnnnnnnnnnnnnnnnnnnnnnnnnnnnnnnnnnnnnnnnnnnnnnnnnnnnnnnnnnnnnnnnnnnnnnnnnnnnnnnnnnnnnnnnnnnnnnnnnnnnnnnnnnnnnnnnnnnnnnnnnnnnnnnnnnnnnnnnnnnnnnnnnnnnnnnnnnnnnnnnnnnnnnnnnnnnnnnnnnnnnnnnnnnnnnnnnnnnnnnnnnnnnnnnnnnnnnnnnnnnnnnnnnnnnnnnnnnnnnnnnnnnnnnnnnnnnnnnnnnnnnnnnnnnnnnnnnnnnnnnnnnnnnnnnnnnnnnnnnnnnnnnnnnnnnnnnnnnnnnnnnnnnnnnnnnnnnnnnnnnnnnnnnnnnnnnnnnnnnnnnnnnnnnnnnnnnnnnnnnnnnnnnnnnnnnnnnnnnnnnnnnnnnnnnnnnnnnnnnnnnnnnnnnnnnnnnnnnnnnnnnnnnnnnnnnnnnnnnnnnnnnnnnnnnnnnnnnnnnnnnnnnnnnnnnnnnnnnnnnnnnnnnnnnnnnnnnnnnnnnnnnnnnnnnnnnnnnnnnnnnnnnnnnnnnnnnnnnnnnnnnnnnnnnnnnnnnnnnnnnnnnnnnnnnnnnnnnnnnnnnnnnnnnnnnnnnnnnnnnnnnnnnnnnnnnnnnnnnnnnnnnnnnnnnnnnnnnnnnnnnnnnnnnnnnnnnnnnnnnnnnnnnnnnnnnnnnnnnnnnnnnnnnnnnnnnnnnnnnnnnnnnnnnnnnnnnnnnnnnnnnnnnnnnnnnnnnnnnnnnnnnnnnnnnnnnnnnnnnnnnnnnnnnnnnnnnnnnnnnnnnnnnnnnnnnnnnnnnnnnnnnnnnnnnnnnnnnnnnnnnnnnnnnnnnnnnnnnnnnnnnnnnnnnnnnnnnnnnnnnnnnnnnnnnnnnnnnnnnnnnnnnnnnnnnnnnnnnnnnnnnnnnnnnnnnnnnnnnnnnnnnnnnnnnnnnnnnnnnnnnnnnnnnnnnnnnnnnnnnnnnnnnnnnnnnnnnnnnnnnnnnnnnnnnnnnnnnnnnnnnnnnnnnnnnnnnnnnnnnnnnnnnnnnnnnnnnnnnnnnnnnnnnnnnnnnnnnnnnnnnnnnnnnnnnnnnnnnnnnnnnnnnnnnnnnnnnnnnnnnnnnnnnnnnnnnnnnnnnnnnnnnnnnnnnnnnnnnnnnnnnnnnnnnnnnnnnnnnnnnnnnnnnnnnnnnnnnnnnnnnnnnnnnnnnnnnnnnnnnnnnnnnnnnnnnnnnnnnnnnnnnnnnnnnnnnnnnnnnnnnnnnnnnnnnnnnnnnnnnnnnnnnnnnnnnnnnnnnnnnnnnnnnnnnnnnnnnnnnnnnnnnnnnnnnnnnnnnnnnnnnnnnnnnnnnnnnnnnnnnnnnnnnnnnnnnnnnnnnnnnnnnnnnnnnnnnnnnnnnnnnnnnnnnnnnnnnnnnnnnnnnnnnnnnnnnnnnnnnnnnnnnnnnnnnnnnnnnnnnnnnnnnnnnnnnnnnnnnnnnnnnnnnnnnnnnnnnnnnnnnnnnnnnnnnnnnnnnnnnnnnnnnnnnnnnnnnnnnnnnnnnnnnnnnnnnnnnnnnnnnnnnnnnnnnnnnnnnnnnnnnnnnnnnnnnnnnnnnnnnnnnnnnnnnnnnnnnnnnnnnnnnnnnnnnnnnnnnnnnnnnnnnnnnnnnnnnnnnnnnnnnnnnnnnnnnnnnnnnnnnnnnnnnnnnnnnnnnnnnnnnnnnnnnnnnnnnnnnnnnnnnnnnnnnnnnnnnnnnnnnnnnnnnnnnnnnnnnnnnnnnnnnnnnnnnnnnnnnnnnnnnnnnnnnnnnnnnnnnnnnnnnnnnnnnnnnnnnnnnnnnnnnnnnnnnnnnnnnnnnnnaaagaaagccagaaagaaagaaagaaaggaagaaagagagagaaagaaagaaaggaaaaactccacaggttactcgtttctaccttatcttacatgaagtgccaatttaccgagagcaagacaatacataatcgactattcccctacctgctacttttcccttacaacacgtggattaccatactcttcctctttcccctccagcctgcttttcctctaaatattgaaaccctcaaattcatctttggagaaagtcacagaccacatactgtttctgtgattctgtgttgttttcttccaggcatgtccttaaccttggcaaaataaacttctaaattaattgccacctgtctcagatacccttggttttacagtaagaattcacatgcttacatagtaactattaattttggtttcttagtgtgttacctatatattgtatgcctttgtttctaatgatatttataaagtattgatgccagctcattgttatcacattgccagttaaaaaaaaaactaatttttaacctaaaaattagataagagctggagatggatctgggggtagaacgggggcagtagtaaaagcacgcgtcagagtgggtggggctgtcgaaggtttctgaagaccacagagtgtgataacaaggttttacagtgtcatttccttaagtattaaagtattacagcctgcttcctgagaaggcatttgggaaagagtccccagaaaggggccccaggagagattccagagaaactcgtgttttggagatgttgagggtgaacaaatggtaatgaggatgatgacagaacgcaagaaaagagaactagcattcaccggacacccacgatgtaccaagcactttgctaaccctcatattctcttttactttccaaaaacctgtagtactgtggttctcagccaggggcaattcatcccctggggaacacttgctaatatctgggggcatatttgttttcacaactgggagtgccactggcatctaacaggtagagcccaggagtgctgcggaacatcctacaatgctcagggaaggtcctcacaagaataatttggcccacaatgtccatagtgctcaggctgagaaaccgtgcttaaatggtaggcacaataatcttcacttttacagattggaacctgacactctgagaagccacctggcattcaacccgaaacctaacacagctccaaagcccatgctctttcaccatgccgttgcagtgagaacagggatggaaatgagggtggcaaaaatgaccaagatacaaaaccagggcacagattggtgctcaatagatacttattgggatattcattaaatagaagaatgaataagaaaaagaatgaatgagggcaggggaataatgaggatgagtgtggtcattctattgccatcctgacatacctccttgtccttgttccacaactcagcagtgagtctgggattatgacaatagagaaaattaaatgatggtaggtggcctggagtccccatgctcaatttcaagaagcatccagattccagggcctgggtctccaaatggaagtagaagtactagaagattgctggtgcacgctgtcctgcatcaccctttctcaggaggatagagactgaaacaggaggttctgagctgagttttggtgaccatttccctctttctcccagaggcccaggccagctgtggcctcagaggaagaagaagggagttgtttccctagtttctaaaatttctgtgaatttgaacatgggctacaccagatttattctgggaagctctgaatcttctaggagggaaagactgagaggaaagagggtggaaagggaggagcctgtgataaaacagaacatttctttttcacttcccctttcagactccagaatttgtttgccctctagggtagaatccgccaagctttgagagaaggctgtgactgctgtgctctgggcgccagctcgctccagggagtgatgggaatcctgtcattcttacctgtccttgccactgagagtgactgggctgactgcaagtccccccagccttggggtcatatgcttctgtggacagctgtgctattcctgggtgagtcagggcccccaggagggagagaggaacgggaacctcagttggggataaccctgggcaaggatgaggggtggcatgggaagaccgtcaggacacccaggggagggaaggcaggctggtgaagatgaaaccctgatgactctgctggctttggaaagtcatccaatgtggcagagttcagggttttttcagtgtctttcacccaatcttactgaacacccagactcttgatgttctgttgctttccacatcagaacccgctctgagaaaagtctagtaacctatacttgaatgataaatgaatggccagagtgtttgccttctttgaaatttatgcttcacaaaagaccaaatcttaggcaggagggccagtgctgcctcgggtaaggggtagggaggaagttgtaagatgcatttttgggaggaggtggcagtggccattctctgtgcccctgaaaccactttgtgtagcagaagcctattgtcttcatgtgtaagaatattcccctaggcagaagcacagggagatctgggttatccagggaaaagggactctgagaatacaaaaacctgggtaagtctggagtcatctgttgtgggaccagagaaatcatgcatgctgcttttgaccacacagaccatgatggggaagtactgcatctgatcagcaagagagacagggtctttggccaaaatggagggctcttttctaaccatgttctcagctgttggataggggacgacgactgattttgctgagtggtttgaaaagcctaggggaggccaagtaggggagacttactgccaggactatctctccaagctcagttcctggggcttccaccctcacattctagaggaaagcatattgccactcagccaagttgtgtgatgtgattactagtgaaacgtgatcagctctgggggccctcggctcttggctgtcaatgcaggatgatactgggctacaggagaaagaggtaaggaagacagagtattcccccatgaataggatggaatggattaaagtagaagagaaagtaaagtgaactacctcatttgtcatgtggggaagttcaggcctagagaggtgatgtgcttctctaccacctgggcaagactcctgggaaagatctttggtattttttcccatttgccttttactaagtcatcaaagatttaccccattttttccattcttattggggctgccacatttacgtcttcatcacttgataactcaatttttatagcaccctctgatggggtcttgattgatcctgtctcccctcccctgcatccatgctgcccaccaaggccacggcatcttcaggtccagctatggctgtgtcagtgcatttaataaatgccttccgtgctgctccattgcccactgcaaaaactctaattctgccctgcacactgtgttctccattgcaccccacatgaatcttcttctacagccaggcagtatgtacactgcactttctgtttttaccacctttgctcctgctgactctccaaattctatgtgcaggcactgttctaggacttggagacttatcagtgaacatgactgacagccttcctgaccggaaatacgaggtcaatgaacttattgtgaagcaataagtacaccgggtgggaggatatttggtatttactactatttattaactgtggaatggatacataattggtgacttctctctcctttcctcatcttttccttttttttctctcgctcttcctcttcttttttactctctctcccactacaccgtcccccttgccaatcctacatactcaggtttttagctaccacttctatgtcaataactcctaaacctatttctcttgcttgcttctgtcaagtataattttatatttccactgctggttggacacctctaaaatgattctccagctcaaaaacaaagcatattcaaaatgcaacttatcatctcctccttacaaatgttctcttcctcctaacatttgtatttgcgtaagcgcagccacccttttcctagttatccaacttaaatcacccccacagtctattaaatgccaacttctctctgccacttaaatttcttctgcatctgtttcctcttcttcacctcctattgtcagtacaactttgggctctcttatctcccacctagattcaaccagtgaatgatttccagagcaatggcacatcaaattaatatggctactgctctctttgaatttatattctactgagggatataaacggtaagtaaacaaacaagaaggcataagtacaaatggaaaagggctatgaagatgtaaacggggtactgtgataagattagttgtggggaagagaagagagcagcccactttaaacaggatgttatgtaaagagttttctgagggggtgacatttaagctgagactttcaacatggtaaggattcagccatttggtgatcaaggacgcatttcagggtagagggattggcatacagaaaatccccaaatttgaagaatgccaggaaggccagtgttaatgaggctcaatgagtaggtgaaaagggatctgagctgaggctggagaaggaagcacggacccaatttgatagggcttgcaggccatttccattttattttaagaccaaagaaaggcaactgaaggcttgtaagttggggagtgatatcatctgatttcgtttttttttttttttttaaggaactagcttctttatggaaaatggattgtagggtgaccataagaagtgaggggacaaattaagatatgggaaaaagctgatggtgacttaaactgagtagtgtctataaagggggtgaagagaagttagtgggtgcaagatctaagttggaagcaggatcaacaagacttcctggtgtggaagggactggattttgggagacagagaggttaaaagatggcttgcaggtttctggcctatgtagctgggtggataacgaagatacatattgacatggggaagacggagagaaacagaatgtgtccacttgctatgacaacatgaagccattggtgattttgacaagaaaagttttagtggactgctgagggccgagtccaaattgcagagaattagacagtgaatgagaggagaagaaatcaggacagcctatgtaagaaaaacaatggagaaatttagttttgaaagggatgagacaggccaggcacagtggctcatgcctgtaatcccaacacttggagaggccgaggtgggtggatcacttaaggtcaggagttcaagaccagcttggccaacatggtgaaacaccatctctactaaaaatacaaaaattagccggatgtggtggtaatacaaaagttagccgggcgtggtggtgcatgcctgtaatcccagctgcttgggaagctgaggcaggagaattgcttgaatctgggaggcggaggtcgtagtgcactgagatggtgccgctgcactccagcctgggtgaagcaaacaacaacaacaacaaaaaccgagagaaatggggcagtagctggaattatatgtggtgtcaaggaaaagtttttttttgttttttgtttttaatggaagatactgaaataaatttaccattgatgggaagatccagctaagagagaaactggtgatgcagaggagaaagtgaataacagaaagggaaatctttgagaggattaaagggaatgggatccagagtacttgctttgagactgaccatagacaggaggagagatgctttctccagtgaaatgcgaggaaggagaagacaggtagagatgcagaaaagactggtagatttagtcgggggacgatgtgagatcttctgtgtaacctcttttgttttctctgtgaaatatgaggaaaggcatcagctaaaaatgagagaggactggaggcagagggtgggatgagaaagcttggggaatgaggaaaagatgagtgtcactactcagagtagcagagcaaatttcttggaaaaaagtgccacaatggcagttcagtgtccttttaaatgcggtgatcgcacttttactgcgtcaacagtttgccttcttgtgtggtaatttcaataacacgcagctgagcaagtaaaggcatggcgaatacaggtgcatttggtagagatagagaaaggcaacgaagttaaggggatttgcaaggaggtaattataatgatgcctcattgaattcaagctagatgggggagggtgggaggtaaaggcaaacatgtgctcaaggataggcagtggtaagatggatgctttggggttcttgataaggtcaaagattattctggtggctgtacttgagcagagaaagttcatctccaaagaaagaaagtttactgatgatgagcagttcagggaatgaagaggccagttgtttgatgggttatccacatattctggatcactacagtcatctcttttttttttctttttctttttctctgacctcattcttccatcacaattagtttctttcttaattaagctctttggcatttgccctgttccaatctatttgacactgcactttcagccccaatttgaaaattctaagtgacttcccactgtatactgaaccaaggagtgaacttataaaaaaaaacttaaatttatttgaaattcaccatgtgtcatgtagcacactaaatgccttctctggattatctcatttaatcctaacaaccaccctatgaggtagatactgctgtcattatcttcatttacaagcaaggaaactgaagcagagaaaagttaagtaatttgtgaaaggtcacttagcagtagcggagtcagcatttaaactcagtatgtgctttcccccactgccacaccacctggcactaggagccctccagagtatgacttctactttgctttcctgctttgtccctcattattggaagtgcttgaggagagaccagaaatcaagtagaagttgggctgcaacttgctgggaatgttgccaagtacttgctgctccttcccatggaataccttttccctctcagccaaaatcctatcagtcctggaaggtccttgatgaacctgaaaggtcccatcttctccataggattcccctccttatgaaccccaaaccctcccaaacacagagccctgggatcttttctttctctgaacctccatagcattttatccaaattcctctaatgtcatctcttttacatcagattacacatgtgcttatctccaccgttagattcttgccttcagtggaagtagggacttaacgttcttttcccttaggtgaactcagcatgcattgcagggcagtaggaagccaatgcaggtttgttgattaattttggatgcaaaggaaggaagtgattggtccaagtatatatttcgagatattggagcatcgggaccagaatccagttctgtaaactttgaagccaacactttctccacattgctccctttttacctcttggttctgattccatttccttccgtacttttgtccctgaaaatatacatgcacttggaagcttcttgactttctctcagcccagatgcaagagaaaaccttcacccatggacagatggacacacacacacatacacacacacacacacacagagctctgattcacctaaggacccagctttgcttctttacccaataacagcacccacaaatctttatctaccctagcccacactttgcctccactacggaagctcttttcttaacccagtggcatccccctacccctgcatgaagtcacagatctagtgcccttttgcagtctcttcttccttttatcagatatttctaatagcaaaaatctggaagacctaaatgccaagcaaaagagttgttaaataaatcacaggacagccaaatagtaggatatagtgtagccatttaaaatgacaacatgggcggggaacggtggctcacacctgtaatcccagaattttgggaggctgaggtgggtagatcacttgaggtcaggagttccagaccagcctggccaacatggtgaaaccccttctctactaaaaatacaaaacttagctgggtgtggtggcgcgggcctgtaatcccagctcttgggaggctgaggcaggtgaatcacttgaacctaggaggcggaggttgcagtgagccaagatcgcgttattgcactccagcctggtgacagagtgagaccctgtccccccacaaaatgaaataaaataaaataaaatgacaacatagaaacagattcatcttctagaacttgcattgctcagtgaaaaatcaggttaaagaacagtttttagagtatatcctcatttacacttatgtatgtctgtatgtgaacagcgtgtgtctgtgtgtgatcacagaaagaaatccaacaggatgtatgccaaggtgataatattttgctcctgcgtattttctatttttctgtagtgatcatggattacctgtgcaatttctaccccctcccaacaaaagaacaaatcttgctctcaggataaactctggcaaaattatttatactgatgcataaatcatatgtaaagcccaacagagacctctttccagaggcatatttattttaatcagtcaagaggggtaagccaaaggaaaatgccacaaaacaggtggaagagggtgttatatacttttatttcatttttgtatgttactgggagttctcagtccttttaaaagtgcagctcatccaggcagtcccaggggatatggccacgagggctgtgctgtaggtgaagggcgctctgggcctgggcagtctctgggccaaagtgggcaggtgtcagttcagacactccactgtgggctgatctttgctttctgtcttacagctcctgttgctgggacacctggtaagtactccacccacagcctttccttccctcgggtccccttttcctctcctcccagtgccctgtctggaggtgctctaaatgcaccagcaactgagcccagtaccaagtcagggccaggaaagggtaattgctcccgaaagatcccctctccctcttccactctcctccttccttttcctccttccacggaggcaagtggtaggcagccacggtgttcaaatgggggagctgtcacagaaaatgagaactctgatctctctctcaactgccttccgctgtccaaataaaaccaagggcttcctctctccaaataaaattcaggcacatgcaaaatcacatggcctgcatatgttgtccccctgtgttgctaaatccttgactgtgcatgtttctgagagctccaaggcctgttccctgacagagtggtctctgcatacctctggctacactttgccgggcacttctgtgtttgtgccactcagcctccaccgctccaggactggccctccggcttttctccctctctctttatccttctgaggccagagaggctcgtgtatgcttgggtgtgaggacgggccatcttgacctcgtttttaaagtatacagaatgacattaggtcagaacggaaacctgatatccaactcccatgcctgccatctccaccagagcccccacttatcttcagccagccccaggggaaatttatccactagtgtctaaatgcctttgtttatcggggagaaaagttagtctcgaaagagtatgtatgtatggggtgtctgtgtgtctgtgctggtggggagaggttggtggggagagagagaaagaactggtgaggatatctcaggtaaagtatatgtatttcgagggtgtttctcttgcctgctccctccttcttccctgttgccctgtcggagtcctgggctccctggggccgttgtggtgggatgtatgagcaaaagcaactgccttcagttgcagaaccattctgggcctggctcggcttttggtgcccctagtaggcctacaggtgcttttttgtctgagattcagggcctctcaagctcctgggcttcctcttcttcatgctacctcctctctctgcccctcagcagctcccccaaaggctgtgctgaaactcgagccccagtggatcaacgtgctccaggaggactctgtgactctgacatgccgggggactcacagccctgagagcgactccattcagtggttccacaatgggaatctcattcccacccacacgcagcccagctacaggttcaaggccaacaacaatgacagcggggagtacacgtgccagactggccagaccagcctcagcgaccctgtgcatctgactgtgctttctggtcagtggaggaaggccccagggtggacctgggagggccaggacggatgaaatctgctttcaggcagaggtttgcaggaaaggggggtggcctgcttactgggaagtatcgctgtgagttgcctcagcacatatcagtggttgtttttgcctcagttctgattgaacagaagaaggtttcaaggccaaaaacaggcagccaagtgtgagagaagcagaaggaaatccctactgcataaaacccatttccattttaatggcagaattgaaaagcacagaccacaactgaatcctagccctggaaatgactcactatacaacatgatgaattcatttaacccttgagtttccatttcttcacctgctccgtggggcactaacgcctccctcagaggcttctggtgagaatcagtgtttccctgcccccgccccgccctccatgccccttctccacgttctcactgtgctaggtgctcttctctgtctttctcttccaccagcctgtgggaaacctgagatgaaagtcgtgtcttacccatctttgtatttccagcatctgaaactgggcagagcttaataaatattttgctggagaggttgatgatcttacaaagctcccattgaaaggtggctctctgtaaagcaaagttacaatgagattgtgatgaacattgtccttgtggcttttcacttagtcccctcccttcacctgaagagcaaattttcctcaaaagtacacagcaaacgaatgacccactggtgacactgttgcctttagaccctgctggaaagaagctccacatttattaacattcccgaagtaaatttatcaggtagcattcatcaggtaacatttgttgcacattcatgacttttctactgtccacaaaggcatatgtccttatcatatgcggactcctcggtcacactggattcttccttccctcctcgacatggaagagatggcatcttagggtctcttgtgttcttcctgcagaggcctgtcgggcaggaaaaggctgcagctgccttcctgggagaaggaggagatgagtgtatcctgaacacctattatgtgctaggggctattgtagatacatgacactatcatgctcattttcacgaatgaggaaactgaggctcagaagacttaaattatttgcccaagagttcataaatgacagagccagcattagagtccaggactgtctgatttcagacctaagctgttccctctgcacatcgtgtcccaccagtaaggaagatctgggtctcagagctgagccaagacctcccgggtcctctgcggttttttgtgtctttcagagtggctggtgctccagacccctcacctggagttccaggagggagaaaccatcgtgctgaggtgccacagctggaaggacaagcctctggtcaaggtcacattcttccagaatggaaaatccaagaaattttcccgttcggatcccaacttctccatcccacaagcaaaccacagtcacagtggtgattaccactgcacaggaaacataggctacacgctgtactcatccaagcctgtgaccatcactgtccaaggtatgcggagtctgccaagatgtaaggaggggagaagaggggatggacaagggctgaggtcacatgggcctacatggaggtctgagaaaggccacagcgcaaaattgggcactggagcaaagaggagtggtgtggaggcctggctaagtattgaccaatgagcaggagtaggggccagagcttggagccctcaggtgataggtgaccaggctgttgttccactttgaaatgcaggccccagactaaggacggcagcgaagcagagctccctcgttggtgcagaggttccctaagctcctgggcattcctaagaactgaggtttgcctttattcttctcatggctcatgttacagccattcactccagaaagcctggcacgtcatggaccgttcaaggctgtgctccatagagtaatgatgcctccagctatgcgaggctttgggcccacccttcccactgcccctgagggctaaggggagcccttccttctgctcctgcctgctcaccagtgtgcctttattagttcggtggagaaacctcggtaagcaggaggcataagtccagccacagaaaccctgtgcagatgaggctggggatgtagtgagtgctgcagaagtgagtgactcagacacagaagagcttcgggtgacaagcactaggacatagcattggatgggggggaggtgggacaaggagagtactgcctgtcctgatgtctgtcttccctagctcccagctcttcaccgatggggatcattgtggctgtggtcactgggattgctgtagcggccattgttgctgctgtagtggccttgatctactgcaggaaaaagcggatttcaggtttgtagctcctcccggtcccttttgttatcagtttccacttggcccaggccctaaccccagacattgccagaatccctctctttgggctagatacacattcagatctaggcccgtattgtattatagtcattcattcgtttattagatcattcatttgacaagacttgaacaaactagcttatgtgtcagccaatgcgtgagacatggtgggtgatgccaagagaagtccagtccctgcccttggggagttctcagcattgtgaggaagacagggtcattataataagatgggataagagcaatgatagggacatgaaaagcctaggatagaagtacagaggaggctccatagcccaacaagggctgaggcagttggagaaggtcttggggagagcagtgtagtgtagtgatggagtgcacatagtggggccagactgccttggttcaaatctagttctacagcataccaactatatgacccaagtgagtcactccacctctctgtgcctcagctgtctcatgtggaaaatggggacactaataggacttacctcagagggttgccatggggatgaaagaggctgatgctcttacacagtgcctggtaggcagtaacagcacacaaacagggctgttgccattctggaggaggtggtgtgtgagggcagcgcttagctagggaaggaggaccctccaggcactgggccaaggcagggattgaagccgggtggggctcatatgggtgtcgaagggggagtagagagggtactgcaagccaccaagaaagaaagaatcccgctaacacctcacaaagcacttttcaattggttcatagccaacacctcagttactgatgataagtaaatacagagaaacagagagagagagactgagacacaggggtgtttttaaaaggcagagcaagcctcagacagatgccatggcgtggactttctgacactcctgggcatccccatgggtgagctgaattctgcctctggaccagcccttttccaggcgggagcagcctctgagcaggggagctgggggtgggaggacaggaaacatctgccagagtgaaggcctgagctggtcccatccaaccctggccctggtccttggtcctgaggactcaggccccaccgcctaatcctactaacctcctgtgtgcccctcccagctctcccaggataccctgagtgcagggaaatgggagagaccctccctgagaaaccaggtgagtacaggttgtctcagggattcagtgatggctcaccagggctgccggctggactggagccagggagaaggggcttgtgcaagttcagctgggagccagggagggagcagcagtgggaggatggctggggctcaaatcgcttggtcagctctgagtctaactcctgggcctaaagacgacctctctggagatgagaagagaaacaccagtcccagatacagaagagagggctgtgtccgaatttctggtaccaggaatctggtgatatttccagagcaagaaatcagagatactttggtctttctgtggagctttggcagagctggcaaaggatggggttaggggctgtaagactgaggccaatcggacgtgggaggcaggagtctaaggggaaaggaggaggaggcctggaaaccccttgatttgctgaggaatctgcctctgtggagggatggggtggagtggccaggctcagctgtctgtggaacactaggaggaggtttgggcttgagaaaattctgggggactaggggcactagtgggctctactctgtgggcaaaactcagttctgatgcccatgcactcaaggttgactgaattttggcctggttctgccctcatcacacagtggagccctgagcaagtcagtctccctgatggggttcagtctcctcactgaggaaatgagtgggtggccagggtgacctctcaggtcttctagatttgacattctgagaaccaggggccacccaagccctggcccaggtgggagtgtgtaaaggaacttccaggaggatgccaggcaacttccagactgtagttaaagtcagagcacaaaggaaaccagtgctttctctgggggcttccatgacagtaagaacaggcagaaaaaagaggctgtcaaagaccccacctcagatggctggagtatgattcagagcagagccaacagatttaagagcttgagcaaaatatcacttgttcagctgtgcttgcagcaaggtcgcatgtctgctggccaggcccagtggtgataggggcctgtgttcacaccagggccaaaacagatctggaaaaaacaaagtccaagcaactggattatccatcttgttgtgtggttctgtctgcactggcataagcacatttcacaaggcacttttgcagccaggcattggggctgcataaatggttttttaaaaatcctttcccaaaaggcaaagctgggttgctgggattcttgggaaatgtaatagaatgggaattcagaatgcggtttactgcagaatttacagcatggcaataaaggctctctatgttcagggggtgagagaagagactagatgcattgtctcagatgtctcctgacttcctgagaaatgccactttgcagatatggggctgcttttcacactggctaagtcagttcatggcaaaatatgagggaattcagtgtgtttcagacactaaccaaagtccatccttcctttctccttccgtccctcccttcctccctttctcactcactctctctttctttttaatgccatggagtaccatatttttcaaagttccaacaaagatgcactacatttagacaatgtggaaatggccctcagccttctctccctgaagtctgtggccagcaaaaatctggactttacttcactctgatgctgaacacccccctcccccacctcttccccaatatctcagatcccaagcctccctggtttgcttctaggaaagctcagcaattccctgaaaagaatgcagctcaagtgactgctccactttttcaccttggcctttgcggaaggctgtggctgggctaccctatgcatcgatcaatgaggtcatatttacccagtgcttggcctagaggcccaagacagggtcagcagtgcttgctttggctctagtttgggcgttggttttgcagcctcagcatcagcacaggcaggccctcttctccagcagtgctctggctgatatttcttctttttcccacagccaatcccactaatcctgatgaggctgacaaagttggggtgagtgatcccagccatctccccctcccttctcccctgttgccttttctgttgccttctttcctaggccctctctgtggatccttactgctggtttctgccttctctaggctgagaacacaatcacctattcacttctcatgcacccggatgctctggaagagcctgatgaccagaaccgtatttagtctccattgtcttgcattgggatttgagaagaaaatcagagagggaagatctggtatttcctggcctaaattccccttggggaggacagggagatgctgcagttccaaaagagaaggtttcttccagagtcatctacctgagtcctgaagctccctgtcctgaaagccacagacaatatggtcccaaatgaccgactgcaccttctgtgcttcagctcttcttgacatcaaggctcttccgttccacatccacacagccaatccaattaatcaaaccactgttattaacagataatagcaacttgggaaatgcttatgttacaggttacgtgagaacaatcatgtaaatctatatgatttcagaaatgttaaaatagactaacctctaccagcacattaaaagtgattgtttctgggtgataaaattattgatgatttttattttctttatttttctataaagatcatatattacttttataataaaacattataaaaacaacattctgtttaccttttcaaggctgtattggttggagtgtagactgaactgcctggggtctgtttctcttcagtgatgagactcttaggaaggcaggaatggataggatagggggaggagaggagagatggggatttagaatgtagagtgagtgccccttttcttaaaactgaatacagtcacgcaccacataatgatgtttagttcaacaacagactgcatatatgatggtgatcccataaaattataataccatatttctattgtaccttttctattcctatgtttagatatatgagtacttaccattgtgttacaattgcctaaagtattcagtacagtagcatgctgtacaggtttgtagcctaggggcaataggctatacgctacagcctaggtgtgtagtaggccacaccatttaggtttgtataagtacctgctatgatgttcacacaacaaaattgcctgcatttctcaaaatgtatccccatatttcaacaatgcatgactgtactcttctgccaatgaccttgtattcttgtttccatgtcttcttctctttcctcctatggcaaataaaacactgttttgcaacacaagttcacgggaagtcaaacttcagatgagccctgagtggagattgctgacatgtcctgctctgctattctcccaatgtagttaccagaaggatgtgaccttctcagagaagtcatctcaggcagattagaaacatgactggcagtctccttgagggtttggtgagtgcccttggagaggcttcattttcctgggactctacgcagtaacatcgtgcaacatttgttgcactttttatggtaggataaaaagtactcactttttatggtcccacaatcagatttcatacacacttattgttttagtaataagggataataattaaaattactgcgttattaaggacttactttgtgccatatagtttgtgccaaactatatgctttagaatttagagaatttacgattagccttttatatttcctcttttgtgagtttcctgtgtatttattctttgcccatttttgtagatacaatgtatgtccctttatttataaattgcatagtagtaacttatttccttttatttatatgtaaattatttcactacactaataatgtattctttttataaaattaagatacagatagggaaaacaaaaaaattagatcgcccataaatccataaaccagaaataattaatgctaacatttaaggatatcaatccatattcctgtctgtggcagtgtgtatttgtgttttaaaaattggatctaatcccagctactcgagaggctgagacaggagaatcgcttgaacctgggaagcagaggttgcagcgagctgagatcgcaccattgcacttcagcctgggcaacaagagtgaaactctgtctcaaaaaaaaaaaaaaattggatcatatcatatattttacatgttaataaatacactcaggcaaaaatgtatgctcattgtaagcatgtaagcccaaataatacagaaagataaggagtaaaaagtagaagttccattttgtcatcagttccctctatcctcttcccttttctttctttctttttttttttttttaagagatagggttgtagtccaggctggagtgcagtggcaggatcacagctcattgcagcctcaaactcctgggctcaagtggtcttcccacctcagccttcctagtagctgggactaccacacctggctaatttttaagaattttttggccgggcatggtggctcacgcctgtaatcccagcactttgggaggccgaggcgggtggatcatgatgtcaggagatcgagaccatcctggctaacacagtgaaaccccgtctctactaaaaaaaatacaaaaaaaaaaaaattagctgggcttggtggcgggtgcctgtatcccagctactcgggaggctgaggcaggagaaggcgtgaacccgggaggcagagcttgtagtgagccaagattgcaccactgcactccagcctgggcgacagagactccgtctcaaaaaaaaaaaaaaaaaaagaactttttggctgggcgcggtggctcatgcctgtaatcccagcactttgggaggcaaaggtgggtggatcacctgaggtcaggagttcaagaccagcctggctaaaatggtgaagctccatctctgctgaaaatacaaaaattagctgggtgtggtggctcatgactgtttagtcccagctacttgggaagctgaggcacgagaattgcttgaacctgggaggcgaaggttgcagtgagccgagatcatgccattgcactccagcctggggaacagagagagactcggtctcaaaaaaaaaaaaatagtttgtagagacggggttttgctatgttgtctaggctgatctcaaactgtgagcctcaggcgatcctccccacttagcctcccaaagtggtgggattacaggtgtgagccacggtgcctggccctgacatgctacctaaagtctgaaacttgactcctgatccccagggtcagtttctttactgatagtttttcaataagccatttagatagttggcatgattacgtagccagagggggcataaaaatccctctaggaacttctgctttgagctctcccatagccaagattccttgtatggatcccggtggtttaatccagacaaaaagcgtaaataagttacggtaactataaggatgctagggagcttgcacatggaatctcttggactcccagtaattgcctagactttctttctcttgctatacttttaaataagcactttgtttgagcatgctcggtagagtttgatgagttctttcaaatatcctcttcaggaaggacatccctgactgcacttcccctactgctattcctctgctcttatttccttcatggtatctatcactgtatgtaatcatgcatttttttgcttaaatatttacttacaagttctaaaatgtaagctcactctgggcaggatgtttgtattattcactggtgtattccagagactagaacaatgcaatcactatttattgaatgagttaacgaatgaaataatattatatttatctaaaactcttaaatgctttaaatagatctttactatatttggaacttatttttggacttggtgtaaggtgagaacctaatataatttttccacatgaaagtcagttgttccaatatcatttgttgaacagtttaataatttgaaatcctaatttatcacctaaattcccactcataggtctatttttagcctctcttctattacattgttctatttgtctatttctgcatcaataccacatttttagttattgcaactttatagtgtactttgatatatagaaggtcaagttttctctcattcttttgtttcaaggttttcttggctactaatgtgctgcttctcttccagatgtacttaagaattccataacactattatgatattggtagaattgcattgcatttatagattatttgggtaaggtttgacatctgtgtcatattgaggcttcctaagttacaactcttcattcattcagacttacagaattttcctataatatcatatgagcttggcacatttttttgtgacagatctttgacagacttttctttctgtcatttttggtctggttatgattttctctctctcgggagtcaattttgaaaacttttgctttcctaggaatcatccattttattggtatgcagtggtacatcgcacttttcccctattttttggtaataagttgtgtgtttgtgtttatgtccctcctctcattcctaggttttgggttttctttcttttatcagttaggatgacttcagttggaaataacaggaaatcgtgattcaaattggcttaaacattaaggaaatgtattatctcacataacaaaaagtccagagacagacagtttctagcacatcagaactcttggtccacttttctacaattctgtgagcactgcccttgagctagcagcaagatgattataacggttctaagcagcatcatacccagaccactatagaaagaaagggactaactattccttttatgtgtagcctttttttttttttttgagacagagttgcagtggcgcaatttccatttactgcaatctctgccttctgggttcaagcaattttcctgcctcagcctcctgaatagctgggattaaggcatgcgccaccacacccagataatttttgtattttttagtagagaccagccaggctggtctcaaactcctgacctcaggtgatccacctgcctcggcctcccaaagtgctgggattataggcgtgagccactgtgcctggccttgtgtctctttttgacaatgaggaacattttctcagaagttctgcaaccatcttcccatcatatcatattggtcacgactgggtcacatgctcattcttaaaaccatcacgagaaaggggactgagatgaccataattcacttagcttaatcatttggagagtcacccatcctgacactatctctttgttcatcctaatcagacttaccaaaggtttgctttattagtcttgtatcagcttttgacttctggctcaagtactttgccttttgcttgttttctaatgtattatttctttcttagatttcatttatatttactgtattattcattaatttctaaacttcttgttttgaaatagattcacaaaaggctataccttttcctcttctgccattttgaccacacccattagattttgagatatatgtatccctgtcattgttgtttctaaacagtctgtaattttagttttattttcttcttaactcaaactttatttggaagggcgttttgttgtgtttgttttgttcaagagaaatgagcgctaccttttttgttttctattttattgcgggacggtcagtaaatgtggtctgtatgatttttctgtatgtgagtatctttaagtatatgtatgaagacaatattttctttcattttaaaataaagttttgttttttattatggcaacacacacccttagtttacatagtataatggaatagaaggcatataacaagaaatagctgtttattgccccttccctcacatctcagctctacttctcagaggcaaccatgttcaattctttcaactatgtcttctgctaatttacctccatatttccaaacaagacaatacgctgctatttcttgatttttcaatattagacattatctatttgatttcctactatagaatacaaggactattcttattataccgtgcttacttacttcccacttttcctaccatgtgctccaacatagctttatcacaatttatgattactccttgttgctgagacaaatagtgttgtctgcttatatttcccttcttgaacaatctttttttcctctagatataataaatgcctcattttcatatattttttagttgtctatgtgtttattagcttttccaaagatttaaaaaaagttctaaagcagcttaatactattttccatagtagtcaaatgcaccatgtagcttttcagtttttcttccttctttttttttttttccattagcaagatgtccctccttttttgacactgttttcggtcatttgatctctggacctcttgcacagctgttgtcctaggacttctctatcttttatatgaaatcctgtttcctgaatcttatgtcttcctatttcttggtttcttccttgtgtggctgcagcatgtttgccagggcatcctgagaaagggtttgcaggtgatatagtggaggccataatgcctcacctcatactcactcaactcacctgaattcacctgcagctgctggctgggtcaatttctcctgagaattaaactatgacagggaaaaattagtcacctgcaaatagtcaccctgggtaggagagaggccctaagagtctaacttctccttatacagagtttacaattatcctctcatttttagaatcattctttaaccatatattttgttgtacatgattcctccaaattcctggactttttctaagatcttccaggaaaattagcttgcttttcattagcattcctttctttagggaaataaactcaattccctattacccaattttctataacaacatgaccaagatttgtggttatcccaatgttacttcttagatattagacaaaaataatgttaaatggttaaataaaagagacatctttatatctctgtttatcttaattaggcttgtcagaagtcttttttattggtcttttcacagaattagtttttgattgtttgatcacatcttccttctgtttgcaatcttgtacattgtaatctcttctattttgtaacattcttagtcttgaataatacaaaaaaaagtatatattttccctaccacactagtctctctgtttactgtactcctgtgcccactggaatgaaatgttccttaatttttctatttttgctgaaaaccacaatttcaacagataatttaaattatacaaattgttatctcaacaagattacttaagacttgtcaaacacattgtagcatacatttctgtaactgttgttagccaaataattaaactcttcaatctgcgatttctacatatccaacgagaacctatgtcttttttttttttgaaggcaattttataactttatttgatgtatttgacgatcagcgattagttctcatccacattgactgtagattttcaaaagtggcaacaggtacataggtaaccaaagtgtagagcttatttggtgaatcttcatcctcattacgttttcgggacagccgcacacggattcggtatgggacattcttattcctttggcccagacagctttgttgagcctgatatcaatgcgcgcatctggagttcccatctccttcatggcaaatttccgaagctctttgagtgcccgaggggcacacttcttgaagcccactccatggatgtgcttgtgaatgttgatggtgtattctcgggtcaccacctcgttgatggcagaacggcccttttattcttgccacccttctttgcgggagccattctgccgggtccaagttggaaaggaagagcgcgagggattgagggagaaggaaagccgagaatctatgtcatttaatagatcatgctttgggtgtcaagtctaagaattctttggctagtcctacgtcccaaagaatatgttctccagttttgttttgtttttttaagttttatagttttactttccacatttaaacccaggatcacccaggcacagtggctcacacctgtaatcccagcactttgggaggccaaggcaggaggattgcttaaatccaggagtttgagaccagcctgggcagcatagtgaggcttggcctctaaaaaaaaaaaagttacctgtgaagtctcagctacttggaaggctgaggtcggagggtcggagggttgcttgagtacaggaggtcaaggctacagtgagctatgattgcaccactgcactccagcgtgggcaacagagtgagaccttatctcaaaaatgtacatgaattagtaagtacataaacccaggatccactttgagtttattttttatgagctatggtacttaagttaaagtttatttttttttcctatggatgaccaattgctccaacaatcatttgttgaaaaggccatctttcctcattgaattggttttgcacctttgtcaataatcagttgggtgtatttgggtgggcctatttcctgttctctattctgtcccattattctgtgtctatcactctgccaataccacacaatcttgattattgtagctacattgtaagttttaaaattggttagactgattcctcccaatattcttcttttttcaagatttttaagctattctagttcctttgtctttccatatacatttaaaaataatattgcctgcatctataaaaaatcacgctaggattttgacaagaattgtgttaaaggtgtacattagtttgggaagaattgacttctttactatattaagttttccaatccataaacacgatatgcctctccatttatttagatttttacaaactttccttcatcagtgttgtgtagtttttgtcatacaaaacctatacatgttttgttagatttatacctatttcttttttcttcttagtattgtaattgtaaatgatactattttaaatttcagagtccacatgttcattgccaatatgtagaaatacaattgattttttatcttgtatgtttatcttgtatgttgcaaccttgctgaagactcacttattagttctaggagtttttaatgtattcttgggattttctaggtagacaatcacatcatatataagcaggggcattttatttctttctttcctacccatatgccttttattttcttctcttatcttagtgaactggctagaacttccagcattatgttgaataagagtggtactagcagacatctttactttgttttgattttagggggaaagcatgcagtctttcattgttgagtatgttgttagccaaaagtctgtgtagatgctctttatcaagttgaggaagtttccctctatgccctctcctttttgcttgtttctttttttaatttttttttagactttccatcaggaataggtgttaattttgttgatttttttgcattgattgacaggattttttatggtttgacatgatttttgatgtgatttttcttctttagcatgttaacatgatggattacattgattgattttgaaatattgaaccagtcttgcattccaggaataaaccccacttggtcatggtgtataattctttttatatgttactaaattctatttgctaatatttggtttagtatttttgcacctatagtcatgaaaaatattagtctgtagttttcttgtgtgtgtgtgtgtgtgtgtgtgtgtgtctgtgtgtgtgtattaaacctgtatgtgtctttagcccaagatatgatatgtccatcttggtatatgtgtcatgggcacttagaaagaatgtgtagtctttgtctggctttggtatcaggataaactaactttgtaaaatgaattggaatgtgttccttcctattctatattctgaaaaacattgtatagaattggctaattccttagccgggcgcggtggcgggtgcctgtagtcccagctactcgggaggctgaggcaggagaatggcgtgaacccgggaagcggagcttgcagtgagccgagattgcgccactgcagtccgcagtccagcctgggcgacagagcgagactccgtctcaaaaaaaaaaaaaaaaaaaaaagaattggctaattcttcttcaaatgtttggcagaattcaccagtaaaaccatctaggactggagatttctttttggggagttttaaaattatgaattcaatttcccttataattacacagctacacaagaatccatttcattctggatgaactgtggcagtttgtgctttttgaggaattatttcatctaagttggcaaatttatgtgtttaaaattataggccaggcacagtggctcatgactgtaatcctagcaccttgggaggccgagatgggaaaactgcttgaggccaggagtttgacaccagctttggcaacatagtgagattcccatctctattttttaaaaaataaatatgggccaggagcagtggctcactcctgtaatcctagcactttcagaggctgaggcaggcagatcacctgaggtcaggagtttgagaccagcctgactaacatggtgaaaccctgcctctactgaaaataccaaaattagcctggtatggtggggtttgcctgtagttccagctacttgggaggctgaggcaggagaatcacttgaacctgggaggcggaggctgtagtgagctaagatcacaccactgcactctgcctgggtgacagagggatactctgtctaaaaaagtaataataaaaatatatataataaaaataaatacataaaattatagtattcccttattctccttttgatatctgctggtttattggtaacttgtatctttgctctgtcagtcttgcttgaggtttgtcaattttatcttttcaatgaagatcaattttctctatttcttatttattttctctattgtttttctgtcatcaatttcactgttttgtgtgcttatctttattcttgcctcccttctgcttgctttgggtttattttgctcttctttttttagattcttgaggtgggagcttagattattgatttgagatttttctctatgcaattagtgctataaatttccattccaatactgttttaattgtgtcccacaaatttttatatgtcgtattttcatttttattccatttagtgtattttattttatttcccttgagacttcctctttgacccatggattatgcagaagtatgttgtttggtttccaggtacttagagacgttcctgttatctttctgttatt

SEQ ID NO: 95 - DNA, 1443 bp, Homo sapiens
ccgccaagctttgagagaaggctgtgactgctgtgctctgggcgccagctcgctccagggagtgatgggaatcctgtcattcttacctgtccttgccactgagagtgactgggctgactgcaagtccccccagccttggggtcatatgcttctgtggacagctgtgctattcctggctcctgttgctgggacacctgcagctcccccaaaggctgtgctgaaactcgagccccagtggatcaacgtgctccaggaggactctgtgactctgacatgccgggggactcacagccctgagagcgactccattcagtggttccacaatgggaatctcattcccacccacacgcagcccagctacaggttcaaggccaacaacaatgacagcggggagtacacgtgccagactggccagaccagcctcagcgaccctgtgcatctgactgtgctttctgagtggctggtgctccagacccctcacctggagttccaggagggagaaaccatcgtgctgaggtgccacagctggaaggacaagcctctggtcaaggtcacattcttccagaatggaaaatccaagaaattttcccgttcggatcccaacttctccatcccacaagcaaaccacagtcacagtggtgattaccactgcacaggaaacataggctacacgctgtactcatccaagcctgtgaccatcactgtccaagctcccagctcttcaccgatggggatcattgtggctgtggtcactgggattgctgtagcggccattgttgctgctgtagtggccttgatctactgcaggaaaaagcggatttcagccaatcccactaatcctgatgaggctgacaaagttggggctgagaacacaatcacctattcacttctcatgcacccggatgctctggaagagcctgatgaccagaaccgtatttagtctccattgtcttgcattgggatttgagaagaaaatcagagagggaagatctggtatttcctggcctaaattccccttggggaggacagggagatgctgcagttccaaaagagaaggtttcttccagagtcatctacctgagtcctgaagctccctgtcctgaaagccacagacaatatggtcccaaatgaccgactgcaccttctgtgcttcagctcttcttgacatcaaggctcttccgttccacatccacacagccaatccaattaatcaaaccactgttattaacagataatagcaacttgggaaatgcttatgttacaggttacgtgagaacaatcatgtaaatctatatgatttcagaaatgttaaaatagactaacctctaccagcacattaaaagtgattgtttctgggtgataaaattattgatgatttttattttctttatttttctataaagatcatatattacttttataataaaacattataaaaacaac

SEQ ID NO: 96 - protein, 291 aa, Homo sapiens
MGILSFLPVLATESDWADCKSPQPWGHMLLWTAVLFLAPVAGTPAAPPKAVLKLEPQWINVLQEDSVTLTCRGTHSPESDSIQWFHNGNLIPTHTQPSYRFKANNNDSGEYTCQTGQTSLSDPVHLTVLSEWLVLQTPHLEFQEGETIVLRCHSWKDKPLVKVTFFQNGKSKKFSRSDPNFSIPQANHSHSGDYHCTGNIGYTLYSSKPVTITVQAPSSSPMGIIVAVVTGIAVAAIVAAVVALIYCRKKRISANPTNPDEADKVGAENTITYSLLMHPDALEEPDDQNRI

SEQ ID NO: 97 - DNA, 47686 bp, Mus musculus
  misc_feature (1)...(47686): n = A,T,C or G
aaagcttttattgttttgtaaatgagagcaataagttttctagtatcagcttgtaactgaacaataccaaacaattaccaacaaaaaattaccaaaagttatttatttgtatgtgccgttaaaattggggcctatgctgtttaatattttaaaaaatgagatgaaataccatgtgaatatacaattttctgtgagtgatagaaatctgacagctaatgaatccttactataatcacaattaatgagtaaatattttactgttttttatgtctcctttttagcaattattatacaaagacaagacccaaagaaggagctcttcatttagaaacacgagaagtatattctattgatccatataacccagcaagctgatgacatgacaagttggtatataatgaaattgaaatatagtttcttatacataggtcaagatttgctttaatattttctcatagtatttttaaatcatggccttaaggaaatattattctttttcagtctttatatccatgaacaatattattagcttacctacttcatattccaactgacaatcttatttaaacaagcatttttctattcagtatatatgtaacaaatgtaattaataaaatgattaagaataatttaaaattattaaaaataaaataaagtcagatacggtggtatgtacctataattctagtacttaggaagtgggagaaagatcaggaatttaaggctgacatttgaatttagctatatagtgaattggaggggagagtggactgtatgaggctctgtctccaaaaaacaatcaaaaacagaaacaaaactaagagaaaatgagtaagaataaatattattaaagagaaataagcaaggaaagatgatagagaaaagaaagtgattacattgaaagtattcaccatgaaaatggcatttaagtttagttatttctttagaagttttctcataagcttcagctctttataaaattccatttagtaatagacacattcaccattcaaataaactgtatttttaaaaatcttacatgattttgtctttctgaagtcagtgatttcctaaatagaatatacaattctagggtcttaggagtttataatttaatggtaattcattctagaacacacctttggttattttagccaatttctccatctacaaatttagctccctcaaccccaaaacttaaatattactcagggaacaacttctctcagaccacccatcctctctcactatgccttagatctaacctttagactattaagataaaaaaacaaaaacaccaacagaaacccctcccattgagaaccagctttctgtctcatctgttatgtaattaaactcgtgtgtgtgtgtgtgtgtgtgtgtgtgtgtgtgtgtgtgtgtgtgtgtgtgtgtggcatgtagggacagttaaaaatcacatggagggatggaaagatgtctcaacagttagaaacacctgctggtcttccagaggacctagggttgggtttaattcttagcacctacatggcagcttacaactatataaaattccaattccagggaattagcctcctctggtgactatgggtaccaggtacacataaggtgcacaaacatacatgaacgcaaaatagcctgtagttgtttgaataaaaatggtcactattaggcccatagagagtagcactattagaaggctgttgtagtagttatggccttgttggagaaagtatgtctcattctcttctttttttgttgcctgcagatcaagatgtagaactctcagctacctcttcagcaccatatctgcttacatgccaccaagctaccctccacgacaataatggactaaacctctgatttgtaagccagccccaattaaatgtttttctctataagagttgtcaaagttatggtgtctcttcacagcaatagaaacccaaaataagacagaagttgaaactagggactggggtattgttgtgatagacctgaccatgcttttgtttggagacatgtggactttgggtttggaaagcagtggaatgctttaagcacagtttaatagaccaccctagaaggagcacagaagacaatgatgtttagggtgatttgaactatgagggcctggttcaagaggtttcagataagaagaactttagtatgtggcctacagattgttcttgtgatatttcagagaaggtagtggctgctctctgctcttgtcaaaaaaaaaaaaaaaaaaattgcccatggctaaatggaagagtttggataaattttatgttggcaaaggagatctcagaacagtctagattgactctgttgtgcagttactagtggtcacttttatgcagacctataactaataggagcaagctgagcaaggaaaaatacaaaatgtaacatttgaggagaaaaggaacacggaaagtgtcaacagtttaaaggaaagcaagaccctacctaactaagcttcctgtttgtaaaaaagaattaaagaaaagtgaaagggaattaaagaaacgtttagggcaaagcatggtagtgtacacttttaatcccagagtttaaggttagcctggtctgcaaagcaagttgcaggacagccatgcttatgcaatgaagaaagtttctaaaacagaaagatagtgaaaaattatttgaatgagggccccagccaacaacatatcatggtggctttggctatgtggttctggctgtaaagtcaaggatacaagaaaggggtcatggactcttctgttgtggctaggaaaagctaaagaggccagacatgtgtcaggagtgtccctgcatggagacctagagaggtcattgtgtgaagctatgaaggtgaagcctggattgccttgaagaccccaaaatgttggagataccagagctgtgggataccttcaaaggagagctgctaacagagaatggaatcagtccatgagaaagaggcatattgcagtcaacaaagatgaaaggagttggaggtctgaagaatattttaacttcagacatggagatacagagtttgcccagatagtttttgattcagaatttcttcgatgctcccctttatatttataatgtatatcctatgacattatattgaggcccacagagaagaacaacaaacagaactcatgggatgtggcacaatcatgatgggtgtgcctcagagaggcagagctccaaggactagatgtcttgaggacttgatgctgttatggaaatcgctctatagttctctcaaacatcatgctgctcctaaactatgagttgtatgaaaactctaaggggtctcccagcccctgactgggcagtatctttgacacttagcaataatagtgattgatctttttcaagctttgctgctggtgcagatgaatgattcatttataaacctcagtaagacttagagttatacatgtctagtaacattcaccacccttagaaagaatttggagatatggattgttaggaaagttaggttaagatgtttttgctagtatatttgatatagaaaattttagagaacaatctgaagtccagaaaggaacattcttaatagttgggctaggaaaattttgaggtcaggggataagaacaatggaagcccaacattggctgacatgcctctcttgctaaagctgggctaatgatcaaggtgatgattaatttcatgtactcatttttgccctcagcttcctggtattgattaaataaaaaattgttaatgagtagatgtgcaccctaaggatttaaagtagaagtgactgattttttctataaaaatttagatttgtgattcctttaagatttttataagattactttttaagataaaattattctttctttgcaactgcaaatttctgcctgccagtaaaagaaactggctgagaaaattagcctgcttgcttatactttgttaatatataacaagtgcttgcttacaaatgcatgtgggtttttgaaaatattttttaatacatgatacataaagcatttgatcatgagatgatatagggggacactttttttcttttctttttctatgtatactcactgtaatttttcacttaaagaaaaatggaatgttgtcacattgtaatttttatcctgcttgagagattttggtgagtcacataagctatgggggaaaataaagttaagagaacttgtataataattaagaagattctgtatctgtgtgttctgctgactccatgccccctacttcagactctgatgtgtcaaagctggatatccttatatgttggaagtatgtgatctgctttttgattttgattttacaggaattaaagttaaaagaatggatgagtctcagaagaagctttgaactttggactttcaaacaagtttgagattgttatagactatggggacttctgagattggagtcaatgcattttgcattatgatatggctaaatcctattgggtccaggaagtagaatgtggtagtttgaacaaaatggcccctataggcctattgggagttggactattaggaagcttgcccttgttggagtaaatatggccttgttgaaggaagtgtgtttcatttacttttttgctgcctgaggatcaatatgtagaactctcagctacctctctagcactatgtctgactgcatgctgccaactttcttcccatgacaataatggactagaactctgaactgtaagcctgccacaattaaaagtttttctttataagagttgccatggtcagagtgtctcttcatagcaatagaaaaccaaattaaggcacatccagacacagaaaataattaaaaagaaaataacctctacaggaactgaagactaatattacatcccaaggaatctgtcctatctcctagtctcttctctttctggcttcaccctctagaaaacactctctaaacactgatgaaaatatttgctgacaatgtgaaacctataacttttgtattccaatgccagctacatttctgcttaactgctggggtgcccggtacgctgatcaggggaggcagaacacagtccatcatagggggtctccgtccatgtttccctgggtgagaaacagaggagtctgagatggagatgctgtggttcctagtcacctgtgtacccaggtgctgccagcactgctgggatttgggaacagggctctgcgggtttgagctttccctctccaggcaggaaggaggaaggctgagaccttgatggaagcaaaattccaagtgactgccaatagtaaggacagcttggaaggaaaaagcccttctctaaaagatttaggatatttatgctgaaggccttccctgaggaggtccttcatgaaggagacagtccttgcttgtccaaactgtttttatttgatggcagcggtgaatgcatacaccttacccagggtaaatcaggcattaaataccttttttggaaaggaaagcccaggaaggtatgctcatttggctaaacatttgggagcctatctagaaactgcattagcatggagaactccaggttttaatgttatgtgacccattgtcatggtcctctcagggcaggtgacatggttacgtgttccggatcaggtaattttccagggagtgggctccacacataccattctaaattttaagattccctggggtttgagcctactcaaccttaacagttcttctgtctggtggcatagttcacttgccacacattctagtacatattgcttctgtggtcaacaattccttcaaacaggccatttaatagatgtgctttatcaccttaggacaaaagcatgcaaacaaaccattggaaatagtaaaggaaatgagaagacagtaaaacctgcagtgtctgactagttttggagctttggataggaataatctacctcagtgtttcttagacgggatggttttgtctagagtcattgtggtagttaaaactagaggagggaaatacacctggtacccagtgggtagaggacaaggctgcaggcaaacacactacaattcacatggaagtcatttataatgaaatatttaattgattaaagaacagtggggacatcaagcagaattacataggttgctaaaacttaggaaactccccttgtgatcagatactagggaaatctgggttccctcttggagttcttaatctcattaataaaataaaccaagaatggaatcaaacaggagctcaaggacaattttactaaactttcacagaaactgttccccagactctgtaagttgtagacctcagcagttacccagaagagggaaatagagaagaaaacaattcatgccagttgagttataccatcatggaggtcagccatattgtggcaggcaatcacacggtagagaggatgtctgtagaaaaagagtgaaacacaaagtatttgggaaacctaaagtgttagggaaagtatgcttagaagagaggtagaaagaaggactggagggatggcttactgggtaggagtactggttgctattccagaacactaggcttcaattccaactccacataatgctaacactccacataatgtaactcccaaactgaagagatctgaatctctcttctggtccctgtatgtactgaacataggcagtgcacagacaaacatgtattcaggcaaaaaacatccatacacataaaagcaagtaaataaaaatgtagaaacaaacaaacaataacaacaacaaaaccaaagaaagaaaagaaaaagaaagaaaatgaagtcattcttttctgtgtgcttcaaaaaagttggtgacttacaaatcaacaatagctatactctgtaaaagattataatggagcatggggcggcgggggggggggtgtagaaatttcgggaaggcaaaaaaaagcaaagtatctcatttaagtgataatttttctaactatctctttagcacggctttatgtgagcctacctttctagaggcggtcttttggccaggtgattgatcttgtccaactggaatattagtcatctatacaggccaggtattttaattttttgaccagaaggattatcccttaatacgttgttatcctagcacaaggatcgaaatgaaataaattgtcattaaagtaatgggaaggctaggctgactccatgataagcttcagattggcagttcaggggacgaggcctaaatctctgtttccaagaactgggcaaatccaggcaagtctaggcctcagaagctgccctgccacctggcctgaagcaaggacaatgggtcagcagcagtttccagacttcctcagcaagtttccagacttctccagcaacagcttctagcccctccaggtcccagcaatggagtatcattagagatagccaagattaagatagaggtcacctaaccctccctggaattcccctaatgtgctttaaaacaggcctgggagctcactttgggatcgctctatctttgtagatggtagaccccagcatgctgaacttctgcaaaataaaacactctttgcgtttacatattatttgagactgcagtatcattcttcagagaatcagggaccctgtcttagtcagggtttctattcctgcacaaacatcatgaccaataagtaagttcaggatgaaagggtttattcagcttacactttccacattgctgttaatcactaaaggttgtcaggactggaactcaagcaggtcaggaagcaggagctgatgcagaggccatggagggatgttacttactggcttgcttcccctggcttgctcagcctgctctcttatagaacccaagactatgagtccagagatggtcccaccctcaaggggccttcccccttgatcactaattgagaaaatgcctcacagctggatctcatggaggcacttccccaactgaagctcctttctctgtgataactccagcctgtgtcaagttgacacacaaaaccagtcagtacagtcccttacagtaagaccagttgtcactaattcttcgtttttcactagccacactcagcgttagagcaatggaggcaaaataatagagaattgaaatttttgttgttctgtccaataagtactgtaagtgaaggtgtatataaaatggtgactgtaaggatggagcacaaacttaatctagcaagagaccagttgtggcaggtctatgggtttgcagacactgtgaaatggagattttgagaatcaggacactgggagtgaaccagaagggtaggacttgtggttaagagggatagttaagctcatggagaggacacagttataatgacagttctaggatattctcatgagccttggtggcatagtagagtggaggacaagatcataggcaaagataatttaaggaacggtgaagccaagcatgtggaaaaaagtttctgtaatctttgaagccaatgaggagtgagagaagaggagcattgttggaagtaaatatcagccaggagctaaacccatcaaggactcagggaagaaagtggatgctaaaatgtaacctccaaacaatgtggggatagcagtgtattctgatagcatatggtgcaagaaagtatacttacctgcaatataacttcttccatactttttcgagaataacttaaattctaaatccaaagtgctagcaggactggttccatatgaaagcttcggggaagaatctgcttatttgttccacattttagaggctgctatcatttgctctctggaggcagcaactttgatctctgccctcattgttcttcctctctgatttaggactatgttcctgtaaggttccttagggttattaagcccactttggcagacaggattacctccccacttaaatgttcttgatttaatttaattagccatttcttttcctgccgtataaagtacctatcacaggttctgaaaacagaatgtggacatgtttgttcgcatgtcctatttctctcttggaatatttgagttcttaattctattccccaaacttggctctttatatttgttatttctagaagcactaccaccaatctctgagtagggctctctctctctctctctctctctctctctcattagtattaagaaaggaattaaaattcagtgcaaatcctgtttattccatttctgaaaacttattaattgttcatctgccatcaaatctcacttggatgatggcaaggcctggcttcgctccctgattcattactgcactatcctggtctaggctgaatagcactgacatggttgtgaacaaaaacttccggaaagaaactgcgtctgactgtgaaaggaaattcctgaaagttaactgtttctgcaaagactattggctgattagaatttcagtactctggagagattgcaattttgctggtccagagaccaataattaccttatcttgggctaagtcagaactaacatcatgatacaatagatacaaaacaaacaaacaaacaaacaaacaaaaccacaaacaaccttttagaatctactgacttatcaggcaactagcttctaccaatacaaaagccgagtgccattagagtcatcctgagcctatagaaaagcttccactacctgcttcttgtatgtacccaacaatatattttaaacttgccttaatttgtgactttctctgctctgtaaaaccacaaaaactttatgaaactgcttccatgaaatttggggtgaccatatcattgttccagggtcatgatcactcaaaatggcttcagaataaactcctaatccttttaagatgagagctatggtttttacctttcattttttgtttccagcggcacgttacatccgaattcatcataaggaaataggttcttactgtatactagacagggtatgcaactgtcagctcactgttgcagattagggttaggctccacccttgcagatttttaaaaggagtaaggccgggctatatgcaaaccgagttcccataatgccttgttttctttggagtcgaaggttcctgcaagtggaaaacttcctggagctgacctactaggtattgaaccagtttctgcattgctgaatcaatctcccaagggtaattccacagaaatcccaggggcttggagtaaacaagaccgcgcctagcccagctagaggaagttttattccggaacccagcgccatttctgggtgggactgctttctacaccatttgccgtaaaacgttgtttgagaacggtgtgaggggaatggaggtctcttctcggagttcagagcctctggatccggtgtggctccttgtagccttcggccggggaggagtcaagctagaagttttgctgctgttcttgctgccatttactttgggtgagctgcggggaggcctggggaagcacggacacacggttcaccgggaacccgcggtaaataggctctgcgcagactccaacgctggtctgggctgcctgtgagtgctcagcgcccctttcccatgggtgagcgtggggcgccctctacccagatcttgggtcgtacgcagccggcaggaacgcgtggtctcccagctgcttgtctttattagctgtacgctgtgcttttctgtgctgaatgtagtgagagaaacggtgtggggagcagggggttgcaggaatattgagagatgcaatttctaatcctagaatttggttatgaggaaagttaatatttttgtgtttccttatctgtgaaatggagatattgatgtctttcgtggtattggtatttaataggtgccatcaaatatctaacccaatttcagctccttaatttatttctatcttgagacattccctatgcactttctccgaaggcctagacaaacaggcccagggatacagttttcacacagtgagactgtgtactttatctcccaccccaaatcctcattaactcccttgagcttccactttaaggaaggtccttccactcccactccaaggtaagatttgaaaagctagcaagcctcaaggtgcaatgaaatatttgcaagtagaaaagactgtagaatttacatattaaattttactgatggttaagaacaaaatagagtgcccattttacccaccatgaaagttctaatttccctttcctttctccttaatcagaactttctaagagaaagacttccttgaagtcttttgcattgtttgttttttattgtatttccaaagttaaatgaaaatgatttttttccaacatatagttattggttacatattatttgactctctctgccacataattaatgctgctaagacttaaaagaaaataactgagtctagaagttaaatcaaaatatgtattggaaagtacattaacaaaatgaaatgcagtttcattttttaaattatattattttttccccgttgaccatagtactgatccattcctgagtgccagagaggaggatcatgcatggtccattgtagctagctggagaactgagagtatgagggatgatgcaagttcttttatccaatgtaatgttgctgtgtctcattcaacaggtcactgcccagccccatcacagcttccttctgccaaacctataaatctaactgatgaatccatgtttcccattggaacatatttgttgtatgaatgtctcccaggatatatcaagaggcagttctctatcacctgcaaacaagactcaacctggacgagtgctgaagataagtgtatacgtgagtaactgcagaagaggctcctttgtgccaaatagtagagtcggcctcagtttgtctggattttagattatgactcattattagtaatcttatctaaggtatatagtacatgtggatcatcattcttgtcagtcaagtctttttaactgtgattctgtcttctcaattgttaataaatttaataagaatgattgtcacagggcatgcttaagagaaaatatcatcagaatatttcacttagggtgtctaactttgcacaagtgtcattaagtaatgattctgaaacaaagtgtatttaataactaagagatgaaaaatgttcagactttaaggccaataaattagaatacttagaagaatgcttcatgttttagggagccactgtgtgaaaataagaaaaaacttggatgagagttcttttggaagctagtgtctgatgaatttccccaaagtggcaaaaactttgaagtattacaaatatatatattctacagtaagttataatcaggttagaaattcataaactacagaaagttcagtttactgtacttggttccaaaattctgtttctttttcataggaaaacaatgtaaaactccttcagatcctgagaatggcttggtacatgtacacacaggcattcagtttggatcccgtattaattatacttgtaatcaagggtgagttggcaacaacatctcttcattcaagagttctggaatagcagtactactttctagtcaaatctcaggaaagacatctaatctattacttccttatttggtttttgtttgtgttgtgttttgttgtgtttgtgctacagattgaacttaagactttaaatatgctagacatatttaaacaatataattgttctacagcaaagcaatgccatcgcaatgttacctatccttaaaaggcttgaacataattgtttgattcttgattaaaatgaatagagatataacatgactttgtgggaaagatttgttatccctgttgaataagcaaaataacacatgcgttagctttccaatactatgataaaataattgaggtaatgaattaaaagaaggaaagttatattttcactcataattacagaagttttagttcatgttctcttgactctctggctttggtccattacagcaggaacatggtgaagaaggcccattcaccttatagttgccataaagaaaagagaggcaagaaagggctaaggtctcaatatcttctcctaaggcattgtcactggtgtcctaattttgtcccttaaggcctacctcttaaagattctaccacatcccaataagatcatagcctgtgagactacgcctttaatctataagcctttaggggatgtctctaactatggaaacatagaaagtgaagcactcactggttgagatagtgcagtctaagtacacagacttctgaaattcagagtggatgctgctagaagaaagaaaagcccagggagctccgaggaagatcaggccttaaatttacagcttttattagtttaccaaggttgttgacatgagtaccacagagtgttttcaaacaagaaaaattattaagagtttgattctaagtctaaaagttcaaaataaggtgttatcaggactctgttccctttgatgtctttaggggtgggatctttcttgcctcctccagcttctgggagctttaggccttctatgtctgtagagcacaactctaatttctgtgtccatctacatgattactttctttctgttctgtatgtatttatattcagtgttctctcttttcatagtgatactagttatgttgggttaggatccattctaaagaccctaaatttagcttaactacatctataaagaccctatttccaaatgatgtcacattgacagggaacaggagtttacaggatgaccatatcatttagggaatacaattcaacctcagaaatccctctttgaacatatcaagcataaagtcacaaagtatgtgctaatgttagttctcattactcaacacagagtgaaattctgaatgttaaactataggacatgaactaaatctgtgttcttatcaagatccaaataaaaatggtatttgaaagttcaaaaactttaaaacatttgcttttcaaagaacacttttgaaataacacaaatagaaaaactatctctaaagcatagaatttaaaaagatgtttccctaatatagaattcttataattccagtgaaaagacagataattttaaaataggcaaggctgagatggctcagctgttaagggtatatattgcccttgcagaggacctggggtcagttcttagcacccacatctgcctgtaactactcagctccagggaactgaaacactctcaggccttcactggtactacatgtaaatacacaaaccctcatatacacataattaaaaagaagaaatacatctttgagccaagggtggtggtgtatgtctttaaccacagcactcaggaaacagagggagacatagctctgtaaattcaaagccagtctggtctacatattgagttccaaaccagtcagcttatagtgagatcctgtctcaaaacaaaagaaaaaatgagggaaggattaaacatttttccaaaaaaaatgcataaatggtgtataagtaagacatttactgcatatattcatcaaaatacaaattataaccactttgagatactgccttacctacaaaaatatctctaaaaggaagacaataggaagtgttggcataattggaaagaaatggaagatcctatacatttctgaagtaggcaacataccaatatgtttgaaaactcccaacagtaaacaaactcgtagatctcattagagcacagtgacttgtgaaatgcttgtgaagattggatagcctgcctaccttttaaggtacaacaaaccaatgcataagcaaaaggatgatcgctcatccggaaaacatagctccacaaaatgaatttactatggcagctgtaactgacaaaggagctcaaaagatacttaaccaaaaattcaggatgacttctttgaaggaggttgtgaattgcaggagaacacagaaaatgcagggatacagtaaataaaacaaatgaaaactaaaacaaattccacagtcaaggaatacgatgagtaaactgagaatgcacacaaaggtttgaacaaagagaagaaaaatttaatgaactaaaaaaggggaagcattttgagccatcattaagcatattggtatagcttggtactctctgaaagaacaaagaaaaataaatagtcaaaaagcttacttttttaaaaaaaatgtgacagcaaacttctcaaacataaagagaaaatgaacatctagattcatgaagctataagaactctaaacagattaaatataaagagatcatttaaactgcattttgaaaggagcaagagaaaagcaatctattacaacagagggatattagttatttttctcattgctctaaccaaatacctgacaagaagcattttaagggaagagagattaacttgagctcctggtttaagggcttaatctatcacagtaggaaggcatggtagtaggaccatgaggcaactggttatatcacattggctgttaggatgcagagaaatcaagccagaagtatgaatcgggctagaaacctcaaggcctctcaagtgaccagcttcctccagcaagacctgatctctcacaagttccacgtcttcccaaaatgtaccaccaccctagaaccaaggttcaaatatgagcctgcagagggcatttcacatcttatcgataacaggaggcaatttctgtaagaacatctgtggatttctcagcaaacaacttagaacaagtagagacagctatgataaattcaaattgctaaaagaaaaaaaaaaaaacatttaacaaagaatacagtaccacaacagtcagcaaggctgtcctttagaattgagggtagttggagttcataactattagttgtctttacaagaaatattaaagtgaattcttcaagttttaaaatatgctagctttaaaataaccatagctattgtcatcacagaaacagctctcagagcaatggaaataagatagagtttattttggagccaagtatgagagtgattatggctcaggaacagattcgggttgcttaacataccatgttccaacatggtaacagtttcatgaagtttttataacagaacaacaacaacaacaaaatcttgagacatttaaaggctcattggtataaacaccagatagatgaattatagtaaaacgacctctataataggactcagatgttaaaacatccttagcctttggattggtggaagttaagaatctgtacagtctaaaaggaattttacctgctgatcagaaggacattagtcaaatggatgtgcccagagtaggggtgtgtgtgggaatctctaggaagtctcagagacatgggatggaggaggctcccaggagtcaatgcaggtgaccttcacctagatgcagtggggtcatggaacttggagaggcaggacccccagtgtaggactaaggacaccaacacacccacaaaactttcaacacaaaatttgtcctgtctaaaagaagtgcggggacaaagatgaagcagagactgaaggaatggccaaataactggcccaagtaaagacccatcccattaacaaacaccagtccctgacactattaatgatactcagttatgcttgcagacaggagcctggcctaactgtcctctgaaaataaagtcttttaaagagcaattataattagtaatattaattttcaggctatatattataccctcctcccaccatgtgttaggagtactgttgctgtgatgaaacaccatgaccaaagcaacttggaaaggaatgggtcttgtagatcttgacctggtgagaaatacacatgcctatacatataaaattctgtaaaagctttttttcccccccctgctacgtgatggtgatgctagtttttaatcctagcacttgggaggcagagacaggatctctgagtttgaagtcatgctggactatagaacaagtcccaggacagccagggctacacagagaaaccctgtctcaaaaaacaagagtctctttctcatagcaaaaggagcaggtggaatttaaatttaaaacacaccatttacagttgtatgtacaaaatgatgtgtatgtgtgaagctaataaaataggtatgagttcagttgctgggaaatgtatcatgaattgttttaattttatgatatactagataatttgcagcacattaactgagtattgtcaacattaattcagtattgctgttttaagtatcaagtctttgttcaactcctgttcagacttgagtttctttgctgaatcttgctgataaagcattcccttgtctaggtattcacattaatgcttacagagtataaatgaattcatcttagtataatatacagaaatacacataatatttcctttaccttcaagatgcttataatatctttaattataagacataggaggaaataactataatttactcagattgtgtagtaagataataaaaagagaactctcatttagttaggaaggaatgaagaaggaaatcaaaaagtccagaagaggatatttttgttgacaagaaaaaaaatatcctgaagcttctaagatggtaattcctgggaatcagcaatttaagcagacaattatttacagattacttaatatttttttcttcactcccattgttgggagtcccacaagaacaccaagctacacaaccttaagatatatccagaggacctagctcagagccatctaagatttatgtttgtggattcagtttctgtaaacttctctgagtcttgcttagttgattctgtgggttgtgttcccatggtgttcttttatttattttttatttttttattaggtatttatttcatttacatttccaatgctaccccaaaagttaatattctttattctgtgtgtagataccgcctcattggttcctcctctgctgtatgtgtcatcactgatcaaagtgttgattgggatactgaggcacctatttgtgagtgtaagttgaaatttttctgttacttttattcatgtattttaaattttcgcttgaattatataatttttgcaggactgagattgaacccagggtctcatgtatgctagaggttttctactaaagacatcaacctgcaaatttacagatatagacatgtaaattttggccttgtgcccaacaatttgcacaattttttaaactttctgtataaacttgctatctatcaacttgaccaagttttgaaatgtttacttccttgggtctttagtgtatatatttgttacagcttctgggacatgttgactataagagataatattagacctttagaggttatcttaaagcatttacttactgcaggtttttaaataagacattatttgagctgagtacattccttttggacagtgaatacaaattttgtacttttctatgagaggtgcgtggccacagaaggagctgctgctgatctggtgaggagtgaaagggttttgtagtccgaatcagtgcaggaaggacaaaggtggtgtgactggagcattcttgttatagaccaaggagaactggaaagaaaggtgcaagtctgtttggggatacattaggagggccactctgagtgttctcaacttggttattgtataaaaaaggagaaaaagatatttgtggactgacagataaaactgtgtctctgtgcttatgatcaaagagctagaagaatctgtaaactttcagtctctaaagcagatgatgatatctgatacactgtccgaaagttcctaaacaacgaaggtgagaggcctaaggccaaagcaaatgacaaagaaaaatgtcagaaacaaattgccaaaagacataggctatccttgttttctacttccaagtctgagtcaaaaataactctttaacagataaatgatcagataaaaattatattctttgattaagaaaattctaatttgctgaaagaattgctcttattatgcattttaattctaattctacacatgaaataatcatatctttttttcttttatatgtcacattgacttttaaaggccaaccaactaaatttgtaaaataagcctatcttgcttctgatgtgttatatattattatcttctatatttgtatgcagatatatgtgtgattgctaatattttttaatcttagcattataaagttgttttactatttgaaaatcaatttgtgaaaccccattttgatcattgtattaccctgtttaaatattgctgaattcaattttctaattttgcttagtatatttgtatctctgttccaagaaatactaggttataattagattttttttcttttagtatcattgtttagtttaggcatcaagattatgttggcctcatatgttcttgacattattatttcctgttccctagaataatttgtttaataataatactatatttgcttacatgtttcagtgggttcagtaacggagtagtctagatctgagtgagggggagttgttatggttattacatttttaattgctgattttattttcataataactaaaaaaaacattttacttaatgtcttattgaactaacttgggataaattttgtttttcaaggcatttactcatttctttttatgttttcttagttatcagcactatatttatcattgtgtctactcattatcattttgatgtctatagattttatagtgatacaaagttgagatattggttataacttggtcagttttgctgaagatagatcaattctgttaagctcttcaaagacaatctttaactttgttgagttttatgtagtgtgtgtctttttaattttcattcctaccatattattttctttctttcattttcttttgactcagcgttatgtacttctccactcctaaattaatgacatggctgataagataatttgttttaaacttttattttttgtaatacacttttaaacctataaatttggttcagactgttttatttactttccaaacagttatttgtctactactactgtgcacaaaagttttctaacagactaattataagtgtgatacttaatttctaaatattgggggattttccagttcattattttttcctagtttactttgaaacatattgagtcatattttatggctcagaatagggacaattttgataaagtattataatgttgttaaaaagaatggatagtggttttatgtaattttctataaatgtgatttaggaaaatgatttagaatacatttttgttttcctctatttttctcttactgataggagtacattctctaaggttcatgtaacaagttattgccggcttggtagcttaaagaagaggaatttattatcttttagtttgatgggcagaatgctcaagtcaagatatcagtaatatgcttggtgtcttctggaagccaagagagagaatctgtttttttcttctgcttttatggtttataacaactctgtctcctcgtcacattatcttctgtattgttgttgtcttttcatgttagagaataatatattagtttctataatcaaacccacaacagctaaaaccttacatatttaattcagtgtactacccttgaacaaataggaaagcattaagttttttatttctaaactgatatagctattgaaaggtgtagcctaggctagcttcagactaattggtcatctttactccacctctccaacgtatcttactgtcatgtgtcatcacagctagcactgctaaattctgtctgttataaagacaataactgcccttgtttaccacaatctaatacaaactgtacttttccaatgttcccaatacaaacaacaccaactgtgtggctctatagcttcctgctattatcttttttatgttactttttcatgcttcacaagagatgttatttttatagaaaaaattgtttgtatttatcctgcaatgaattatgctgccttggcatccattttgaatatagtagtcctacttggctacacttttacttttctgtggtttaagttaaccatgatcaaccagtccaaaaaaaaaaatcttagatacaaaattttagaagtaaataattcttaagctctaagttatgcatcactataaaaagtgcgatcaacttttatgctgtcattttctattcaacgctttcccactgagggcaaaaaagatctttttcagtatgtctgtttatactgcagatgtgaaattgttccttagccattcaatagccttcccatttatcagactactctaggtatctaggtatctagtgcttgtgttcaaataatttttatagcagcctagtgctagaacctttgccattcacttcatttcatctacagacattcagtagtagattaaaaaagccatataaacttgaacaacattcaaataattcttcatctagacacatcacaaagatataaaatctaattctatcatcctttatagcagccatgaaacaaagacagtaactgaaaggaaccaaaggagaaaatgtttcaacaatgaaagttccagatctattaaatacaaaagaatgctttttgaatctacaattctgtgatatcttttgtcagacttagaaagttcttagttattcttcagtattatgcatacttttatccctccattccctctgtgtatatgtcattccacctgagtatatgtcattcctctataccatcattccttgctaccaccactgcttgtttaaaaacaaaaacaaagaaccaaacaaaccaggagacagattactggagatcattttattcaaacttgggtttagaaaaaacggggtagaagttatgctcctgttagcacaatacatataactctcaccttaaagcagaaaagaaaatttattttggaaccagacatgaatgaccatgactgggaaacccagatttaggttgccccacattccatgatctaatatggcaacatttgatgaagttgtagtgcaaaagctacagatcttattttaaaggaacaagagatagtttattcaggagctatttttaactgactatggcccagtaaaagagatttagattttgccaaattccatgtttcaatgtggaagcagtttcatgaagttttgtatttttctagaacaaggaagtattaaatcaaggcaaacttaaagtaaattattggatatattagacaggcagttaaaatgagatggaaaaagcttttctgttgacctaaagtgatatctgataacagtcttagcttttgggttggcagaagctaatggagtgctaagttaatagattccaaaatgcttctatctactagtcacaagatgttagtagggaaggaatggttggttgttcttgggggctagaactagcccatggtaggtatttagcctctggacctacaacgtcccaatttcttcagactagaactctaatcaatcagtctctgcatatatgcagcttcttttcaggaaatttctctcacaaattttccatattaaaaaaataaggaaagccataataaaggcacttttaaaatacattggtagaaatattaagtaggtgggcttgaagcaaagcagagaaacttctatagacctcagatgctatctggtggtattcttagccttttattagtagaatccagggctgtgttaaattaatatatcccaaaaatgttttatctgttagtcactaggccactcttcttaaaagctctgttaccatcttgtcacccagtagaccaagcctttggtacattgttgttatgggaatattacctatatttctatatttaaaacacagcaataacccacactctgcagataatagttttcttttttctgtgaggctccaggacactggccagatgacactattttgattcaatgtcagaaactttaatttttcttggccatctacagtacttgaaggtttccaacctttgagatagtaggtgtcagtcatcgttgattctaagattacagttctttacaaggtatcagcagaacttccttatttaggaggccctggactccagtttttattctttgatttgataagaccaccacaaactcaatatattcttcattacctactactggttcgactccctcttccccaaggaactggaagtagcccagtacgaatcactttgactttaagaatagttagggttttttgtaaactagttcgtaaaaatcatcatatggtaagcttgaggtttcagtcctttacatgtctcaaagtacttgaaattatatatagaattatgtgttacttgaaaattgacagaatttgtggggttttcttgtattcttaagagttatttgtcaagtttagctttacatattttgcatgaatattaatggtctatattttcacttattcattacattttcaaaatgcttaatacagagtaatctacagtttcaccaattttctcatatttgcaggcatattcaaattatattttgtacttttatccatttttttcatttgcctcttattttttcttagtgaatattattttttaaaaacttcctttcagttaacaaaaattttgaaattttaggcaagaaaactaatataaactctctaatatgaccaaagagttatttcaaatgaaaaggtcaactgcataaataggaaagtcagagcacatgttattgtatgcatctaaatggcaacatttaaaaattcacctacaagtcagtaaatattaaaagcaaataaggagtgcagatatttttagttcagtgattcattaggtttaatctcttttctttgcccagggattccttgtgagatacccccaggcattcccaatggagatttcttcagttcaaccagagaagactttcattatggaatggtggttacctaccgctgcaacactgatgcgagagggaaggcgctctttaacctggtgggtgagccctccttatactgtaccagcaacgatggtgaaattggagtctggagcggccctcctcctcagtgcattgaactcaacaaatgtactcctcctccctatgttgaaaatgcagtcatgctgtctgagaacagaagcttgttttccttaagggatattgtggagtttagatgtcaccctggctttatcatgaaaggagccagcagtgtgcattgtcagtccctaaacaaatgggagccagagttaccaagctgcttcaagggtaagtctgacctgagcttcgaagtctgcaattccatgggggtattggaggactagggacagggttggttctggatgagggaatacagtgaacaggttgaatgaataaattttcttggaagggaatatgaaatcaaggagggatatatgtttgtgtgggtgggtgttcaaacaatcttataagcacatccatttgaattgagaagcagagctaaatgtgagcaaagaatgtgatacatcctgggaattatcacacactgaagttcttttcatgcattgtgatctccagcttccatcaattattcatatgcataatatttactaatatgaaatgagtgatccatgggcagttatatttaatgtatgcatatttaatttataaaacaaagctatggagtacttactattttttccatattgaggcttagaggttagataattttccaagatgatataagttgcagagcaaagattagaatctaagtctgcctgtctgccagatttttcaaagaacaaaggctttcctataggaaatgagttataaagatgttagaaggtcagaaagaataagaggaggaaagtaatgttgctaaagattagggagctactgttactatagaaatagagctgatatagctggctctgccctgtttgacactgtcactgtcagccagactctggtatacttccagaatagagccagtccttcctggtcatagctgttgctagaatctgagtgctactgctcacttgagagtcatcaagactgtctcaactgaagctgttcctggagacataaaggtgtctatcatatctcttgtcctttagtttgatatatatgtttccaggtagcagaacttaattagaggcctagagctttatttcttaacctgtgggttgaaaccactttgtcaaacctctatctctaacaatatttacattacagttcaataacagtagcaaaattacagtttcaaagtagcaaccaagataactttatgcctgggggtcatcacaatatgaggatttgtattagggtgtcacagccattaggaaggttgggaaccacttccttagagcaaagaaattgtagttttcatgcctctgcccataatagtcaaaaggctgcccaaatagtcatatagcacgaggctgggaatcaacataaatttaatcagcctagtctaaatatcacagcacaatgtattagtcaaagatgagccctcaaaggaaatttattgtagaccagtaccacatttttaactggagaagtctaaaggacagaaagaattgacttgaaatgaggctttggattgttattgtttttgttgttgttgtatttgtttgtttgggtgtatgtgtgtgtgtatctgtgtgtgtgtgtgtgtgtgtgtgtgtgcctatatgtgtgagagagagagacagacagagagggagttttcctcattttgcaacttaatgtaattgttttaagactcacatatatcctcactccttgagtgtcttatatctttagcaaaatggtaaatgctgagaccttctggatagcccttaaagctgtgggaaagaactctgaaaatatgagttcgaaaacatataatttctcaactatggattagtttctcaactatggattctcaaacataaggatgcaatatgaattgtataaggagcttcacagatctaaaggagcagaggtagctgcgctagaagccaacttgtcagaaaaatactaaggaagaagataaagagattaggggtagtgatcacagaagatctcacccagctaagttttttgttcatgctttcaaaagcaggcagattctgggtcagcctgggacagagcaaagttaggcccaggcatggtagaaatggtaatttcaaggcagattcccacccagccagtctatcctctgtgccattatcatagtagcaaaattactgaaatgttgctaaaaagatatttcttagttcatttccatggactcagagattttgttttgaagagggtcagaggctacttttaacaggtcaatcaaaatcctctgatatagaaaaaccatacttcttagaaataccactttacaaatcaggagacaattacaacagaaaaggaggctttgcttgaagttgaggaagatatttatggctgaaagaaaaataaagcaatttaaaggatgaattaaataaaataagagaaattagatagtatgtaaaattagaatcacaagttactaatttctttgttctatatacgaaagtaggctagaagcatttacctttactccacagcaaaaaaataccggtatatgttatataacaagagagttagcatgaaattgtaatttttttaaattaggtgtggcccacatggaccaagggctaaaacatggttgtcctgacatagctttctaaaaatttccagctatatagttgataatcaaagtgtcccatgttccttcactgtatacaaataaaagtcagaaaatttaagaataagattgtgagggtgacagttattctttattgaaaatatatcccattttgtagagggcgaaatctgcggttacagatgtctctataatagcaatttcaattaaccataacatactaatttccttgtgatttttctaattgcaggagtgatatgtcgtctccctcaggagatgagtggattccagaaggggttgggaatgaaaaaagaatattattatggagagaatgtaaccttggaatgtgaggatgggtatactctagaaggcagttctcaaagccagtgccagtctgatggcagctggaatcctcttctggccaaatgtgtatctcgtaagtacaaatgtagaggtggagcccttcctcactgactgcctagtcatctatctatcctggtgcctaaggtgatggggtgtgatgatatgtagtgatgagggagctgagaatgtgctgtctcaaattttgacaaattggaatattagtaaaaatcacttgaagtgtgactgcaggagtcttttggaagattttctgaagggatattctttgcatacaaagacaggaaaataaccttaatcaccacagaccaagaaatggggctgtgataaaacaagtaaattaattcattgtagtaaacattttctttaccaatttttactttcttacccatacatctcttaatgataatcctagaatttatccaggttcagtgacccatttgtcttgtcattccttcaaaaatttattatctttgtctgcaaagtataaaagcatgttgcttaggtcacttaccttatgaagggctaagtttatgaatagctttaataaaagttgaatgtttgtgttctttatcaatccaaccaagctcgctactaaaaatttaaaaggaaatagtaggatttcttttcctcaacactaggtgtttggcaataaaacacaagacccccaaaggctcaacatgaaagcagccccttcctttctgtcttcatgcttcccagtctgtcatctctcctcaagctcccactatctcattctaccattgcatttatcatatgggtttctttatggcttgagagccaagaaagcacatcaatgggtggagtaggcctagggagtgccttccacacagtagacagctgcaggccatgtctctcactattgtagctgaagttttttgttattctgagtcctgtaggacagtcaccctctgctggttactggagggtgttgtagcttgtacctatcaagggataactgagcagaattaaccccgactaacgtcttggagtggggtgtcaatccatagtagattacttgcttatcacgctcaaggcagtgggttccatccctagcaccacaaaatatcgtagcaagaacaacacctaagtgctaggtatttccctttctgcctgtttaagctcttatttataatactggttatgtactaagatttttcaagatctatttttacatctaatttcttcaatgtattcattataattatcaataatttagagaaattataaacttgacattccatagtatgaaattttatgcatttctttggcaaaagttaatgggtacactgaataagaacatttggagtatactaaagatctggctgagacagaaagaaagtttagacttctgggaaaacagcaccacagatactaagtcaaaacaaaacatgaggtaacaaagcaaacataaataagttaaaaattgatattagtgaaataagagtttttatagataagaaagtatcttataaatataatgaagacttcataaaagttatcaagtaattaacttaatatttcaaggcaggttaggacattttttatcttaaatacatacaagatatgatatagagttaaagttacataaattttaaaatagtacatttatcaagcaacttgagctgaggaggatgtggttgagtgagaaaccgtgtgtttattagcaggcaaaagaccctgttttggttttggtggctttgtttttgtttttgttttcatacaatatattctaatccagatttcctatccctcttctagatctactccaccttcctacccatccaactctacgctgttctttttctttaaaaacaaacaagcaaaaagcacggaatagaacaaacaaagaaacaaagaacaagcacgagatgcacatacacacagagatacaagcccacacagaaaacccataaaactccaaaatcagaaaccataagatagaaaagcaaaagaagaaaaaggttaaaaaattgcccagattaaacaatatgagacaaaatgaaacaaaaacttctctaataccaccaagtttattttgagttagccatatattgctgggcataaggcctgtcgttgagtgtattttgtatactcaatgaaattccactgaagaaaactaaatttttacttgtgagctgttgtcaacttgagatggctacttggttcgtgacgggagagcatgtccatttccctatctcagtgctgggaccccatctgacttagacctatgcagaccctgtgcatgctaccacactatgcaccagtaacatttctttggctttttctctctttcaggctcaatcagtggtctaattgttggtaagttctgtgatgggtttattgagaaattctttagtagtatctacttataaaaaatgatatgtaaaaagaagtaaaaaatattttttaagttcaattaaaattaatgtaaatttaggatagcagttttcaacctgtaggccatgacccttgggggctgatggaccctttcacaagggtcacttaaggaaaatagatatttacatatgattcattacagtagcagaattacaattatgaagtagctatgacaataattttatagttggggtcaccacaacatgaggaactatattaaagggccacagcattaggaagtttgagaaccacgggtttagggtgtcatgagattggcatcttcatgcactttgaaggacctcatctttgaattatttgagtgagtaatcaatcatacttcgctgtcaacaattatttattttaatatgactggagagtcaaatctttctttactttttacccagaaatatccatcctgatagtttgtattgttaaagtcataagaccgtcatgtgagtgaatcttgtgtctggagataaaagacttagaggagaaaggaggttttattcttagctaataattccagggtagaggccatcactgtggggagtcaaggtggcaggaatttgaagcagctcctcacatccactgttaagaacttttttccattcttgtacagtccaaggtcccttgcctgagaatgatgccacctacagtgtgtttctatagggccaccttaataaatgtaattaagatctctccctcagacatggccatagtccaaccagagctagctaattcctcactcagattttcttgtcaagtgattctaaactgtgttaagtcgatcatttagccaacacaaatggatttatacagtttgataccaaggggatttctgtcacagagagcatcctgtctcatgcattccactaaagccttgggtaaactgtgtgtactgagcccagcagcaccattgttatgaagggcgatgttgttgggaagaagcttatggaatgttctggtggccccataactaataatgtaggtctaatgtcctagattaaaaccaaaatagagcagaacctaggctaaagttacatggaaaagaatcattgataaccaacagtgggattagctattaagatagagtttaaaaattttgtgatgtgttttcatttattttgttttcctgtttaggaattttcattgggataatcgtctttattttagtcatcattgttttcatttggatgattctgaagtataaaaaacggtgagtaaagccacattctcaaaaaaaaaattgtagcaggaagctgtgaccaatacctgtatcctaacatcctggtggcttagacaggattgccataagtttgaggcttgcctgagtcacagaataatataccgtgcctcaaacaatcaaagcaaaagtagtttggggaaggtggcttagtgattaaaactcttgtacagcaagtatgaggaccaaagtttgaatccccagcacctatttattgccaggtggacatggtggctttcacataattctagtgctcagaaggtagagacagcggatatactggaacacattgattagacagacttgccatgtaagtgtgctctgggttttagtgaccttgtttcagtggaataaggtggtaaacagtagagaaggacttctaacacatacatcacttatatacactctcacacatgcaaatatgcatacagagagagaggagagagagagagagagagagagagagagagagagagagagagagagagagagagagagagagaataaaagaaaaataaaaaactgaatttgtaaattttatgttccttcttttggaaagcaatagaacatacttccataaagacaggtaattctcagaaaggtggccttggttatacaaaatagtatatttacaccaaaggaaatatatatgatagatattttaagtgtgtgtgtggggtgtgtttgtgtgtgtgtggtgtgtatatgtggtttgttgatgcctagcttcttgagttctttatatattttggatattaccgctctattggatatggcattgatgaatttttttccattctgtcagctggcatattgtcttattgacagtgtcttttggcctcacagaagctttacaattttatgaggtctcatttattgtcagtctttattcctgtgctattagtattatatttactcctgtgccagtaagttcaaggctattcctgtctttcttttctgtcagtttccgtgtgtctggcttaatgttgaggtctttgatccactagacttgaactttgtgcagggtaataagtatggatctatttgcaatcttctacatgcagacatctagttagaccaggatcatttgttgaagttgcttccttttttctattttgtatttcaggcttctttatcaaaaatcaggtctgtaggtgtgtggctttatatctgggtcttcaatttgattccactggtcaacatgtctgtttttatgccaataccatgcaatttttattacggtagctctgtagtacagcttaaaatcagggatactgacacctctgaaagtttttttattcttcaggaatgttttagctatcccaggtgttttgtttgtccatatcaaattgaatattgccctttcaattgtgaagggcaattgtgttgtaattttgtaaagaattgtgttgtaattttgatggggattgcattaaatctgtagattgcttttggtgggatggccatttttacattaattttaccgatccgtgaccatgagagatcttttcatgttctgaaatcttcaatttctttcttcaaagactggatatttttgtcatacaagtctttcacttgcttatcttacattgtggatattgtgaagggtgttgtttctctgatttctttcattttatataagagttctactgaattttttttttttggttaatcttgtatcaagccacattgtatcagctgtagatgttccctggtagaattgtgggggttgcttatgtatagtgtcatatcatctgtaaatagtgatacttagacttcttctccttccaagttgtatccccttgatctcttttagttgtataattgctctagctaggacttaaagtactatattgaagagataggaaaagagtggacagccttgtcttgtccctgatttcagtgaaattgctttaagttcctctccatttaatttgatgttggcttttggtttgtggtatattgcctttattgtgtttgggtatgtgccttgtatccctgatttctccaagacttttaatgtgaggggtgttgaattttgtcaaagacttttccagcatctaatgagataatcatgtgggtttcttttcctttcagtttgtttatatggtagattacattgttggattttcgtatggtgacctatccctgcatctctgggatgaggcctatttgatcacagtggatgatcttttcaatatgtttttatattcagtttacaagtattttgttgagtattattgcatctatgttcataggggaaattggtctgtaattctctttttttggtgaatctttgtgtcttttgggtatcaagggtgactgtggtctcataaaatgaatttagcaaagttctttctattttctgttttgtagaataatttgagaaggattggtgttaacttttctttgaaagtctgatagaattatacattaagaccacctggctctgggcttttgcgggggatagggggaggttcaatgactgctatttctttaggggttacagatccatttaatcttgatcttgatctaatcttagtgaggggtatctattgaaaacattatccatttcttttagattttccagttttgtggaataagagtttcctcttatttctcaccaatttttttcatgcagtacttagtgctctgaactttcctcttatttccactttcattgtatcccataactttgggtatgctgtacattcattttcattgaattcgaggaagtctttagtttctttctttatttcattttgacccatcagtcattcggtagagacttgttcagtttccatgagtttgtgggctttctattgtttctgttgttgacatggtagtctaataggatgcagggggttatttcaattttcgtgtatctgttgacgtccattttcttggaaaatctttttctaaccctttactcagaagtaatgtttatctttgatgctgtatttgtcgtatgtaggaaaagattggatcctgtttcacatccattctgttagtatctttttattgggagaatggagttcattgatattgagagacatcaatgaccaatgattgttaattcaccattcttaaccctaataccaactcacagataatccagcatggaagtatttgttatttatgttatataaagtacttgctaagtaactccagaaatcatggtataacattcctggtgaaagcatggggcttatagtcagacctgagttccttgtcggtcaccagctatgaatccttggacaaaacactggccatcaagcgtcatcttccttgcctattgtataatagcccccatcttactgaacacagtcctatacttataatgaatgccagaaaatgtttttttcattagttactgatcttaaaagtaatcaactattttctttttctgtaagttattacatgtagtcatccctcataacctgaaggctcttggctctagaagtctcactgatagcaaaaacctttggatggtcaagaaaccttacatataaagagggtagtacttttatagaacctcctacatgtcttatttatctgtagattagttgtgataatataatataatataatgaaaattctgtgtaaatattttaaactatatagttatactctgtggtttagggaaatggcaagagaaaagcctttatatattcatcagagttacagctttttttggtggttttgacttgtagcttggtgaatgtgtagatgtggagcctgaaggtagagagggagggaggtttctttataacacctgctgctactgtgctaatagtgaggattactttgatacaaagtagaactagtgatcacagagcacaatgatgctatatcaggttgtaatgtaaagctgttagtatgtgaagttgttaaaatttgtggtaaatctatttactaaccaaaagtacttcagaaatagtgagataagttgttgtgaggcttgggtacatgtatataaacaagctagagtcttgatacaatgggtttagtgttttctagtctgagtttttaacttagtaaaattataacttaatatcaaaataaaagttattaattacttttaaaactgtaagatgattcatacagttttcctttcctcactaccaattagcaataccacagatgaaaagtataaagaagtgggtattcatttaaattataaagaagacagctgtgtccgccttcagtctctgctcacaagtcaggagaacagcaggtacatatgcacatcctgaattgaaaatgtttgcatcaactcagatttaaaaatggacagtagagatggctaagaggttaagagcaccgactgctcttccagaggtcctgagttcagttcctagcaaccatatggctcatagccatctataatgagatctggtgcccttttctggcctgcagatatacatgcaggcaaaatgctgtatacacaataaataaatcttaaataacataacaaaacaaaacaacaaaatcccaccccaaaacagattaaaaaacagaaacaattcaaacagaagactgcacacagaagttggaaagtacttctcgagctggaaactttagtttgcttcctgggttattgccatttttatgatttttgtttgataactgttaatactgtgctaaggtatacatgagcctttgggggacagtaggttttgctttttcctgtgaaagccaagtacctgctctctaagggtacacacacatactgatgagggatctcttaagggtcctcggtgactctctctacctctttcccaatttctgtactcacttggcttcctatgactctgactctgtctctctgtctgcctgtctctgtctctcttgtttctctctttctccatttttcaaagcagggttttgctgtgtagcactggctatcctgcaacttactatggagaccaggctgaccttaggctcagagatccacctgtttctgcttcccaagtgctgggattaatggcatgcttcactgccacctaacttcactctttttctgtctttcttttactgcagctatatccatccctaactcatcaatcacctcttctgtgcatcctcaccacaaacccttatatggcaactattggccaaaggtttggggttgaaagagaactaatcctacactgaatgaattatgattatttaactgaatattgtgaatcactgaattataaaccaagtaacagttccaaagatccaactccaatcttgttgcatgagccattttatttgcacatcttcactcagtcattctctctcgggcagcaagggattagtgaaacaggcccagaagcatcatggcccaccaagtcctagatacttacaaatttgccctgttttttggcagttttgactagcaaataagattactccaattttgatagtttcacataacaatagctttgtactgtaatctgacacagcattattgtactctttgatcacaagtaatgttgacaaattctactttatatcaaagaactatgagtgacaacaaaaactgggtagttcccttaagccctgaatttctatcctttccttgctttattcagtaggtgtcctgaagattgctcagttatattgctttgctcaggcacctcacttcagcccttgggcctctcacaaattcacagctctatatttctgtatcacacagagatgttcatttgctcactggcttcctaggaatcctaacataccctgtccctagcgtcttggggcgtctcagaaataatagcgcagccagtacagatctgtcattttcagttatataaggagtttgaggtcagcctgggttatctgagatcctatgtgaacaaacacacccccaacaatacatttctaaggttatttcacaaacactagaaataatcacagctcatgctctgaaaaggagtgtgcagctctcctaataagtggagggaagagcatcacattgtttaataaacttcttctatgtccctctcctttctgataataatatgcgtcacttgaaacttggcattttctgccaatacacagttcaacaatggacagttgaaaagggcctcagtagaaaaatagtaggtacaggaaaggcattttatagtcaatagagatataaatacaggcaactcaatttttttctaacataaaacctgcagtttgttgtattaaatctttaatctcaattgggagtttctaccccacctttgatcatccagttcccagataaaagacacacaacatttatgtttataataagcctttaaagcactagagctgggcagatatctaccctttaagctattattttctacttccctatccataaccctgagttctaatttgccatattccacttgggcagctcttaactccaactggctatgttttcatgtttcacctattccatgtcatcttttcctctctccatcttctcttccctcttgtgggccccttcaaccccacccccccaaacccgtgtcccctatcccctacctttttttctgcctagctatataggctgtaggcatctttattcaaccaatagttttaaatataggagcaaacttacatatcatcactgtgtatacatgcagattatctcatctctgggggcatccaggccttggggaccacaatacatagcaaaagaccaaacctcaacagtagttaatattttcttttcttctgcaatggaagtaaattagcaaagctttctatttattttctagtttcctagttactttttttcttttctcttgaagattattttttttaaatactatatataaaagaaagtgaaatactaattttttaaaaattcagacaaagtaaaataaaatgcagtgctttgggggattttttaaagatctgtatccaaggttcttaggtatagagtttgtttacaccctttactattgggattgttgatcggaaaattgtgcagaacaagtttcaagctaaccatgtaattatattatagggagagaataacagactggaagctaggtttgtttttacaggaagttattttttaaacatcccataaaagtgcttaaaatatcatatatttagatccataaatgcaagattacccacctgagacactttctcatttttctttttgctgaagtaccactagcccagcacggaattcactcactcaagaagtctcctaaatagcagcaacgtgaaatgagaacatgctctgtctgtatcacttttaaaataaactgtttccttttaagatctaggtgtgtggttcatacttataatttcagcacttgggagcggacatggaaggaatgccacagattcagagtcacccaggacatttaacctatctcaaaaataaaaaaataaattaaaaagtaggaactcattctttaaaacagtaaacatatagactactttatatatatattgagccagatgcaatagctgactcctgtaatcctagcacatactctggagaactctgaggcaagagtattactttgattctgagaagaaaaaatcaaaaggtcagtcttgattacagttttccagaacatcagggttaattatttttggcaacactttgtagaaaagggttgagaatctgtactaagcacaagtcctttgtgcccaggctaaatgtcaaagcaatgaagagacaaggtggaggcatatagtgaaggaaagaatgtttgcaggagctgtagatagtgggtgatgctgatcagttgagagagagagagagagagagagagagaggcagagagagaaagaagagaagagaaagaggaagaggaagaggaagagaagagagaacaatgaacagtcaagtaggcaataacatctaggtcaggtagcctctcagggctgtgtccgctggttgaagcacagtattcaggtagaaaggaaaggctccagccttgtcagagataaactctggtacccggtcctgaatatgccacccttgcttatccttcatggtaggaacaggagaaggatgtgcttttcagagctggctcttctctagagaacctactagtcactgtttacacctctgccacaagtccacatctaaagagtcttagagaaatgctttgtgcattatgggtgaactgctttctatttacaaattaataaaaggaaaaaatataaggtgtatcattaatcttttgtttttattggatattttctttatttatatttcaaatgttatcccctttcctagtttcccctccgaaaatactctatcccctcctccctccccctgctcaccaacccgcccactccggcttcctggccctggcattcccctatactggggcatagaagcttcacaggatcaaggacttctcctcccattgatgatcaactaagccattctctgctacatatgcagctagagccatgagttccaccatgtgttttctttggttggtggtgtaatcccagggagctctggtggtactggttagttcatattgttgttcctcctatggggctgcaaaccccttcagctccttgggtactttctctagctccttcattggggaccctgtactctgtcgaatggatgactgtgagcatccacttctgtatttgttaggcactggcagagcctctcaggagacagctatatcaggttcctgccagctagctcttgttggcatccacaatagtgtttggttttggtggttgtttaatgggatggagccccaggtggggcagtctctggatgatcatcccttcagtctctgctctgaactttgtctctggaaatccttccatgggtattttttctcccttctaagaaggatcgaagtatccacactttggtcttccttcttcatgagtttcatgtattttgcaaattgtatcttggatactctgagcttctgggcaaatatccacttatcagtgagtacatatcatgtatgttcttttgtgattgggttacctgacttaggatgatatcttccagatccatccatttgtctaacaatttcataaattcattgtttttaacagctgcatagtactccattgtgtaaatgtaccacattttctgtatttattcctctgttgaagggcatctgggttctctccagcttttggctattataaataaggctgctatgaacatagtggagtatgagttcttactacctgttggagcatcttctggatatatgcccaggagtggtattgctagatcttctggtagtactatgcccaattttctgaggaactgccaaactgatttccagagtggttttaccagcttgcaatcccaccaacaatggaggagtgttcttctttctccacatcctcgccagcatctgctgtcacctgagtttttgatcttagccattctgactggtgtgaggtggaatctcagggttgttttgatttgcatttccctgatgattaaggatgttgaacattttttttcggtgcttctcaaccattcagtattcctcagttgagaattctttgtttagctctgtaccccatttttaatagggttatttggtttcctggagtctaacttcttgagttctttgtatatattagatattagccctctatcggatttaggattggtaaagatcttttcccagcctgttggttgcattttgtcctagtacacttcttccttttcatcatactttcttctgccctgtataaaaaccacaacaaagggtaataaacactttttatgaatctgcatttatattaataccaccatcctgattatgtaagagtctgaaaattagtgaggaagatcccagactcagatagtatgcaaagacaaagtgtttttttctgcagaatcaaccagcatgaggggggttcagccattcttccaaatggcaaccctagacaaaggcattctggcctaatcctagagttcctggaactctagaaggattaggtaatctctaatgtgattggcaggggccaaagtggtgacattggtataactttgattggctactatattgagagagtgagttaggtaatctaaaatttcattgatgggtgctgggaggccacagggattggcttctgattggcttttgccaggtggtaagtggtctgcattcctgtgtcttgaatgtttagccacaggatgagataaggccggccagcactataggcccatccggagataagatattttctagttcttctggttatctctaggctattgggagggggtttacgaccttcttcctggaatttttgatctgttccggaagctggtgacctatggcctagtccctgggatttatggtctgttcctggagctggtaacctatggcctagtccctgggactggtggctgtctttttaaaattaggcctggtcctaaaatggagacaaatggagtttatgttgtcctttcaattattagcgtatgaattcttcacagtttaggtattcccaatgctgtcgtaagtgaaaatatcctgttattttaaatgtcccttcttgacaaaacaaacaaatagcaaacaaacaaacaaaaaaactgcaatattatggataaagttagtgtagaagccaattcatttcaacagaatgagatctgagattcaagtctttgatattacttcaaagaaatgcaaaagactttggggatgaaacttctgtcacttccatgtacccataccctatgttgaaatcacatattatctagttagacagagtgaacagaaaactggatgacttgaagaaaggagatatagtctaggagttatgctttataagtctattgttttcctttttattttaaagtgttcataatatggaataagatcattaaagaacattaggaggatgtaaaaacatacaaacaagtaaattcttctatgtagcctagtcactacttactaggctgtttcatatatgtctctacacatgcatatttttctcaaattgttcctacatttctaaaacagagcacactttcaaaacagattgaagaaaaacatgtaataacatttatcaccttttctagggaatagaggtaacttttgtttacttagaaataaatttttaaaaaatgtaaatggtgataggaagagttactaagagtattcaagaaaactatctgaaaaaaaacaaaacactaaactaaactctgggtttcttctactttaaaagttctttgtaccatgctcaatattttaaaaaatgaaataaaagaactgtcaaaaaaaaccttacctttgaataaattcagaatacttttttttcttttccaatttttattaggtatttagctcatttacatttccaatgctataccaaaagtcccccatagccacccacccccactcccctatccacccactcccccttttnnnnnnnnnnnnnnnnnnnnccactccccctttttggccctggcgttcccctgtactggggcatataaagtttgcatgtccaatgggcctctctttccagtgatggccaactaggccatcttttgatacatatgcagctagagtcaagagctccagggtactggttagttcatattgttgttccacctatagggttgcagatccctttagctccttgggtactttctctagctcctccattgggagccctgtgatccatccattagctgactgtgagcatccacttctgtgtttgctaggccccggcatagtctcacaagagacagctacatctgggtcctttcgataaaatcttgctagtgtatgcaatggtgtcaacgtttggatgctgattatggggtggatccctggatatggcagtctctacatggtcaatccttttatctcagctccaaactttgtctacatagtgcctcatagatatttataaattatatgttattcttttaaaaacatgactagttaacacttgttagggaggcagcttagcacttaaagcccttacacacaaccaaaaggaaatgagttcagattcccagaatccctcctgtaactcaagcctcagaaggctgagaaatatcatttcttgagcaacctggctattgaaactctctgtatcagtaagctttgaatttgattgagagaccttgtagtttgaatatgcttgacccaggtagtgacactatttgggggtgtgaccttgtggacataggtgtagccttgttggagtaagtgtgttactgtgggtgtgggcattaagaccctcatcctagctacccggaagtcagccttctcctgtttgccttcagaacaagattttaaactctcatctcctcctccgccatgtctgcctggacactgccatgcttctgccttgatcataatggactgaacctctgaacctgtaagccaaccccaattaaatgcttctcttataagagttgtcttggtcatggtgtctgttcacagcaataaaaccctaactaagacagaagttggtatcaggagtgagtattgtcatgataggcttgaccatccttttctttggaagaatgtagatttggggactttggatttggaaagctttggaatgctttaagtggaacttaatgggctattctagtagaaatatggaagactttggtgctgagggtgatttgcactgttgaaactctagaggtttcagaggagaagaatttcagtatgtggccaagagactgctactgtaaaattttgaagaagaatgtgtctgctttttgccattgtccaaatagtctgcctgaggctaaagtgaagagatttagattaattgctttgacaaaggaagtctcaaaacagcctggtataaattccattgtgtgattactaaagttcactcctatgaagaggcttttgatgaagcacagcaagctctaaaaggaaaagtacaaagtgtacagtaataaaggggcaccaggaagtgaaatggagctgaatgctatgcttaagaaggagtggtgactttggggcaagatcccacccagcgaaggtaggtccaaacatgatggtaatacatcttaatccaaagagacagaaggaagcagatctttgagttcaaggctagcctggtatagagaaagtttcaagtagagaaaagcttcagtccaggcatggtggtacacacctttgaccctaggattcaggagacaaagccttttagatctgtgcaaggtcagtctaccaagcaagttccagaacagccaagcttaggccatgaaggagttagaaaacagaaagctggtgataatttaataaaacaagttcaagctcaagcaagcatcagaacttggcagcttcagccatgtggctctggctttagagtcaaaattagaaggggctactaagacaattgatgctggttagctggagctaagaacttagtggtgattaagaagagaccagtgactgaagtgaaatcttggaagccttttgtgagagcacaaagaatctgtgttccagagatagccagagttgtacccggtgctgcagctgaacttgtagtgtgtaagaaccacccaggtagtactggttttgaatgtatgaagcagtcatggacagcagctgaggcttggcactgtgagaggctagggaaggcctggtactgaaggtgtcattcaaagaagttgaggcttggcaccatgaagagagcctatgagaggttattgatgaatcctacttgcagcaggaaagcccagcatattggagatgccagtaccatgggatgaccaccaaaaaaaaaaaaaacccacagcagcagcaatggattggagtcaaccagagcctagagtgctatagagggcagagctggagaagtgttgcaagccctttggaggatcatgtgtggattccagacactggaataagaagctgaaacattgaagttgccttggagacccaaagatgttcaagatgccagagctgtaggatatctgctgagaactgctaacagagtggaaccagcccaggagaaagaaatttgttgcagtcaacaaagatgaaaaaggagttagagatctgaagacctctttgacatcagatatggagatgcagagtttagagtttgcccagctggcttactgtcttgctttggggattacagttaagtgattgaatgaatctcagaaaatactttgtactttgtacttttaacattgttgagactgctatagactatggggactttggaagttggactaaatgtattttttattatgctgtggctagatatggcccccatagactcatatgttttaacaagcctatgggggccagggagtggaatgtggtggttttaatatgctggcctagggagtggcactatttggaggtgtggcctatttggagcaggtggctcactgtgggtgtgggctttaagacccttatcatggatgcctggaagccggtcttctgtgctgttggaacaagattttaaacccagctcctcctttaccatgcctgccttgacactgccatgctcctaccttggtgacaatgggctgaacctctgcacctataagccagctccaattaaatgtttttcttataaatgtgccttgattgtggtgtctgttcacagcagtaaaaccctaagacagaccttacctctgaagatgacgtgggggagtaattgaatgagattcctggggctggagatatgattaagagcacttgttgttcttgcataggacctagggtttagttcttgacacccacatggtggctctgctcacaaccatctgtaactccagtttcaggaaatccaacaccctcatctgtcctgtgaaggcactgcatacacatgatatatagtcatatattcagtcaaaatactcacagaataaaaataaagacatctttttttgaaaaattaatttattttttacactcaatattccattctctgccccctatgcaccctccgactgctccacatcccacacctcccccagccccgtcgccacataaatgccacccccccccaccccacctgacctctatactccctagggcctccagtctctttttttttttttccatttttattaggtatttaactcatttacatatccaatgctataccaaaagtcccccatatccacccacccccactcccctgcccacccactccccctttttggccctggtattcccctgtactggggcatataaagtttgcaagtccaatgggcctctctttccagtgatggccgactaggccatcttttgatatatatgcagctagagacatgagctccaaggggtactggttagttcataatgttgttccacctatagggttgcagatccctttagctccttggctactttctctagctcctccattgggagccctatgatccatccattagctgactgtgagcatccacttctgtgtttgctgggccccggcatagtctcactgggcctccagtctcttgagggttaggtgcatcatctctgaatgaacacagacctggaagtcctccactgtatgtgtattgagggcctcatatcagctggtgcatgctgtctgtttggtggtccagtgtttgagagatctcaggggtccagattaattgagactgctggtcctcctacaggatcaaccacaagcctcaaaagtacataaatggacatacacacaaagaggtatgcatagatgtatgtatgaacgaacaaatatgcatgcatattacacatatacgtatgtaaaattaaaacaagtgttcctgtatattatatgtatatagtaatattttgagctatgctcatgatctcaataaatgtcagaatctttctggatattgaacaaaaggtatgcacatcatttttgcttgtttctgtgttttaatagcttctttaaaggtgtgttatataataattggtttgacactgccctggttagttttatgtcagtttgacataagatagagtccctggagatgagggagcctcaattgagaaaatacctcaataagattgggttgtaagcatgcctttagggcattttcataattagatattgatgtgggtgttgggggtcagctattcttttggggccacctccaggcagataatgctgggttctataggaaagcaggctgagcaagccatgaggaacaagccaataagcagtgttcctccatggcctctgcatcagctgctgtttccaggttcctgcactgcttgagttttggtcctgacttcctttgatagtgatgtagaagtgtaagccaaataaacccttccctccccaacttgcttcttgatcatagtattctgccctggcaatagaaaccctaagacagacaccataaggatgagctagctatcaacttgattttagattatgaaagttaggggaagaaaaagtcctatgcaaagtccactaaccaccaccaccaccacacacacaaaaaatggaactttagcacaaaaagatattagaggattcttgaaagtttgtaatatagtatatttaccctttacatgtctcttgcataagcatgaggacttgcattcagattcctagaacccacataaaaagtccaaaaatgactgaaagccaagagatggaaaagcagagacaggaagattcctggggtttgctggctcaataaactttatgttcagtctgcctgaacctaaagtaataataaataaataagttggagagtgtggtagtttaaattaaaatggcccccataaacgcataggaagtggcactattaggaggtatggccttgttggagtagttgtggctttattaaaagaagtgagtcacaagggtgggctttgaggtcttagtttaagccaggcttagtgactcacagtctcttttgcctgaggatccagatgcagaactgttagctccttttccctgcatatcatatgcttcccatcatgatgataatggactaaatgtctgaactgtaagccaactccagttaagtattttcctttataagagttgtcatggtcatgatatctcttaacagcaataaaaccctaactaagacagagattgaccaaggaagacaacatgtgttaacccctggcctctacaaccacatgcacactcatgcatgcacacttacgtgcatgcacaggtgcacacacccaaatggacatgtacattcacaacatactatgagtacaaaaacacaaagacagatgtaaaaccaaaaatggata

SEQ ID NO: 98 - DNA, 1561 bp, Mus musculus
gccttgttttctttggagtcgaaggttcctgcaagtggaaaacttcctggagctgacctactaggtattgaaccagtttctgcattgctgaatcaatctcccaagggtaattccacagaaatcccaggggcttggagtaaacaagaccgcgcctagcccagctagaggaagttttattccggaacccagcgccatttctgggtgggactgctttctacaccatttgccgtaaaacgttgtttgagaacggtgtgaggggaatggaggtctcttctcggagttcagagcctctggatccggtgtggctccttgtagccttcggccggggaggagtcaagctagaagttttgctgctgttcttgctgccatttactttgggtcactgcccagccccatcacagcttccttctgccaaacctataaatctaactgatgaatccatgtttcccattggaacatatttgttgtatgaatgtctcccaggatatatcaagaggcagttctctatcacctgcaaacaagactcaacctggacgagtgctgaagataagtgtatacgaaaacaatgtaaaactccttcagatcctgagaatggcttggtacatgtacacacaggcattcagtttggatcccgtattaattatacttgtaatcaaggataccgcctcattggttcctcctctgctgtatgtgtcatcactgatcaaagtgttgattgggatactgaggcacctatttgtgagtggattccttgtgagatacccccaggcattcccaatggagatttcttcagttcaaccagagaagactttcattatggaatggtggttacctaccgctgcaacactgatgcgagagggaaggcgctctttaacctggtgggtgagccctccttatactgtaccagcaacgatggtgaaattggagtctggagcggccctcctcctcagtgcattgaactcaacaaatgtactcctcctccctatgttgaaaatgcagtcatgctgtctgagaacagaagcttgttttccttaagggatattgtggagtttagatgtcaccctggctttatcatgaaaggagccagcagtgtgcattgtcagtccctaaacaaatgggagccagagttaccaagctgcttcaagggagtgatatgtcgtctccctcaggagatgagtggattccagaaggggttgggaatgaaaaaagaatattattatggagagaatgtaaccttggaatgtgaggatgggtatactctagaaggcagttctcaaagccagtgccagtctgatggcagctggaatcctcttctggccaaatgtgtatctcgctcaatcagtggtctaattgttggaattttcattgggataatcgtctttattttagtcatcattgttttcatttggatgattctgaagtataaaaaacgcaataccacagatgaaaagtataaagaagtgggtattcatttaaattataaagaagacagctgtgtccgccttcagtctctgctcacaagtcaggagaacagcagtaccactagcccagcacggaattc

SEQ ID NO: 99 - protein, 474 aa, Mus musculus
  VARIANT (1)...(474): Xaa = Any Amino Acid
TRPRLAQLEEVLFRNPAPFLGGTAFYTICRKTLFENGVRGMEVSSRSSEPLDPVWLLVAFGRGGVKLEVLLLFLLPFTLGHCPAPSQLPSAKPINLTDESMFPIGTYLLYECLPGYIKRQFSITCKQDSTWTSAEDKCIRKQCKTPSDPENGLVHVHTGIQFGSRINYTCNQGYRLIGSSSAVCVITDQSVDWDTEAPICEWIPCEIPPGIPNGDFFSSTREDFHYGMVVTYRCNTDARGKALFNLVGEPSLYCTSNDGEIGVWSGPPPQCIELNKCTPPPYVENAVMLSENRSLFSLRDIVEFRCHPGFIMKGASSVHCQSLNKWEPELPSCFKGVICRLPQEMSGFQKGLGMKKEYYYGENVTLECEDGYTLEGSSQSQCQSDGSWNPLLAKCVSRSISGLIVGIFIGIIVFILVIIVFIWMILKYKKRNTTDEKYKEVGIHLNYKEDSCVRLQSLLTSQENSSTTSPARNX

SEQ ID NO: 100 - DNA, 141503 bp, Homo sapiens
  misc_feature (1)...(141503): n = A,T,C or G
aaaaaaaaaaaaaaaaaaagccagccatgtggccatatgagggaggaggattccagaaagaacagtaggtgcaaaggccataaggcagtgtgtgccagctgtgttggcggcacagcaaggaggccagtgtggcctacagttgtagagatgaagtcacagagatgggggtgggatgtgggcgagaggatgatcgtacaaagtctgctatgtcattgtaatgggatggtgggcaggagaggatgattgtataaagtgtgctaggtcatggtaaagagattggtttttatttggaagcttttaaggagaggagcaacacattcaccttaactgctgttaagaacagactgtaggaagccatgggtggaagatgggagtcaatgaggaggctgctgcaatcatccaggcaagaaattgtcagtggctaccaccaggttgtaagaagaggccagattctgcatgcaattttaagacagtgacagtaggatttgtggatagtttgtatcagaatatgagaggaagagagctgtcaataatgacacgagggcttttgcctaagcaactggaaggatagaactgccattaattacatgattgagattgcaaagagcaggactggggagaaaaatcaggagttccactgtggagatgttaaatgtggatgtctaatagacttggcaagaagacagctgatgtacaagtctgtattttgggcaattggtccaggctggagataaaaatttgggctttgtcatcatgtggatgtacataacaaggagactgaataagatctccgggaagtgaaagaggctagcaaaaagaaaaggtccaagtactgagccctggatcctccaacattagaagtcatggagtgagaaggcacccactaagaagtgaaggagcagcctctgatactatccagagaagaaccttaaagtcaggcaaagaaagaattttagggaggagggagtgatcaactctgtccagtgttgctggtaggccaaaaaaatgagccctgaaaactgaccattgaaattcagtagcacaatttttttgctgttgttgtttgagacagggtctcactctgtcgcccaggctggagtgcagtggtgtgatctcagctcactgcagcctctacttcctaggttcaagtgattctcatgcctcagtctcctgagtagctgggattataggcaagcagcacaaaatttgctgctgaacttgacaagacagtttttgaagagaggaaggaggcaggagcctgactggacggagcttaagagagaatgaaaggagagaaattgcagctatcaaatacagacaactctttctaggtttttttctataaaaaggagcaaataagtaaagtgctagtaagagtaaaacataaagtcaacagaaatattttttaagattggagaaatagcagttatgccctattcctacatgatgatgggaataatttagtagaaagggaaagagtgatggcagaaagagagagaagaattgctcgaacaaggtctgggtaagctaggaggaacagattaagcagaggagctcctagctgcgtgggcttagtaacaggagggagggcagaatctgcaggtgcagatgaaggcaggttgggagctgtgatggggagtgaacgtgtggaagttctcttccgatgattcagtcttctcagtgaatagaaagcaaattattcagctgagagtgaggctcagaaaggaggtattagagagttaagaagaaaaaggaaggcattaaatcatcaactaagaactgaagactgaattatagggagtacagaaaggccgacaggccacatgagatgtgcacctgagtttcccatgagaaagtggggatgaacatttgaaggtttactctgtccggggattatgtgacagtctttcatgccttctcttacttagccatcagtaccactttgaaaggtgggtgttctcccaagataatatcaagatgaagaaataatatccaagaaaaccttgggcaaggtctcagggtcaatcattggcaaaggtggaatgcaagctcatgtctgagtttaaactgctttctcctacataatctagaaaataaagataccagccaggagtggtggctcacgtctgtaaacccagcactttgggaggccaaggcaggcagatcacgagttcaggagatcgagaacatcttggccaacatggtgaaaccccgtctctactaaaaatacaaaaattagctgggtttgatggcacgtgcctgtaatcccagctactcgggaggctgaggcaggagaattgcttgaaccagggagttggaggttgcagtgagctgagatcacgccactgcactccagcctgctgacagagcgagactccatctcaaaataaaataaaataaaaaatataccacctctgtcctcttggaacttattttaataagataaataagacccataaatatcataggtaataatacataccataaacaaggtatagaaaatctgtgatggcagttgaggaagaaaaggtaacctgctgctggtgagtcctgacagggggaccatactagtgacctctaaatccaaaccagttgaggtacagagtacacctagctcataaatatttgttgaatgagtttatgaatgagaaagattagtactttcatttctcatttagtttaattcatgtttatatgaatgtatataaaatgtagttatttgttccagagcatgttatatgaagaaaggcctttcaatagaatgatatcttctaatagacttgatgctttgttggttataccagctgtaactggtatgtaaagagaatgttagcattatttaaacttcgagttgcaccgctgctattcatgctgcctcctaaacagaaatgatctatttcagtgtgcctcattgcttggaattcagcggaatattgattagaaagaaactgctctaatatcagcaagtctctttatatggcctcaagatcaatgaaatgatgtcataagcgatcacttcctatatgcacttattctcaagaagaacatctttatggtaaagatgggagcccagtttcactgccatatactcttcaaggactttctgaagcctcacttatgagatgcctgaagccaggccatggctataaacaattacatggctctaaaaagttttgccctttttaaggaaggcactaaaaagagctgtcctggtatctagacccatcttctttttgaaatcagcatactcaatgttactatctgcttttggttataatgtgtttttaattatctaaagtatgaagcattttctggggttatgatggccttacctttattaggaagtatggttttattttgatagtagcttcctcctctggtggtgttaatcatttcatttttacccttacttggtttgagtttctctcacattactgtatatactttgcctttccataatcactcagtgattgcaatttgcacaagtttttttaaattatgggaatcaagatttaatcctagagatttggtgtacaattcaggctttggatgtttctttagcagttttgtgataagttctagttgcttgtaaaatttcacttaataatgtgtacattagtcattcaataaattgtaattgtaaagaaaacatacaacacttgccttattttgttttttttttggagtcaatgaactcttcgataacagagagtcttagggctttaaagtccacgatttaacagttattcattcaggatcccatcacttggtcgttttagccaaacttttaacccacaaattcaatttcctcaccctcaagactttctcttatatttgtccagccaataccttctccggctcactcatcctctcccaccacacccttgatatagatatagctgttaattttctctgttccaacatttaaactattgagaaaataaaaccttgctcactggtgaccacaaatttactctgtaccttcccctagactaggtatgctgttcagcatctgttttttttctgttttttaaaattgtgattaaaaacacataaaatttaccatcttcaccatttttaagggtacagttcggtagagttaggtacattcacattgttgtagagcagatctccacaactctttttctcttataaaaccaagattctatatccattatatagtaactccacattcccccatcccttcagtccctggcaaccaccattctgttttctgtcgcaatgaatttgactactctcagtacctcatataagtggaatcatacagtacctgtccttttgtgacttatttcacttagcataatgtcctcaaggttcattaatgttgtagcacgtgtcagaatttctttcctttttaaggaaaggaagaaattcattgtgtgtatatgcaattttgtttacattttgtttatccatttatctgtcgatagacattaggttgtgtattagtctgttcttacattgcaatatagaaatacctgagactgagtactttataaagaaaagagttttaattggctcatggttccgcagactgtatgagaagcatgatactggcatctgctcagcttctggggaggcccccaggaaactgacaattatggcagaagatgaagagggaagccaggcatgttttacatggcagaagcaggatcaagggagagaatggggaggtgccacacactagaacaacaccaaggggatggtgctaaaccattcatgaaggatccaccctcatgatccaatcacctcctaccaggtcccacctccaacaactgaggattacaattcgacatgagatttggatgggaacacagcgtttttctgagccctccatatttttccaacctctgcctgttacccaattccaaagttgctgccgcattttcaggtatctttatagcaatgacccactcctgggtaccaattttctgtattagtttcttcccacattgctataaagaaatacctgagactggataatgtataaacaaaagaggtttaattggcttatggttccagggtctgtacaggaagcatgctgctgacttcttcctgccttctggggaggccttgggaaactcacaaccatggaggaaggcaaaggggaagcaagacatctcatacggtgggagcaggaggaagagagagagggggcaggtgctacacacttttaaactactagatttggtgagaactcactccctacatggtaccaagctaatccattcatgagaaatccaccttcatgatccaatcacctcctagtaggcccctctccaacactggagattacaatttgacataatatttggatccaaaccatatcaggttgtttccatctctttactattgtgaatagtgcttccatgagcatgggtgtgcagatgtcttttcagacattgcctcaattcttttggatccatacccagaagtgggatgctcttcagcaccttttattcgtgtacagtcagcaacactttcatttccccacattgtctgttcactcacctcgagccatctactctattctacattcattcattcttccttctattaagggatgatgaaaacatccgaaggtaattctcttaacttcctctccctccaccttccatcctatctacatccactcacccttaccctcatgtctgtcttccacttttcacagcctatatctttcactcttcatccctttctgtcttttccaggacattgttccttcagttagcccctctctcatcattggctccttcgttccacctccaaaactcctgaagccaagacctgctgagctgcatgtgacagaaatccacctcacactggcttagaccaaaaatgaattttgctaaatcacatgacagaaaagtccaagcatgtagctggcttttgtcaaaacaggaatagtcaaagggtgccttcaggaatatcttctccttctgctttgcctggctggcttcattctctggaaaaaactccctaaaaactggcaaaatatttactgatgatgcaacatgcacgtctcatcagcttagccttccagtacaaagagcctctcgtccaataagtctttcaaaagtcccttcaatagctttcattctccaaatagggttacatgcccccaaaggaaacaataactaggagcaggacagtgaaataaacacagggcaaggcctgagttgcctgcccagccttggagatgggggtagggttggtctacctcattggttctcaggtgggatgattttgccctcccaaggacatttggcagtgtctagagacatttttggttactacaactgaaggacggaagggtttccagcctctagtaggtagaggccagggatactgccaaacatcctccaaggcaaaagacagccctccagaacaaagaattatctggtccacgatgtcaataatattgaggtcgagaaaccatagtcttccagaatcacattgaactatgggaaagaggggatttcccagtggaaaaatctaggggcaaatcccagaggaagggacccatttagagcaacagatatccaccttcacctccatctgaaaaaaatcttcccccaaaccatctatgtttctcgtttaaactacctctcttacaccaaattttctgaaagagtggttggccttagctgtctcaaccactgtagtcattcattcaagtgatgataattatggagctccttctgtgtgctaagcattattttaggtcatgggatttggcagtcgtaaactgacatgttctcatgcagcttttattctggtgggagagacacacaataagcagattttcagttggtaataaaatgaaaaaatgataagtataattttttaatctatatgaaacaggcaaaaaggaaaggaagttctgaattaatgtgcaattttaaatagtggccaaggaaggctccattaagaaggtctcatttgagccaaataactcaaggagatgaggtagtagccatgcagagcgatatctgggcaaagagcattctaagcaaaaggaatattaaatgggaggaaaaaactgaagagaaaaatacacctgctgcacttggagaaataatttgtttgcaagctgatggtaaaaatccagcagaaagaggtgtatgatagtgctggaggaagtgagaattgctggtttccttgagtgagtgagagcaaatcgaatctagggcacaagtggagagatcacccttagacttagactgtgaacagtataattatattaacaggagagacggaggtttcatgggccaaatacaagaatttgggtggagtgatggtagaaaattgtagatctatttgattgtttctattttctcaataaagaaagaaacaaagccattcacagaaattaagaatgttggagaaggtgtcagaaataaatgtcaaaataaaaatatgaaatagtcatttaggagaatgggagaataaatggattagacaaacaatagtgggaatgtcaggcagaagtataatggtccatttgaaattatttgttactaaagtaaggctagtcattgtggctatgtgtcttttccagccacattcagtttcacaggtatgacagcaaaataatggagaattgattctaaccagtaatgttgttttgtctaatggctataataacccaagagaagggtgagggagctaacagtgggtgcaagatggtgattataaagacagagtatggaatttaacctggtagtgatgaaagtgaagacacaaaggaggtgagaagctgagagagatagcggtaggatcaatgggctgcaggcactgagacagacaaagattgctggattcagtttaacgttactagggtaaaagaaaagagttggattggtggttagagagtgggatcattgaaatcactgagaggttgaaagtgacaagtctccgagcatgcacatgagcattagagtcagaggagagtggaggacaagaccacaggcagagaagaggtcaaggcactggaaggccagggatttgaaaatactattgctgtgaatgttgaaatcaccaggaactgtggcagaagtaacagtggagaaggtggccatgagccaggagctcaaactttcaaggaatgagggagaaagtagatactaggagatggataccagcagaagtggtaaggagtggcaccttctgatagcatgtgatgtaaaactggggaaatgagccttctcctcttctcttttcctaagcctactacaatctggctgctactcccattactctgttgagaataacttgaaatgatgatagcaaatccttaaaagaatgtcactggatgtactaaaaactgtgataagtgatatgatcaaagtagacatttcttccactagaattttgggaggaagcctaatggaaaccaatgcgcacagaaagacaaatgctgtatgttattagtcatatgtggactctaaaaaactcatctcatagaagtagagggtagaatactggttaccagaggctggggaagggagagacaatgggagatggagagagattggttaaagggcacaggatcacagatagataggaggaatacattcatccttgaatacttaaccctctgccctaaatctgtcagtcctacatccatacttcttatttcagtaagtagcaccaccattcatttctaatcctggggctaactcttttttttttttcttttctgaatcatgtctccttttaatggttaaggaaaacaagtttaacataaaattagcaacaacaacaacaacaacaacaaaatcaaggtttaaagtcaaaattattttaagagaaaaacccaggcaaaatagcctacctacagacaggcagtacatgtcagaaggacaggccacccccaataaaaaagataaaatattattttttctaccttttttaaacttaattatttaattatttctttcttttttcttttttttgtttcttttttttattatactttaagttttagggtacatgtgcacaacgtgcaggtttgttacatatgtatacatgtgcgacgttggtgtgctgcacccattaactcgtcctttacattaggtatatctcctaatgctatccctcccccctccccccaccccacaacaggccccggtgtgtgatgttcctcttcctgtgtccatgtgttctcattgtggaagctggaaaccatcattctcagcaaactaccgcaagggggctaactcttgattgctttcttctcaccaccaaccttaagaaaggaagtaaccaaaatccaatacatgagcaactgttcattccatctccaatatctttgttaattgtccactttatccacccagtcagggccgccatcaaacctcacttggatgtcggcaaaagctcccctgactggtcttcgcagtccattattgccctattctaatctaccttccatactatacacagatttacattttttaaatgtgtatctaattgtccctcccttttaaaaaatcttacaatggcatgacgtctcaattcagggtaaggaaattgtttcttcacattccctgtacaccgtacacatcgcctgcaattgcccttcaacacggagagcaggcatttcattagctgaccttcccacacacattcttgcaaagaggaaaagttaagcagggtgtttggaggcgagctgccatcatccaccgcctttgtctggaagcgcagggcctcacacgcgggatccatcggaagcccgagcattgtcaatctctgctgctgcacctgggtcagcaaggtgggctctgccaagcgaaactcgttagaaacaatgcaaatggggagtaaacatgacctcgcccatgaaggggaagctgtggtcaaaagcattttgtcccggaaccccgcagccctccccacactctgggcgcggagcacaatgattggtcactcctattttcgctgagcttttcctcttatttcagttttcttcgagatcaaatctggtttgtagatgtgcttggggagaatgggggcctcttctccaagaagcccggagcctgtcgggccgccggcgcccggtctccccttctgctgcggaggatccctgctggcggttgtggtgctgcttgcgctgccggtggcctggggtgagaggcgggcgggcgtggggaggcgcccgggcggacgaggaacccggggccccgcagagaactcgcgtgcagcgctgagctgcgctgctctgcgcgcccgggtccgaaggcagcgcgatgggtgggctgagcgcgcgacccggcagggcggcgggtgtaggatccttctgcgcactggagaccctcggtgcttctgggtaagcgtggagttcccaggtgcaggggcttaagtcgtgacgagcgcagtggaaggcgcagatgctgagcgggtgccgcacgaaattccttgcctttgtgtattcacagcctcggctggctatagccaagacgtggcgttgatcctagtgaaagggaacttggggatccgacaaacctgagttctggtcctagaaacttaactgtgaggcaacttagcacacctgagtctgtttgctcttctgtaaaatggggacactggtatctctgcatcgtggagttgctgcctcagtggcattaagcctgtcgagtatctaacacagggctatgtgtccccgagtccatttctatcccccaaccgttacctctgtacttagctcccaatggtgtttagacaagcagtcctagggatgcaggtgttacctgacaactgccccgcatggaactgtcctcgccccccacaccaagccaccacggccatcatcaccatgcacttaattgacagcatactttaagacagatgcatgccaggcacttgcggattagaagagcaagggaagccccagaacatgcaatgtaaccgttgcaggtagaagggacagtagatatgtttacagttcgcattttagtgatgtgtttagtacaaaataacgcctattataattattatggaaattttgaggccacatctcttcctttttcttaacttcaaataggtaaacatcttcagttagaacccttctattattatttttcggctccccagaagtcttcttggttgcctagactcactggcaacatctcatttgaagtgacagtcttggttgtttttgtccagcctattcctgacaactccgggttcgcccttctctgccactagacattttacattcattatttgagtgttccttcttctctaaaagagtaaataaaataaaataaagtagaaccaagtcccgcaagagttgttattaatatttgatctccttaggcaccagaaagtaacctgtcaggtgcagagatgtgataaaacgtacaatcttatttttaggagagaagcatgcccagtaagttaagcaatctgttgtcaacgcttaggaatttgtgtcatctttgggagtactggccctcttcttactagaatgttgttttacttagcctatgttgattaagttactgttataaacaatcccagacactattaattgcaaaaaaaaaatttactgaggttatcacaataacttccaaatgtgaaacagcctaaactaaactacctagaaattttgttgctgacataatttaaattttaaaatgctgatggatgcttccagtgtgcatggtcctttggaattttaaagaagtataagagctctgcacccaaagtgtatgcatatagaagtaggtggtggagttttatgaaatctacttattaggaagccagcgttctgctttttccagcctctgctacttaccagctggtgtcttggacccagtaagttaagtcacatcactgaccttcagtgtccacatgtataaaatgagcataactgacatcctgatctctgagagagacgttttgaaaatcagatggtgtaatgcatgtgacagtgttttgtaatctgaaaacccccatgcatgtctgaaaaaccatgactaagaagtcgtgcaagactgcaggatcaccgaaaagcgagaaatctcaactcctatgatcaggaaaggatgagtgaaaggtatatggctttactagcacttaaagagtgaatctagaaacagattgcatacgacaaaaaatagcagaggagctaggattgttttgttattatgagttactcacagtacccgtaaagtggtatagtgctatttgaaagaggacttagattagctgcaaatagatattgcaaatgtaggacaacccctgaaaaatgtgaaaaaaagaactataatttatatgttaataagtaagagagaattgcatcatataaaatgctcagttaaaacaataaagatggctggggacagtggctcatgcccataatcccagcactttgggaggctgaggtgggtggatcacctcaagtcaggagttcaagaccagcctggccaacatagtgaaaccctgtctctacaaaaacacaaaaattaccagggcatgatggtgggtgcctgtagtcccagctactcgggaggctgaggcatgagaatcgcttgaacctgggaggcggaggttgcagtgagtcgagatcgtgccattgcactccagcctgggtgacagagcgcaactccaaatcaaaaaaaaaaaaaaaaaaaaaaaaaaagaaacaaacaaacaaaacaaaaaacaataaagggcaggaaaagaatggaagacaaaaaatagaaacagagaacaagagaaaaaaagcaacaaataaaaaccagtaacaaaactaaagcaactatatcaacaatcattttgagtgtcaatgatcgaaatgcaccatttgaaacagatcatcagagtggatcaagaaacaagacccaactatatactgtgtacaacaagaccgttttaaatatagacaatatatatgaaaagtaaatggataaagatataccatgctaatgctagtcacagaaagcaggaatagctgtgttaatttcaaacacagcagacttcagaccaagaaaaattattagggataaagagggacatcatataatgataaaggggccaattatccaagaagacgtaacaatatcccatatgtatgcacctgatggagagacaaaatacgtgaggcaaaacccatagaactgcaaggagaaatagatggatttactatcatagttggagacttctatgatatctttctgatatcagaaaaggtgctgaagtctccttatcagaaatgggcagattcagcaggcagaaaatccgtaaggacatacttgaattcaacagcaccatcaatccacttgggtataattgacatatatagatgacttcatccacaacagcagagcacatattctcccgcttacattcatggggatagaccacattctgagccataaaatagtacacgaattaagctttaccaggcagtgtttaatatagggtggactctggcgccctcacgtggtcctcatataggatctggtttggttatccctgctaggttaaggtgcaagatagaagggaagttccaatttgctttctgtgctttgtggtgtattttggtttacatatgctcagatgagtggatgtgtgatttatattatctattttaatctaaaataagcttcacatttggacaggtaacatcaaaagtgtcctacacagaaatgctgggtgaagatcccagtaataaaaccaactccagaaaacaagaaaatggtagagttgacaatccctctcaccctctccgcaaagacacatgtatacacattttttgtcagaggcattaagtagaagaaatgctgtcagtctaatcacaactgatcacaactcgatgaaaccaaaaaacctagaaagtatcatgaagactgtcgaaataagctttacattcactattgtgaacagagagactcaatgtgactgttttttgtcccgttagatgttagctaatgattgtgctaagtcatgatgattaacaaagcatttaaaatatttattttatctgtgttacatttcaaaaatttatattgaggcatataatttatgttcgcgtacatatataatttataaatttatatatttgaaagggcatgctctttttttaaactgatagaggtgcctaagcaaagcaagtgcaaatctattccttaaagggtaagtatgcagaatggaaagcagagtgttctttgggttgacagctcatattgcaacagacatgaaagtgatgatgtgttaattgtgcatatagcacagaatacatcaacttgctttgaatggaatatctgaaccaggagaatgtgaaagtgggctgagtcatacaagacaaaacccgaaatgagataacaatacatacccactagaatggctaaaatgaaaaagattgaccgagccaagtgttggcgataaggtggagtaactggaattataatatactgctatttggcaggtaaaattataacattaactttagaaaatagttcaacagattcttaaaaccttagacacacactcaacattttactcttaggtttttacccaagagaaatgaaatcatatgtccacacaaagacttgtacatgaattttcatagcagttttgtttgtaatagccaacacgtggaaacaatccaaatgtccctcaacaagtaaatggataaactaaattaagatatatttatgcaattgaatattacccagcaactaaaggaaacaatttgtatacatgcagcaacctagatggatctctaattatgctgtgtgaaggctaaaccataaaaaaaaacctgagtgatttcctttatacaataggatataaatgaagtgatttaggttatatgaaattttagaaagtcaaatcaatctgtagtaagagaaaaccacctgagttatttcctttatatgataggatataaacgaagtgattcgggttatatgaaattttagaaagtcagatcaatctgtagtaagagaaaacacattgaaggttgcctagagaaggaagtggatgtttggatggattacagaagggcatgagggaactctgtgtgggtgggatgtatgatggaaacgtttattgtcttcattttggtgatggtttcacaacgcatacatatgttataagtaatcgaattgtacacttcaaatactcatcaatcattgtatgtaatatatcttgataaagctataaaaacttttaaaattatggtaggtcttcagtttgtggattttatattaatatatttgtcataggaactagtcacaattgagggattggtaataaaggagagaaaggaaactacatcaagctttctttgttgaaggctcatatattccttttttgagctattatacaactttgctttttataattacctatactattcatatactactatgcaggtaagaatattatgtaattaaggggaaggaacttctttccaagaatggttcattcaatttgctttgttactttaggtctcattccttcctctcgttgcaagctttgctgtgacatttaccctctctcaatacagcttttggcgctaggcacttcacatggaatctcttcctttgtccggcatcaatggataagacaaatatcaaaattgtatttcatcccacatatcaactagaggaaaggtgaatgcataacactgaaaataacagcaactgttttactcagtgttttttttttttacagtatcctcaaagtgctgttatctatcaaaatcagctgtgaaaatttttaaaaatagactcctgggccctaacctagacccactaaatcagagatttgggggacatagcttggattcttgatttttttgagttttataagtaattcttcattttttgttcattgcaacaaatatgcattgagttcttataattgagtgttaagcaccaggactaagtattaatttagaggtacaaaaaaacacatcatctcttgcctttaaattatgcatatctaatatctattgagagaaatagatacttctaaaagcacacaaagataaaaagcacaaattgtaataacaaacaattattgatatgaaaggaaaagcaaagtgtcggactagaaattattatagggtggggcagagggaagtagtttagattccaaatccctaagagggtcagggaaggcttcagatgagattgggtgtgttcagggtggtatggccataggcaggctggggaaggcttctataagaaagtgacattttagcagatgcctgaaggaagaattgaagtcagagtgaagataaaattgcgtcacatagaaggaatgtcatagacgggaaaaatgtgtgtctttgggaaactgaaaaaggggaaagggccacaccttggtgaggggaccaagtggcacaagatgaggcagggaacatagacaagggcttccttgcttaacaactgctggcttaataaagcaaatgtgtgatgatggatacaggctgtctgggaaaaataagtaagaaatatgagctttcttggagcatcatcctttgcttcagtagaaagcacagagttaggcttccaattctgactaaagccattgacaacagggaaaaggcaaccttaggaattctcctctctgtccggggtcccgtgggcactatgatggagctcatgagatgcagatgagaagtcccaggctgaatccggggcacattcactcaggagagctgaggtcaccagtcactgaggtcatccagtgcattcccgacagcataggctcattccaagctagttctgcaaaggagcagaaaatgaactcttggaagcaaagcaagcactcccactttagcggaataatcgaatttaactcttagaagtccccttacccttttctaagggtaataatcgtaagtataatttatgaagtgccttctgtgtatgtggcagcatatactacttttgattctccctgcaaacctggtaggaaaatattattccctttatgaagatgaaactgaggctcagcaagattaagcggtttgcctaagacctcatagccattaagtagaagacattgggttcaagattcaatctatgaacccaacatttttaatactatataccattctctttttgtattaatttcctattgctgctgtaacaaatttccacaaacttagtggcttaagacaacagaaatgtattctcttccagttctggaggccgacgtctaaaatagatccatagggctgtgttccttgtggaggctccaggggagcaggggttttcttgctctttccagcttccaggggctgcttccgtcctttggctcttggcctccttcctctaccttccaaaccagcaccatagtgtctctgaatatccttcttctgtctcctttcaccctcttgcctcccttttataaggacccttgtgatcacatttaaggtccacctagataacccaggataatctgcccatctcaagattcttaatcacatctgcaaagccctttaaccattacaggtaacaatcacaggcttcagggatcagaacatggatatctctgagaggtccttacttagcctaccacacctttccatatagattctcaaaattttagctgagcctaataagggagttcattaccattagggtccggtttagtagcaagtgcttcctttaagtgaaaaggtgaaagttgtccacttaataaggaaagaaaaacattgtatgttgaagttgctaagacctaaggtaagaaggaatcttctatcgatgaaattgtgaagaaggaaaaataaatttgtgctagttttgctgtcacacttcaaactgcaaaagttacaaccacagtgcatgctaagtgcttagctaagaggggaaaggcattaaatttgtgggcggaagaggtgaacagaaatgtgttctaattgacagctgtcaggtttggtactatctgaggttttgggtatcggctaatgtcttggaacatgtcccccaaagataagtgggtgactactgtatattcaaaataagcatttatatactggggagtaaatctcccatgttatttgtgttttatttgtcccacaaataaagtaaacaaagtagaattttaggcaagattcatttctagaggcagagatattttattataataaagaaggttgctctaccataaaatatagcaatttaaatttttataatcctaataacctcaaaatatataaaataaaagatggacaacattataaaaagaaatagacaaatgtacaataaataaaatattttaacacaactcatttagtatctagtaagacaagtactccccccaaaatcagtaaagtatctagaagatttgaataaatattaacagattggattcactgaccttgttacaagaaagaattatacatgatgataggagagaggaagccacagcacaggcacttactgattaactaaattttgaagctgtgaaatgcaccttatcctttagtgaaagatgatataaatagcttagttgccttcaaactggcagagactttttgaatggatggatgctgattttttaaaaaggagcccatttctgaggcatcttttaaagcaggggtcctcaacccctgggccatagactgatactgtccagtggcctgttaggaaatgggcagaacagtaggaggtgagcagccaagcattactgcctgagctccacctcctgtcagattagtggcagcattagattctcataggagcagaaaccctattgtgaactgtgcatatgagggatctaggttgcatgctccctatgagaatctaatgactgatgatctgagtggaacagttccatctcaaaaccatttccctgcaccctccattcacggaaaaattgtcttccacaaaaccagtcccaggtgctaaaaagggactactgttgtaaaggaataagtccctttgctattattatttttattaagatggaatcttgctctgtcacccaggctggagtgcagtggcacagtcttggctcactgcaacatctgcctcctgggttcaagcaattctcctgcctcagcctcccaagtagctgtgcacaggcatgtgtacaggcaagtgcaatcatgctctgctaactttttgtattttgggagaggcagtgtttcaccatgttggccagcctggtctcaaactcctgacctcaagtgatccacccaccttggcctctgaaagtgctgaaattacaggcatgagccaccactcctgcaccccttggctattattgaagtgttctttttcttttttgatcacatctatgaagtatattggagagaaagagaaggtagaatgggaatttcaacagggtcacggtggctcactcctgtaatcccaacactttgggaggccaaagtgggtagatgacctgaggtcaggagtcgagaccagcctggccaacatggtaaaaccccatctctactaaaaatacgaaaattagccaggtgtggtggtgggcacctgtaatcccagctactcaggaagctgaggtaaggacaattgcttgaacccaagaggcggaggttgcagtgagccaagatagcgccactgcactccagcctgggtgatggagccagtctccgtctcaaaaaagaaaaaaaaaagtatggtaatttctccattaactttgatgcttctatggtcttgatctccaggtcaatgcaatgccccagaatggcttccatttgccaggcctaccaacctaactgatgagtttgagtttcccattgggacatatctgaactatgaatgccgccctggttattccggaagaccgttttctatcatctgcctaaaaaactcagtctggactggtgctaaggacaggtgcagacgtaagtaactctggagtgggaacccccctgttagtcaaacatctgtaagatctgattcaatttgttcaaattttgtaactgagttgcatatgacaattagtttgccaaggtgcaatacatatgagaattattcttgtagatcataccttgttactgctttgagttcctggcgccttcattaaaagtttatttcatgagaaacagtcattgcaggacatgattgagggaaaacccccattcactgggggtctcccattttcatgactaaaattaagtaatgaatgacttgggacaagaaagagaagtggattaaataactaaaagatgtgacaatcttgggctttgagatctttggattatatcagttgaattgaattacagataataacgaagtttacatttttctgggaggcataatatggggatgaaacagatctgaaaggaaagttttttttgaaagggagctgatcctgaggcagtctggtgagtttcctcaaggtagcaaaatctgtggaaccatcagaactgcgtgtgttcctcagtaagctacaggcaggttgagaccttatgtactaaaaaaagtttttagtttactctacttggctccaaaattctgtttctttcctgtaggtaaatcatgtcgtaatcctccagatcctgtgaatggcatggtgcatgtgatcaaaggcatccagttcggatcccaaattaaatattcttgtactaaagggtgagttggcatctcttgaaccaacatctcttggttcaagagttctaacacagccttactaccttctagtcacatgtcagaaaggacaactaaactattaccatctgctctttaacggcttcaacacagatgtttagctcctgactgaaatgagcaaaggtatgacaagatcgggggaaaatcatctgtatccttgctggaaaccaaggcagagcatatatgaaaagtgtggcattcattgggtgggaaggaagaaaatgggggaagagtatagtcaaagcacacaaacagccttaacgcagaggggacattgctggaagaaagggaaggccattgagtaactgtgtgagagaaatcttaacggtcatagcacaagtagtttgctagggctgctgtaacagagtactccaaaacgggtggcttaacacaaatgaagtttttaaaattctgttccggaggctgaaagtgcaaaatcaaggtgttggcagagccatgctcccctctaaaacctgtaaggatggatccttctttgcttcttccagcttctggagccccaggccttccttggcgtgtggcagcagaactcccgtttctgtctctgtcctcacatggccgtcttccctctgggtctgtgtcctcacatgctgttttcctgtctgtgtatggctgtgtcgaaagtgctctcttttaataaggacaccaatcataatggattagcgcccacactaacgacctcatcttaactggattgcctctccaaagaccatatttccaaataagatcacattaataagcactggggattaagacatcaatatatttcggggtaagggggacacaattctcattcattgctggtaggaatgcaaaatggtaccatgacttggaaagataatttggcagttttttataaaactaaacatactcttaccatgttatccagcagttatccttcttggcatttatccaaaggaattgaaaactcatgttcacaccaaaaaaaaaagaaatctgcacacagatgtttataacagctttattcataattgccaaaacttggaagcaatcaagatgtcctttagcaagggaatggataaactgtggtacatccatacaatagaatattattcaataccaaaaagaaatgagctatcaagccatgaagagacatagaggaaccttaaatagtgaaccttttttcaccatcactaagtgaaagaagccaatctgaaaaggctacataacatatgattccaactatatgccattctggaaaaggcaaaactatggagacagtgaaaatatcagtggttgtcaggggttagggaagaaggggatgaatcggaagagcacagaggattttgagggtagtgaaactactctgtatgatgccataacagtaggtacatgtcataataaatttatccgaagtcatatagtgtacaataccaagagtggaccctaacataaactatggacttggggtggccatgatgtgtcagtgtaggttcctcaattgcgaaaaacgtaccaccctggtgaaagatgtttataataggggaggttatccatgtataggggcagggagtacataggaaatctctgtatcttctgttcattattgctgtgaaccaaaaactgtgctaaaacacaaagtctattttttaaaactgcatagacataaatacatgggcatatgtgcataaacagacacgcacacaaataagtgcaggtaaaacaggaaatttgaacaaaatctgtggattataactgtttcaatatcttaatgttgatgttgcactattgttttgcaaaatgttattattaggggaaaattgagtaaatagtacctgggatctctctgtactattccctgcatgtgaatctgattatctcaaagtaaaaagttttttttttttttaaagttcctactaaatttccaaggggatgggcttcccctcagatcactaccccttttcagggagcaataaagtaatcttccttggaatgtagcaatctgtaaccaatcaaaatgctgtaactatgcatggtcccatatggaaaatataatcctgctaaaatttctctgtctctgcctatgtaagtgataccttatgtcctccactttggagtgctgaccccattcatttggagttggtctcttccaggtggctacccttaacctttgtgctcaaataaactctatccttaaatatattttctgaatctcattatttaaggttgaaaatgtgctaacctaaataattcacaggatttgttttttattctcattttttcctaacctatccacctggttcaaggcacatagattaagaaggaaaatggaaatgggactaatatcccaggcttcactgtccctcttcgggccctggggaggagactcccaaaagtctagacatgttcacccacatcctgtatgtggtttctggaaacgaaatgatcatggcttttcctgaaccatggcttaactttgtgaatccacaactctctcttccccaggagatccaaaaaggtagggtaggatgtaaaggcttcaatctgttcaagtggatatgagactccctggctccccttacaataagtagcatggattttgtctctctgccttacttcctccaaacattctgaatgagaagtgttcaaaccactatttgttcaattgcttaatctactttgggacacaagtttaataaattaaaatattcttctatctgttccccttgatcagtgaacataaagttatcttttgactcatatttaaaatgttcagtattacaacactgaacaatagtatggaggaaaaaaaatgccaacttaagtttgaacttgcttcaccattcctatcccaacccccatgattagaaaatcaaaaagaacactttgagaaataacctcagtggggtcaaaagccagaggagcctccaggatcccttgttcctaagacaaacaggcaggaggaggtgcacatataggattgcagctgttcttcacttcatttgttcacatacttcatacttgtgtttatgtctgttggcagtgcaatagaaaatgatttcatttttggtggtatactagaaggcattaaaaaacaaaataaggccgggtgtgctggctgtaatcccagcactttgggaggctgaggtgggtggattacctgaagtcaggaattcaagaccagcctggtcaatgtggtgaagcctgtttctactaaaaatgcaaaaatcagccgagtgtggtggcaggcacctgtagtcccagcagctaaggaggctgaggcaggagaatctcttgaatccgggaggtggaggttgcagtgagccaagatcgcaccattgcactccagccttggcgacaagagtgaaaatctgtctcaaaaaaaaagaacaacaacaacagcaacaacaaaaatcccaaatgatattgaagtcattaataattacatcataatcactagtataatgtaatagtgcatcaagtatcttcaaaagcacccactgttctctcactatttatttgatcttcatttgtcactgttttgttgtttgaataaagctttatgttgccaggttttcttacatactcataaagcaaagttctcagctataccaataaccatgactgttatttgacattgcttcattccttcatgtatagtactatcaagtttgaccctaccctcactatgactagtttcacccaaccatctatcacaacagagagtctaacgtgaagtaaaataaatgtcataaattattccaaatttatggcacactgtgaacagtttgagacatactaattgagaattgctgactttagtattttaagtataaaatgagtgttcaattctttttgatcagcctggatttcctttggttctagttatgtatccccttccttccttccttccttccttccttccttccttccttccttccttccttccttccttcctccctcccttccttcctttccttctttccttctttgctttctttctttcctttttactttctttttttttttttgatacaaggtcttgctttgttgcccaggctggagtgcagtggcatgatcagcactcactgcagcctcaacctccctgactcaagcgatcttcatgcctcagcctcctgagtagctaggactacaggaatgtgccaccacgcctggcttttttataaattttttgtacagacagcgtctcactatattgcccaggctggtctcgaactcctgagctcaagcaatcctcttgcctcagccccccaaagtgctggaattacaggggtgagccactgtgaagggcctaatttggccttctttaatgaatcttattgataaaagcccatccatgcatccgtgcatccatacttttaaggcaaagaaatacatacaacaggactgtatacacacatatacatgtatatatatgacagcttccctgcactcaagaactttgtgctatcttttaaaaaatgaaatttataggaaaaactacaattcatcttagatttgcataaaaaagtgtcataaggtaataaagaagagaaagctcatccaattgagaatgtatgaaaaagaaagtcaaaaagtcccaagaagaatgtgaaacttgggaaagtgatagatagtcctttgatgagtgtaaaaagtccctctgaatcctataagagtgtaatctctggaagtagtaatttaattgggtagttgacctgtgtctttagaatgtaacattccttattttttgcctctagataccgactcattggttcctcgtctgccacatgcatcatctcaggtgatactgtcatttgggataatgaaacacctatttgtgacagtgagttgaaatatcccttcctatttcttttaccgacacattctaatttttctctggaataataaaaatcttaactgaattccttctgtgcaatctgtccttcacacggctgaagactgcggtaatgttctcgaatattcctatggggttcctggcaactctttctttaagttcttccttatcctgggatgtgtcttttctaattccagaagtttaaatacataaaagccttcaaacttgattttacttcaataaacgtgaaattatgttgtttctaccacctccagtataataatcatcttgcttggcaaatcagtaaagatttttaaaattgatactcttcaaggttagcgaagctgtggaagaacctggactctcatgtaccacgagatcaacacatcctcttgaaaggccccatgcactataaacctcagaagtgaacatatattttaacctacttcttaaaatttatacttaggaaataatcacacactttttaaagtagtttggtataaactattcattgcagcattatttatattagttaaaatgttagagtaacctaaatattttaaactatggtttggaaataatctactagtaggaaaaagatgtgttcaaatgaccattataaagaattccctaagaaacataaaacagctatgcagaatgaaaataagtatatccatacactggcatggtattcagccataaaaaatgacagcataaagaagcacttaatgactagaaagagatgtattttacgtggaaaaagaatcagatgaacggcatatatggcaagatctcactttattaaaaaataatacacctatgtagtgagggccaggctgaggctgagagaaatacagtgtataacatctttgtcttactcttctctttggataactggactcctttacttttcttcttggtatttaaaaatgttacttttactagaaagtttacgagcttcagaatctaagtttacaaatgacattggtcacacatttattgctgtttatccactttaagaaacagttttgctattttgtaaaacaaattgggaaaccttccatcttatttgaaatctgtaataaacatggaattggaataggaattttcctggaaatatgaaaaagattagtaaaatagagaaaacaaaaaatataataatacacctatacnnnnnnnnnnnnnnnnnnnnnnnnnnnnnnnnnnnnnnnnnnnnnnnnnnnnnnnnnnnnnnnnnnnnnnnnnnnnnnnnnnnnnnnnnnnnnnnnnnnnnnnnnnnnnnnnnnnnnnnnnnnnnnnnnnnnnnnnnnnnnnnnnnnnnnnnnnnnnnnnnnnnnnnnnnnnnnnnnnnnnnnnnnnnnnnnnntccctccctccctccctccctcccttccttccttccttccttccttccttccttccttccttccttccttccctctttccttattttctttcttctttaccacgctggctaggaccaccagtataacattgaacattggtagcaatagatgtcatccttgtcttgttccacatctcaaagttaaagtttaaaacatttcaccattaagctggtgtttactgtaggcttttggtagataaccatttttgaaataaggaaattatcttatatattcttcattgctaaaaaatttatgtctttgaatcatgttgaagtttatcaaacactttagttacatatattgatgtaatcatatctgtttctctttttctgttaatgcaacaaattgttttgagtacatttttgaaaggcaaatgattttaaatttcaattttacattcttaaaataaatcaactcagtcataatatttaatcatttttatatatggcaaatatgcttttatgatatattttagatgtttctattaaaatataattcatgtatcataaaagttacctttttaaattatacaatttagtggtgtttagtatattcacaaagttgtgtgttatggtctgaacgtttgagtccaccccaaatccatatgttgaaatccttacccctaaagtgatgacattaggaagtgaggcctttgaaagatgattagggcatgagagcagagccatcacgaatgggattagcgtcctaataaaagaggcccggaagagctcctttggccctcccaccatgggaggagatgctgaatctgccagtgttggtcttgaactccccagcctccaaaactacaagaaataaatttctgttgtgtacaagctaaccagtttatagtattttgttatagcagcccaaatagactaagacattgggcaaccagcaccgccaattaattctagaacactttcatcatcccattcctaacatattttagagataagactataattttctttcttgtaatgtccttaataagattttgatatcaaagctatgacagtcttataaagccagctggtagtgtttcatatatttgtttccttgtaagggtttatataagattggcattatttcttctttaaaaataattcaccagaaaaggtatgtggcctggagtttacgttcttgggaagtttttttttttccaaccattttcctgtaccatgtagacttttggctgaagtataacatatatatatatatacacacacacacacacacacacacacacacacatatatacatatatacttatatgtatatatgtatatatacgtatatacgtatgcatacgtgtatgtatatgtgtatatatgtacgtatatatacatacgtacgtatatatacgtgtatacgtatatatacatatacatatataggtatatacttatatatacgtatatatacatatacatatataggtatatacgtatacgtatacatatataggtatatgtatacatatatacacactatatatatatacacatatatatagtgtgtatatatgcacacatcttaatcatgcagttcaatggagttttacaaagtaaatgtatccatgtaaacgtcactcagattaagatatagaacattatcagcaccccagaagccttcccgatgccctttcccagttatcttcccaaagaaaccactattctgatttataacactaatagttttgttgcttcctaaattttatattaaaggaatcaaaaaatagatactcttttgtgtccagcttcatctcaatgttatatttggaagagtcatttttgtttttgcaggaaggattgttgggtcttctttattattatgttgtatttcattgatgatcttgagtaccttttcacgtttgtgaagtgctattccaaacttttgcctattatttattagtttgtctattgttttgtagaagttctttaaatattctcatgttttctaataaatgtaacacaaatattgtctttcaggctgtggcttttcttttttccttcttaatgatgtcttttgtttatgaaagttctacattttaataatattcaatttatgagtcttcttttttccagttactgctttttctattctacttaagcaattgggccaagtgaggtggctcatgtctataatcccagcattttggaaggccaaggcaggaggattgcttgaagccaggagttcaagaccagcctgggcagcagagtgagaccctgtctctacaaaaaaaataaatatataaaattagctgggctcagtggcacatgcctgtagtcccagctacttgggaggctgaggtgggaggatcccttgagcacagaggttcaaggcttcagtgagttatgatggtgccactgcactccagcctaggtgacaaagccctgtttcttatggatgggcaatagatctaatatcatctattaaaaagactattccttgcatagtgcaatgcgacaccaccatgaccataagtcaggtgaccttatgagtggatctcattccagagaggttctgtttcactggtttatttgccatactataagcactacattaagattttaattactatagcattacattaagatttgatatctggtagcatatatctcctaactatgtgcatcttcaagatttacttggtgattcttggccctttgcattaccatataaaatttagaatcagcttgtcaatttccacataaagaatcctacttgaatttgtattaagtttctgttgactcagtagatcaatttgtggacaagtaacaaatttacagttttgaagtttaaatttatgaatatgatatatcctcccattttgaagtcttctttaatttcttttaataatatttgttaatgtacattatagaagtcatgtacctatttcattatctttattctgacatattatttttaaaatttcattctttaattatttacttcttagatatgcacctgtttcatctcagctccagcaaatttgttaaatttacttataaattgaatagtttatctgtagattcttttgaatttgctgtgtaattatgtcatctatgaatctgacaaagtttttacatcttttcctttcttatgtcttttgtttatttctcttgctttattgcattggctagaacctccagtacaatattgaatagaagacatgatacaaggcttttaatagtcctcataaatcatgatgtatgctgtagatttttgcatgatatcctttattagattaaggaaactcccctttctttctaattactaaaagatttatgaatgttctttctaattgatcactgcatgtattgagattatcatgtttctttttcactctgttaatgtaatatattacattgattgatgtttaaaagacaaacgctgaattcctagaataaacctatgttgcttgtgatgtgttatagatgattatcctatgtatgggggatatgcgtgtgtgtgtgtgcaggattgctcatatttttattgtaacattgtaacattgatttaatatttaaaatcagtcaaggtaaacctcactttgatcattgtatcatcctttggaaatattgctggattcagtttcataatattttgttcagaaaatttgcatttatattctcaagagatcttgggttataatttgcttttattttaatgtccttatcaggtttgggcatcaagattatgttggcctcataaaatgtgttaaaaattatttattttttctagtgtctggaacaatttgtgtaacattatttttccttatatgtttggaagaattcagcagtgaagcaatctggacctgagggtttgttgttgttgttgtcaggatttaatatctttaatagctgtaaaactattattttatatcttattgaattagtttgggtaagttatatttttcaaggaatttactcattttatttagatttcctaggttatcagcataatgctgtttattatagtctcatattagcctttggatgcctgtaagttctgtagtgatacccttacactcattaatttctgatattggtaatttcttttgcttctttttccttgattagttttaccggggctttatcaattttactaagcttttcagaaaaacaacttttaactttcttgttttttctttagtttatgactattttctcttttattgatttctgctttaagctttgtgtattcctccagtcctaaattcttgatactaattaatttgtttccaacctttatttttctaatatgtacatttaacctatcaatttttctctaaaactgttttatttatttccaacaatctttatatttttattatcattgtacataaaagctttctaatttcacttttaatatctcctctgacccataggctgtttagaagggcattgcttaatttctaaatatttagagatcttctagttatcattctttcattaatttaatcatttgagacatggtttattgcccagaatatggacgattttggtaaaatgttacatatgcacttgaatgtacagttattttgcttcattttctagaaatgtcatttaggaaaatgtggtttagaacagtctttttttccccctccacttgttctctcagttatggagaagcnnnnnnnnnnnnnnnnnnnnnnnnnnnnnnnnnnnnnnnnnnnnnnnnnnnnnnnnnnnnnnnnnnnnnnnnnnnnnnnnnnnnnnnnnnnnnnnnnnnnnnnnnnnnnnnnnnnnnnnnnnnnnnnnnnnnnnnnnnnnnnnnnnnnnnnnnnnnnnnnnnnnnnnnnnnnnnnnnnnnnnnnnnnnnnnnnnnnnnnnnnnnnnnnnnnnnnnnnnnnnnnnnnnnnnnnnnnnnnnnnnnnnnnnnnnnnnnnnnnnnnnnnnnnnnnnnnnnnnnnnnnnnnnnnnnnnnnnnnnnnnnnnnnnnnnnnnnnnnnnnnnnnnnnnnnnnnnnnnnnnnnnnnnnnnnnnnnnnnnnnnnnnnnnnnnnnnnnnnnnnnnnnnnnnnnnnnnnnnnnnnnnnnnnnnnnnnnnnnnnnnnnnnnnnnnnnnnnnnnnnnnnnnnnnnnnnnnnnnnnnnnnnnnnnnnnnnnnnnnnnnnnnnnnnnnnnnnnnnnnnnnnnnnnnnnnnnnnnnnnnnnnnnnnnnnnnnnnnnnnnnnnnnnnnnnnnnnnnnnnnnnnnnnnnnnnnnnnnnnnnnnnnnnnnnnnnnnnnnnnnnnnnnnnnnnnnnnnnnnnnnnnnnnnnnnnnnnnnnnnnnnnnnnnnnnnnnnnnnnnnnnnnnnnnnnnnnnnnnnnnnnnnnnnnnnnnnnnnnnnnnnnnnnnnnnnnnnnnnnnnnnnnnnnnnnnnnnnnnnnnnnnnnnnnnnnnnnnnnnnnnnnnnnnnnnnnnnnnnnnnnnnnnnnnnnnnnnnnnnnnnnnnnnnnnnnnnnnnnnnnnnnnnnnnnnnnnnnnnnnnnnnnnnnnnnnnnnnnnnnnnnnnnnnnnnnnnnnnnnnnnnnnnnnnnnnnnnnnnnnnnnnnnnnnnnnnnnnnnnnnnnnnnnnnnnnnnnnnnnnnnnnnnnnnnnnnnnnnnnnnnnnnnnnnnnnnnnnnnnnnnnnnnnnnnnnnnnnnnnnnnnnnnnnnnnnnnnnnnnnnnnnnnnnnnnnnnnnnnnnnnnnnnnnnnnnnnnnnnnnnnnnnnnnnnnnnnnnnnnnnnnnnnnnnnnnnnnnnnnnnnnnnnnnnnnnnnnnnnnnnnnnnnnnnnnnnnnnnnnnnnnnnnnnnnnnnnnnnnnnnnnnnnnnnnnnnnnnnnnnnnnnnnnnnnnnnnnnnnnnnnnnnnnnnnnnnnnnnnnnnnnnnnnnnnnnnnnnnnnnnnnnnnnnnnnnnnnnnnnnnnnnnnnnnnnnnnnnnnnnnnnnnnnnnnnnnnnnnnnnnnnnnnnnnnnnnnnnnnnnnnnnnnnnnnnnnnnnnnnnnnnnnnnnnnnnnnnnnnnnnnnnnnnnnnnnnnnnnnnnnnnnnnnnnnnnnnnnnnnnnnnnnnnnnnnnnnnnnnnnnnnnnnnnnnnnnnnnnnnnnnnnnnnnnnnnnnnnnnnnnnnnnnnnnnnnnnnnnnnnnnnnnnnnnnnnnnnnnnnnnnnnnnnnnnnnnnnnnnnnnnnnnnnnnnnnnnnnnnnnnnnnnnnnnnnnnnnnnnnnnnnnnnnnnnnnnnnnnnnnnnnnnnnnnnnnnnnnnnnnnnnnnnnnnnnnnnnnnnnnnnnnnnnnnnnnnnnnnnnnnnnnnnnnnnnnnnnnnnnnnnnnnnnnnnnnnnnnnnnnnnnnnnnnnnnnnnnnnnnnnnnnnnnnnnnnnnnnnnnnnnnnnnnnnnnnnnnnnnnnnnnnnnnnnnnnnnnnnnnnnnnnnnnnnnnnnnnnnnnnnnnnnnnnnnnnnnnnnnnnnnnnnnnnnnnnnnnnnnnnnnnnnnnnnnnnnnnnnnnnnnnnnnnnnnnnnnnnnnnnnnnnnnnnnnnnnnnnnnnnnnnnnnnnnnnnnnnnnnnnnnnnnnnnnnnnnnnnnnnnnnnnnnnnnnnnnnnnnnnnnnnnnnnnnnnnnnnnnnnnnnnnnnnnnnnnnnnnnnnnnnnnnnnnnnnnnnnnnnnnnnnnnnnnnnnnnnnnnnnnnnnnnnnnnnnnnnnnnnnnnnnnnnnnnnnnnnnnnnnnnnnnnnnnnnnnnnnnnnnnnnnnnnnnnnnnnnnnnnnnnnnnnnnnnnnnnnnnnnnnnnnnnnnnnnnnnnnnnnnnnnnnnnnnnnnnnnnnnnnnnnnnnnnnnnnnnnnnnnnnnnnnnnnnnnnnnnnnnnnnnnnnnnnnnnnnnnnnnnnnnnnnnnnnnnnnnnnnnnnnnnnnnnnnnnnnnnnnnnnnnnnnnnnnnnnnnnnnnnnnnnnnnnnnnnnnnnnnnnnnnnnnnnnnnnnnnnnnnnnnnnnnnnnnnnnnnnnnnnnnnnnnnnnnnnnnnnnnnnnnnnnnnnnnnnnnnnnnnnnnnnnnnnnnnnnnnnnnnnnnnnnnnnnnnnnnnnnnnnnnnnnnnnnnnnnnnnnnnnnnnnnnnnnnnnnnnnnnnnnnnnnnnnnnnnnnnnnnnnnnnnnnnnnnnnnnnnnnnnnnnnnnnnnnnnnnnnnnnnnnnnnnnnnnnnnnnnnnnnnnnnnnnnnnnnnnnnnnnnnnnnnnnnnnnnnnnnnnnnnnnnnnnnnnnnnnnnnnnnnnnnnnnnnnnnnnnnnnnnnnnnnnnnnnnnnnnnnnnnnnnnnnnnnnnnnnnnnnnnnnnnnnnnnnnnnnnnnnnnnnnnnnnnnnnnnnnnnnnnnnnnnnnnnnnnnnnnnnnnnnnnnnnnnnnnnnnnnnnnnnnnnnnnnnnnnnnnnnnnnnnnnnnnnnnnnnnnnnnnnnnnnnnnnnnnnnnnnnnnnnnnnnnnnnnnnnnnnnnnnnnnnnnnnnnnnnnnnnnnnnnnnnnnnnnnnnnnnnnnnnnnnnnnnnnnnnnnnnnnnnnnnnnnnnnnnnnnnnnnnnnnnnnnnnnnnnnnnnnnnnnnnnnnnnnnnnnnnnnnnnnnnnnnnnnnnnnnnnnnnnnnnnnnnnnnnnnnnnnnnnnnnnnnnnnnnnnnnnnnnnnnnnnnnnnnnnnnnnnnnnnnnnnnnnnnnnnnnnnnnnnnnnnnnnnnnnnnnnnnnnnnnnnnnnnnnnnnnnnnnnnnnnnnnnnnnnnnnnnnnnnnnnnnnnnnnnnnnnnnnnnnnnnnnnnnnnnnnnnnnnnnnnnnnnnnnnnnnnnnnnnnnnnnnnnnnnnnnnnnnnnnnnnnnnnnnnnnnnnnnnnnnnnnnnnnnnnnnnnnnnnnnnnnnnnnnnnnnnnnnnnnnnnnnnnnnnnnnnnnnnnnnnnnnnnnnnnnnnnnnnnnnnnnnnnnnnnnnnnnnnnnnnnnnnnnnnnnnnnnnnnnnnnnnnnnnnnnnnnnnnnnnnnnnnnnnnnnnnnnnnnnnnnnnnnnnnnnnnnnnnnnnnnnnnnnnnnnnnnnnnnnnnnnnnnnnnnnnnnnnnnnnnnnnnnnnnnnnnnnnnnnnnnnnnnnnnnnnnnnnnnnnnnnnnnnnnnnnnnnnnnnnnnnnnnnnnnnnnnnnnnnnnnnnnnnnnnnnnnnnnnnnnnnnnnnnnnnnnnnnnnnnnnnnnnnnnnnnnnnnnnnnnnnnnnnnnnnnnnnnnnnnnnnnnnnnnnnnnnnnnnnnnnnnnnnnnnnnnnnnnnnnnnnnnnnnnnnnnnnnnnnnnnnnnnnnnnnnnnnnnnnnnnnnnnnnnnnnnnnnnnnnnnnnnnnnnnnnnnnnnnnnnnnnnnnnnnnnnnnnnnnnnnnnnnnnnnnnnnnnnnnnnnnnnnnnnnnnnnnnnnnnnnnnnnnnnnnnnnnnnnnnnnnnnnnnnnnnnnnnnnnnnnnnnnnnnnnnnnnnnnnnnnnnnnnnnnnnnnnnnnnnnnnnnnnnnnnnnnnnnnnnnnnnnnnnnnnnnnnnnnnnnnnnnnnnnnnnnnnnnnnnnnnnnnnnnnnnnnnnnnnnnnnnnnnnnnnnnnnnnnnnnnnnnnnnnnnnnnnnnnnnnnnnnnnnnnnnnnnnnnnnnnnnnnnnnnnnnnnnnnnnnnnnnnnnnnnnnnnnnnnnnnnnnnnnnnnnnnnnnnnnnnnnnnnnnnnnnnnnnnnnnnnnnnnnnnnnnnnnnnnnnnnnnnnnnnnnnnnnnnnnnnnnnnnnnnnnnnnnnnnnnnnnnnnnnnnnnnnnnnnnnnnnnnnnnnnnnnnnnnnnnnnnnnnnnnnnnnnnnnnnnnnnnnnnnnnnnnnnnnnnnnnnnnnnnnnnnnnnnnnnnnnnnnnnnnnnnnnnnnnnnnnnnnnnnnnnnnnnnnnnnnnnnnnnnnnnnnnnnnnnnnnnnnnnnnnnnnnnnnnnnnnnnnnnnnnnnnnnnnnnnnnnnnnnnnnnnnnnnnnnnnnnnnnnnnnnnnnnnnnnnnnnnnnnnnnnnnnnnnnnnnnnnnnnnnnnnnnnnnnnnnnnnnnnnnnnnnnnnnnnnnnnnnnnnnnnnnnnnnnnnnnnnnnnnnnnnnnnnnnnnnnnnnnnnnnnnnnnnnnnnnnnnnnnnnnnnnnnnnnnnnnnnnnnnnnnnnnnnnnnnnnnnnnnnnnnnnnnnnnnnnnnnnnnnnnnnnnnnnnnnnnnnnnnnnnnnnnnnnnnnnnnnnnnnnnnnnnnnnnnnnnnnnnnnnnnnnnnnnnnnnnnnnnnnnnnnnnnnnnnnnnnnnnnnnnnnnnnnnnnnnnnnnnnnnnnnnnnnnnnnnnnnnnnnnnnnnnnnnnnnnnnnnnnnnnnnnnnnnnnnnnnnnnnnnnnnnnnnnnnnnnnnnnnnnnnnnnnnnnnnnnnnnnnnnnnnnnnnnnnnnnnnnnnnnnnnnnnnnnnnnnnnnnnnnnnnnnnnnnnnnnnnnnnnnnnnnnnnnnnnnnnnnnnnnnnnnnnnnnnnnnnnnnnnnnnnnnnnnnnnnnnnnnnnnnnnnnnnnnnnnnnnnnnnnnnnnnnnnnnnnnnnnnnnnnnnnnnnnnnnnnnnnnnnnnnnnnnnnnnnnnnnnnnnnnnnnnnnnnnnnnnnnnnnnnnnnnnnnnnnnnnnnnnnnnnnnnnnnnnnnnnnnnnnnnnnnnnnnnnnnnnnnnnnnnnnnnnnnnnnnnnnnnnnnnnnnnnnnnnnnnnnnnnnnnnnnnnnnnnnnnnnnnnnnnnnnnnnnnnnnnnnnnnnnnnnnnnnnnnnnnnnnnnnnnnnnnnnnnnnnnnnnnnnnnnnnnnnnnnnnnnnnnnnnnnnnnnnnnnnnnnnnnnnnnnnnnnnnnnnnnnnnnnnnnnnnnnnnnnnnnnnnnnnnnnnnnnnnnnnnnnnnnnnnnnnnnnnnnnnnnnnnnnnnnnnnnnnnnnnnnnnnnnnnnnnnnnnnnnnnnnnnnnnnnnnnnnnnnnnnnnnnnnnnnnnnnnnnnnnnnnnnnnnnnnnnnnnnnnnnnnnnnnnnnnnnnnnnnnnnnnnnnnnnnnnnnnnnnnnnnnnnnnnnnnnnnnnnnnnnnnnnnnnnnnnnnnnnnnnnnnnnnnnnnnnnnnnnnnnnnnnnnnnnnnnnnnnnnnnnnnnnnnnnnnnnnnnnnnnnnnnnnnnnnnnnnnnnnnnnnnnnnnnnnnnnnnnnnnnnnnnnnnnnnnnnnnnnnnnnnnnnnnnnnnnnnnnnnnnnnnnnnnnnnnnnnnnnnnnnnnnnnnnnnnnnnnnnnnnnnnnnnnnnnnnnnnnnnnnnnnnnnnnnnnnnnnnnnnnnnnnnnnnnnnnnnnnnnnnnnnnnnnnnnnnnnnnnnnnnnnnnnnnnnnnnnnnnnnnnnnnnnnnnnnnnnnnnnnnnnnnnnnnnnnnnnnnnnnnnnnnnnnnnnnnnnnnnnnnnnnnnnnnnnnnnnnnnnnnnnnnnnnnnnnnnnnnnnnnnnnnnnnnnnnnnnnnnnnnnnnnnnnnnnnnnnnnnnnnnnnnnnnnnnnnnnnnnnnnnnnnnnnnnnnnnnnnnnnnnnnnnnnnnnnnnnnnnnnnnnnnnnnnnnnnnnnnnnnnnnnnnnnnnnnnnnnnnnnnnnnnnnnnnnnnnnnnnnnnnnnnnnnnnnnnnnnnnnnnnnnnnnnnnnnnnnnnnnnnnnnnnnnnnnnnnnnnnnnnnnnnnnnnnnnnnnnnnnnnnnnnnnnnnnnnnnnnnnnnnnnnnnnnnnnnnnnnnnnnnnnnnnnnnnnnnnnnnnnnnnnnnnnnnnnnnnnnnnnnnnnnnnnnnnnnnnnnnnnnnnnnnnnnnnnnnnnnnnnnnnnnnnnnnnnnnnnnnnnnnnnnnnnnnnnnnnnnnnnnnnnnnnnnnnnnnnnnnnnnnnnnnnnnnnnnnnnnnnnnnnnnnnnnnnnnnnnnnnnnnnnnnnnnnnnnnnnnnnnnnnnnnnnnnnnnnnnnnnnnnnnnnnnnnnnnnnnnnnnnnnnnnnnnnnnnnnnnnnnnnnnnnnnnnnnnnnnnnnnnnnnnnnnnnnnnnnnnnnnnnnnnnnnnnnnnnnnnnnnnnnnnnnnnnnnnnnnnnnnnnnnnnnnnnnnnnnnnnnnnnnnnnnnnnnnnnnnnnnnnnnnnnnnnnnnnnnnnnnnnnnnnnnnnnnnnnnnnnnnnnnnnnnnnnnnnnnnnnnnnnnnnnnnnnnnnnnnnnnnnnnnnnnnnnnnnnnnnnnnnnnnnnnnnnnnnnnnnnnnnnnnnnnnnnnnnnnnnnnnnnnnnnnnnnnnnnnnnnnnnnnnnnnnnnnnnnnnnnnnnnnnnnnnnnnnnnnnnnnnnnnnnnnnnnnnnnnnnnnnnnnnnnnnnnnnnnnnnnnnnnnnnnnnnnnnnnnnnnnnnnnnnnnnnnnnnnnnnnnnnnnnnnnnnnnnnnnnnnnnnnnnnnnnnnnnnnnnnnnnnnnnnnnnnnnnnnnnnnnnnnnnnnnnnnnnnnnnnnnnnnnnnnnnnnnnnnnnnnnnnnnnnnnnnnnnnnnnnnnnnnnnnnnnnnnnnnnnnnnnnnnnnnnnnnnnnnnnnnnnnnnnnnnnnnnnnnnnnnnnnnnnnnnnnnnnnnnnnnnnnnnnnnnnnnnnnnnnnnnnnnnnnnnnnnnnnnnnnnnnnnnnnnnnnnnnnnnnnnnnnnnnnnnnnnnnnnnnnnnnnnnnnnnnnnnnnnnnnnnnnnnnnnnnnnnnnnnnnnnnnnnnnnnnnnnnnnnnnnnnnnnnnnnnnnnnnnnnnnnnnnnnnnnnnnnnnnnnnnnnnnnnnnnnnnnnnnnnnnnnnnnnnnnnnnnnnnnnnnnnnnnnnnnnnnnnnnnnnnnnnnnnnnnnnnnnnnnnnnnnnnnnnnnnnnnnnnnnnnnnnnnnnnnnnnnnnnnnnnnnnnnnnnnnnnnnnnnnnnnnnnnnnnnnnnnnnnnnnnnnnnnnnnnnnnnnnnnnnnnnnnnnnnnnnnnnnnnnnnnnnnnnnnnnnnnnnnnnnnnnnnnnnnnnnnnnnnnnnnnnnnnnnnnnnnnnnnnnnnnnnnnnnnnnnnnnnnnnnnnnnnnnnnnnnnnnnnnnnnnnnnnnnnnnnnnnnnnnnnnnnnnnnnnnnnnnnnnnnnnnnnnnnnnnnnnnnnnnnnnnnnnnnnnnnnnnnnnnnnnnnnnnnnnnnnnnnnnnnnnnnnnnnnnnnnnnnnnnnnnnnnnnnnnnnnnnnnnnnnnnnnnnnnnnnnnnnnnnnnnnnnnnnnnnnnnnnnnnnnnnnnnnnnnnnnnnnnnnnnnnnnnnnnnnnnnnnnnnnnnnnnnnnnnnnnnnnnnnnnnnnnnnnnnnnnnnnnnnnnnnnnnnnnnnnnnnnnnnnnnnnnnnnnnnnnnnnnnnnnnnnnnnnnnnnnnnnnnnnnnnnnnnnnnnnnnnnnnnnnnnnnnnnnnnnnnnnnnnnnnnnnnnnnnnnnnnnnnnnnnnnnnnnnnnnnnnnnnnnnnnnnnnnnnnnnnnnnnnnnnnnnnnnnnnnnnnnnnnnnnnnnnnnnnnnnnnnnnnnnnnnnnnnnnnnnnnnnnnnnnnnnnnnnnnnnnnnnnnnnnnnnnnnnnnnnnnnnnnnnnnnnnnnnnnnnnnnnnnnnnnnnnnnnnnnnnnnnnnnnnnnnnnnnnnnnnnnnnnnnnnnnnnnnnnnnnnnnnnnnnnnnnnnnnnnnnnnnnnnnnnnnnnnnnnnnnnnnnnnnnnnnnnnnnnnnnnnnnnnnnnnnnnnnnnnnnnnnnnnnnnnnnnnnnnnnnnnnnnnnnnnnnnnnnnnnnnnnnnnnnnnnnnnnnnnnnnnnnnnnnnnnnnnnnnnnnnnnnnnnnnnnnnnnnnnnnnnnnnnnnnnnnnnnnnnnnnnnnnnnnnnnnnnnnnnnnnnnnnnnnnnnnnnnnnnnnnnnnnnnnnnnnnnnnnnnnnnnnnnnnnnnnnnnnnnnnnnnnnnnnnnnnnnnnnnnnnnnnnnnnnnnnnnnnnnnnnnnnnnnnnnnnnnnnnnnnnnnnnnnnnnnnnnnnnnnnnnnnnnnnnnnnnnnnnnnnnnnnnnnnnnnnnnnnnnnnnnnnnnnnnnnnnnnnnnnnnnnnnnnnnnnnnnnnnnnnnnnnnnnnnnnnnnnnnnnnnnnnnnnnnnnnnnnnnnnnnnnnnnnnnnnnnnnnnnnnnnnnnnnnnnnnnnnnnnnnnnnnnnnnnnnnnnnnnnnnnnnnnnnnnnnnnnnnnnnnnnnnnnnnnnnnnnnnnnnnnnnnnnnnnnnnnnnnnnnnnnnnnnnnnnnnnnnnnnnnnnnnnnnnnnnnnnnnnnnnnnnnnnnnnnnnnnnnnnnnnnnnnnnnnnnnnnnnnnnnnnnnnnnnnnnnnnnnnnnnnnnnnnnnnnnnnnnnnnnnnnnnnnnnnnnnnnnnnnnnnnnnnnnnnnnnnnnnnnnnnnnnnnnnnnnnnnnnnnnnnnnnnnnnnnnnnnnnnnnnnnnnnnnnnnnnnnnnnnnnnnnnnnnnnnnnnnnnnnnnnnnnnnnnnnnnnnnnnnnnnnnnnnnnnnnnnnnnnnnnnnnnnnnnnnnnnnnnnnnnnnnnnnnnnnnnnnnnnnnnnnnnnnnnnnnnnnnnnnnnnnnnnnnnnnnnnnnnnnnnnnnnnnnnnnnnnnnnnnnnnnnnnnnnnnnnnnnnnnnnnnnnnnnnnnnnnnnnnnnnnnnnnnnnnnnnnnnnnnnnnnnnnnnnnnnnnnnnnnnnnnnnnnnnnnnnnnnnnnnnnnnnnnnnnnnnnnnnnnnnnnnnnnnnnnnnnnnnnnnnnnnnnnnnnnnnnnnnnnnnnnnnnnnnnnnnnnnnnnnnnnnnnnnnnnnnnnnnnnnnnnnnnnnnnnnnnnnnnnnnnnnnnnnnnnnnnnnnnnnnnnnnnnnnnnnnnnnnnnnnnnnnnnnnnnnnnnnnnnnnnnnnnnnnnnnnnnnnnnnnnnnnnnnnnnnnnnnnnnnnnnnnnnnnnnnnnnnnnnnnnnnnnnnnnnnnnnnnnnnnnnnnnnnnnnnnnnnnnnnnnnnnnnnnnnnnnnnnnnnnnnnnnnnnnnnnnnnnnnnnnnnnnnnnnnnnnnnnnnnnnnnnnnnnnnnnnnnnnnnnnnnnnnnnnnnnnnnnnnnnnnnnnnnnnnnnnnnnnnnnnnnnnnnnnnnnnnnnnnnnnnnnnnnnnnnnnnnnnnnnnnnnnnnnnnnnnnnnnnnnnnnnnnnnnnnnnnnnnnnnnnnnnnnnnnnnnnnnnnnnnnnnnnnnnnnnnnnnnnnnnnnnnnnnnnnnnnnnnnnnnnnnnnnnnnnnnnnnnnnnnnnnnnnnnnnnnnnnnnnnnnnnnnnnnnnnnnnnnnnnnnnnnnnnnnnnnnnnnnnnnnnnnnnnnnnnnnnnnnnnnnnnnnnnnnnnnnnnnnnnnnnnnnnnnnnnnnnnnnnnnnnnnnnnnnnnnnnnnnnnnnnnnnnnnnnnnnnnnnnnnnnnnnnnnnnnnnnnnnnnnnnnnnnnnnnnnnnnnnnnnnnnnnnnnnnnnnnnnnnnnnnnnnnnnnnnnnnnnnnnnnnnnnnnnnnnnnnnnnnnnnnnnnnnnnnnnnnnnnnnnnnnnnnnnnnnnnnnnnnnnnnnnnnnnnnnnnnnnnnnnnnnnnnnnnnnnnnnnnnnnnnnnnnnnnnnnnnnnnnnnnnnnnnnnnnnnnnnnnnnnnnnnnnnnnnnnnnnnnnnnnnnnnnnnnnnnnnnnnnnnnnnnnnnnnnnnnnnnnnnnnnnnnnnnnnnnnnnnnnnnnnnnnnnnnnnnnnnnnnnnnnnnnnnnnnnnnnnnnnnnnnnnnnnnnnnnnnnnnnnnnnnnnnnnnnnnnnnnnnnnnnnnnnnnnnnnnnnnnnnnnnnnnnnnnnnnnnnnnnnnnnnnnnnnnnnnnnnnnnnnnnnnnnnnnnnnnnnnnnnnnnnnnnnnnnnnnnnnnnnnnnnnnnnnnnnnnnnnnnnnnnnnnnnnnnnnnnnnnnnnnnnnnnnnnnnnnnnnnnnnnnnnnnnnnnnnnnnnnnnnnnnnnnnnnnnnnnnnnnnnnnnnnnnnnnnnnnnnnnnnnnnnnnnnnnnnnnnnnnnnnnnnnnnnnnnnnnnnnnnnnnnnnnnnnnnnnnnnnnnnnnnnnnnnnnnnnnnnnnnnnnnnnnnnnnnnnnnnnnnnnnnnnnnnnnnnnnnnnnnnnnnnnnnnnnnnnnnnnnnnnnnnnnnnnnnnnnnnnnnnnnnnnnnnnnnnnnnnnnnnnnnnnnnnnnnnnnnnnnnnnnnnnnnnnnnnnnnnnnnnnnnnnnnnnnnnnnnnnnnnnnnnnnnnnnnnnnnnnnnnnnnnnnnnnnnnnnnnnnnnnnnnnnnnnnnnnnnnnnnnnnnnnnnnnnnnnnnnnnnnnnnnnnnnnnnnnnnnnnnnnnnnnnnnnnnnnnnnnnnnnnnnnnnnnnnnnnnnnnnnnnnnnnnnnnnnnnnnnnnnnnnnnnnnnnnnnnnnnnnnnnnnnnnnnnnnnnnnnnnnnnnnnnnnnnnnnnnnnnnnnnnnnnnnnnnnnnnnnnnnnnnnnnnnnnnnnnnnnnnnnnnnnnnnnnnnnnnnnnnnnnnnnnnnnnnnnnnnnnnnnnnnnnnnnnnnnnnnnnnnnnnnnnnnnnnnnnnnnnnnnnnnnnnnnnnnnnnnnnnnnnnnnnnnnnnnnnnnnnnnnnnnnnnnnnnnnnnnnnnnnnnnnnnnnnnnnnnnnnnnnnnnnnnnnnnnnnnnnnnnnnnnnnnnnnnnnnnnnnnnnnnnnnnnnnnnnnnnnnnnnnnnnnnnnnnnnnnnnnnnnnnnnnnnnnnnnnnnnnnnnnnnnnnnnnnnnnnnnnnnnnnnnnnnnnnnnnnnnnnnnnnnnnnnnnnnnnnnnnnnnnnnnnnnnnnnnnnnnnnnnnnnnnnnnnnnnnnnnnnnnnnnnnnnnnnnnnnnnnnnnnnnnnnnnnnnnnnnnnnnnnnnnnnnnnnnnnnnnnnnnnnnnnnnnnnnnnnnnnnnnnnnnnnnnnnnnnnnnnnnnnnnnnnnnnnnnnnnnnnnnnnnnnnnnnnnnnnnnnnnnnnnnnnnnnnnnnnnnnnnnnnnnnnnnnnnnnnnnnnnnnnnnnnnnnnnnnnnnnnnnnnnnnnnnnnnnnnnnnnnnnnnnnnnnnnnnnnnnnnnnnnnnnnnnnnnnnnnnnnnnnnnnnnnnnnnnnnnnnnnnnnnnnnnnnnnnnnnnnnnnnnnnnnnnnnnnnnnnnnnnnnnnnnnnnnnnnnnnnnnnnnnnnnnnnnnnnnnnnnnnnnnnnnnnnnnnnnnnnnnnnnnnnnnnnnnnnnnnnnnnnnnnnnnnnnnnnnnnnnnnnnnnnnnnnnnnnnnnnnnnnnnnnnnnnnnnnnnnnnnnnnnnnnnnnnnnnnnnnnnnnnnnnnnnnnnnnnnnnnnnnnnnnnnnnnnnnnnnnnnnnnnnnnnnnnnnnnnnnnnnnnnnnnnnnnnnnnnnnnnnnnnnnnnnnnnnnnnnnnnnnnnnnnnnnnnnnnnnnnnnnnnnnnnnnnnnnnnnnnnnnnnnnnnnnnnnnnnnnnnnnnnnnnnnnnnnnnnnnnnnnnnnnnnnnnnnnnnnnnnnnnnnnnnnnnnnnnnnnnnnnnnnnnnnnnnnnnnnnnnnnnnnnnnnnnnnnnnnnnnnnnnnnnnnnnnnnnnnnnnnnnnnnnnnnnnnnnnnnnnnnnnnnnnnnnnnnnnnnnnnnnnnnnnnnnnnnnnnnnnnnnnnnnnnnnnnnnnnnnnnnnnnnnnnnnnnnnnnnnnnnnnnnnnnnnnnnnnnnnnnnnnnnnnnnnnnnnnnnnnnnnnnnnnnnnnnnnnnnnnnnnnnnnnnnnnnnnnnnnnnnnnnnnnnnnnnnnnnnnnnnnnnnnnnnnnnnnnnnnnnnnnnnnnnnnnnnnnnnnnnnnnnnnnnnnnnnnnnnnnnnnnnnnnnnnnnnnnnnnnnnnnnnnnnnnnnnnnnnnnnnnnnnnnnnnnnnnnnnnnnnnnnnnnnnnnnnnnnnnnnnnnnnnnnnnnnnnnnnnnnnnnnnnnnnnnnnnnnnnnnnnnnnnnnnnnnnnnnnnnnnnnnnnnnnnnnnnnnnnnnnnnnnnnnnnnnnnnnnnnnnnnnnnnnnnnnnnnnnnnnnnnnnnnnnnnnnnnnnnnnnnnnnnnnnnnnnnnnnnnnnnnnnnnnnnnnnnnnnnnnnnnnnnnnnnnnnnnnnnnnnnnnnnnnnnnnnnnnnnnnnnnnnnnnnnnnnnnnnnnnnnnnnnnnnnnnnnnnnnnnnnnnnnnnnnnnnnnnnnnnnnnnnnnnnnnnnnnnnnnnnnnnnnnnnnnnnnnnnnnnnnnnnnnnnnnnnnnnnnnnnnnnnnnnnnnnnnnnnnnnnnnnnnnnnnnnnnnnnnnnnnnnnnnnnnnnnnnnnnnnnnnnnnnnnnnnnnnnnnnnnnnnnnnnnnnnnnnnnnnnnnnnnnnnnnnnnnnnnnnnnnnnnnnnnnnnnnnnnnnnnnnnnnnnnnnnnnnnnnnnnnnnnnnnnnnnnnnnnnnnnnnnnnnnnnnnnnnnnnnnnnnnnnnnnnnnnnnnnnnnnnnnnnnnnnnnnnnnnnnnnnnnnnnnnnnnnnnnnnnnnnnnnnnnnnnnnnnnnnnnnnnnnnnnnnnnnnnnnnnnnnnnnnnnnnnnnnnnnnnnnnnnnnnnnnnnnnnnnnnnnnnnnnnnnnnnnnnnnnnnnnnnnnnnnnnnnnnnnnnnnnnnnnnnnnnnnnnnnnnnnnnnnnnnnnnnnnnnnnnnnnnnnnnnnnnnnnnnnnnnnnnnnnnnnnnnnnnnnnnnnnnnnnnnnnnnnnnnnnnnnnnnnnnnnnnnnnnnnnnnnnnnnnnnnnnnnnnnnnnnnnnnnnnnnnnnnnnnnnnnnnnnnnnnnnnnnnnnnnnnnnnnnnnnnnnnnnnnnnnnnnnnnnnnnnnnnnnnnnnnnnnnnnnnnnnnnnnnnnnnnnnnnnnnnnnnnnnnnnnnnnnnnnnnnnnnnnnnnnnnnnnnnnnnnnnnnnnnnnnnnnnnnnnnnnnnnnnnnnnnnnnnnnnnnnnnnnnnnnnnnnnnnnnnnnnnnnnnnnnnnnnnnnnnnnnnnnnnnnnnnnnnnnnnnnnnnnnnnnnnnnnnnnnnnnnnnnnnnnnnnnnnnnnnnnnnnnnnnnnnnnnnnnnnnnnnnnnnnnnnnnnnnnnnnnnnnnnnnnnnnnnnnnnnnnnnnnnnnnnnnnnnnnnnnnnnnnnnnnnnnnnnnnnnnnnnnnnnnnnnnnnnnnnnnnnnnnnnnnnnnnnnnnnnnnnnnnnnnnnnnnnnnnnnnnnnnnnnnnnnnnnnnnnnnnnnnnnnnnnnnnnnnnnnnnnnnnnnnnnnnnnnnnnnnnnnnnnnnnnnnnnnnnnnnnnnnnnnnnnnnnnnnnnnnnnnnnnnnnnnnnnnnnnnnnnnnnnnnnnnnnnnnnnnnnnnnnnnnnnnnnnnnnnnnnnnnnnnnnnnnnnnnnnnnnnnnnnnnnnnnnnnnnnnnnnnnnnnnnnnnnnnnnnnnnnnnnnnnnnnnnnnnnnnnnnnnnnnnnnnnnnnnnnnnnnnnnnnnnnnnnnnnnnnnnnnnnnnnnnnnnnnnnnnnnnnnnnnnnnnnnnnnnnnnnnnnnnnnnnnnnnnnnnnnnnnnnnnnnnnnnnnnnnnnnnnnnnnnnnnnnnnnnnnnnnnnnnnnnnnnnnnnnnnnnnnnnnnnnnnnnnnnnnnnnnnnnnnnnnnnnnnnnnnnnnnnnnnnnnnnnnnnnnnnnnnnnnnnnnnnnnnnnnnnnnnnnnnnnnnnnnnnnnnnnnnnnnnnnnnnnnnnnnnnnnnnnnnnnnnnnnnnnnnnnnnnnnnnnnnnnnnnnnnnnnnnnnnnnnnnnnnnnnnnnnnnnnnnnnnnnnnnnnnnnnnnnnnnnnnnnnnnnnnnnnnnnnnnnnnnnnnnnnnnnnnnnnnnnnnnnnnnnnnnnnnnnnnnnnnnnnnnnnnnnnnnnnnnnnnnnnnnnnnnnnnnnnnnnnnnnnnnnnnnnnnnnnnnnnnnnnnnnnnnnnnnnnnnnnnnnnnnnnnnnnnnnnnnnnnnnnnnnnnnnnnnnnnnnnnnnnnnnnnnnnnnnnnnnnnnnnnnnnnnnnnnnnnnnnnnnnnnnnnnnnnnnnnnnnnnnnnnnnnnnnnnnnnnnnnnnnnnnnnnnnnnnnnnnnnnnnnnnnnnnnnnnnnnnnnnnnnnnnnnnnnnnnnnnnnnnnnnnnnnnnnnnnnnnnnnnnnnnnnnnnnnnnnnnnnnnnnnnnnnnnnnnnnnnnnnnnnnnnnnnnnnnnnnnnnnnnnnnnnnnnnnnnnnnnnnnnnnnnnnnnnnnnnnnnnnnnnnnnnnnnnnnnnnnnnnnnnnnnnnnnnnnnnnnnnnnnnnnnnnnnnnnnnnnnnnnnnnnnnnnnnnnnnnnnnnnnnnnnnnnnnnnnnnnnnnnnnnnnnnnnnnnnnnnnnnnnnnnnnnnnnnnnnnnnnnnnnnnnnnnnnnnnnnnnnnnnnnnnnnnnnnnnnnnnnnnnnnnnnnnnnnnnnnnnnnnnnnnnnnnnnnnnnnnnnnnnnnnnnnnnnnnnnnnnnnnnnnnnnnnnnnnnnnnnnnnnnnnnnnnnnnnnnnnnnnnnnnnnnnnnnnnnnnnnnnnnnnnnnnnnnnnnnnnnnnnnnnnnnnnnnnnnnnnnnnnnnnnnnnnnnnnnnnnnnnnnnnnnnnnnnnnnnnnnnnnnnnnnnnnnnnnnnnnnnnnnnnnnnnnnnnnnnnnnnnnnnnnnnnnnnnnnnnnnnnnnnnnnnnnnnnnnnnnnnnnnnnnnnnnnnnnnnnnnnnnnnnnnnnnnnnnnnnnnnnnnnnnnnnnnnnnnnnnnnnnnnnnnnnnnnnnnnnnnnnnnnnnnnnnnnnnnnnnnnnnnnnnnnnnnnnnnnnnnnnnnnnnnnnnnnnnnnnnnnnnnnnnnnnnnnnnnnnnnnnnnnnnnnnnnnnnnnnnnnnnnnnnnnnnnnnnnnnnnnnnnnnnnnnnnnnnnnnnnnnnnnnnnnnnnnnnnnnnnnnnnnnnnnnnnnnnnnnnnnnnnnnnnnnnnnnnnnnnnnnnnnnnnnnnnnnnnnnnnnnnnnnnnnnnnnnnnnnnnnnnnnnnnnnnnnnnnnnnnnnnnnnnnnnnnnnnnnnnnnnnnnnnnnnnnnnnnnnnnnnnnnnnnnnnnnnnnnnnnnnnnnnnnnnnnnnnnnnnnnnnnnnnnnnnnnnnnnnnnnnnnnnnnnnnnnnnnnnnnnnnnnnnnnnnnnnnnnnnnnnnnnnnnnnnnnnnnnnnnnnnnnnnnnnnnnnnnnnnnnnnnnnnnnnnnnnnnnnnnnnnnnnnnnnnnnnnnnnnnnnnnnnnnnnnnnnnnnnnnnnnnnnnnnnnnnnnnnnnnnnnnnnnnnnnnnnnnnnnnnnnnnnnnnnnnnnnnnnnnnnnnnnnnnnnnnnnnnnnnnnnnnnnnnnnnnnnnnnnnnnnnnnnnnnnnnnnnnnnnnnnnnnnnnnnnnnnnnnnnnnnnnnnnnnnnnnnnnnnnnnnnnnnnnnnnnnnnnnnnnnnnnnnnnnnnnnnnnnnnnnnnnnnnnnnnnnnnnnnnnnnnnnnnnnnnnnnnnnnnnnnnnnnnnnnnnnnnnnnnnnnnnnnnnnnnnnnnnnnnnnnnnnnnnnnnnnnnnnnnnnnnnnnnnnnnnnnnnnnnnnnnnnnnnnnnnnnnnnnnnnnnnnnnnnnnnnnnnnnnnnnnnnnnnnnnnnnnnnnnnnnnnnnnnnnnnnnnnnnnnnnnnnnnnnnnnnnnnnnnnnnnnnnnnnnnnnnnnnnnnnnnnnnnnnnnnnnnnnnnnnnnnnnnnnnnnnnnnnnnnnnnnnnnnnnnnnnnnnnnnnnnnnnnnnnnnnnnnnnnnnnnnnnnnnnnnnnnnnnnnnnnnnnnnnnnnnnnnnnnnnnnnnnnnnnnnnnnnnnnnnnnnnnnnnnnnnnnnnnnnnnnnnnnnnnnnnnnnnnnnnnnnnnnnnnnnnnnnnnnnnnnnnnnnnnnnnnnnnnnnnnnnnnnnnnnnnnnnnnnnnnnnnnnnnnnnnnnnnnnnnnnnnnnnnnnnnnnnnnnnnnnnnnnnnnnnnnnnnnnnnnnnnnnnnnnnnnnnnnnnnnnnnnnnnnnnnnnnnnnnnnnnnnnnnnnnnnnnnnnnnnnnnnnnnnnnnnnnnnnnnnnnnnnnnnnnnnnnnnnnnnnnnnnnnnnnnnnnnnnnnnnnnnnnnnnnnnnnnnnnnnnnnnnnnnnnnnnnnnnnnnnnnnnnnnnnnnnnnnnnnnnnnnnnnnnnnnnnnnnnnnnnnnnnnnnnnnnnnnnnnnnnnnnnnnnnnnnnnnnnnnnnnnnnnnnnnnnnnnnnnnnnnnnnnnnnnnnnnnnnnnnnnnnnnnnnnnnnnnnnnnnnnnnnnnnnnnnnnnnnnnnnnnnnnnnnnnnnnnnnnnnnnnnnnnnnnnnnnnnnnnnnnnnnnnnnnnnnnnnnnnnnnnnnnnnnnnnnnnnnnnnnnnnnnnnnnnnnnnnnnnnnnnnnnnnnnnnnnnnnnnnnnnnnnnnnnnnnnnnnnnnnnnnnnnnnnnnnnnnnnnnnnnnnnnnnnnnnnnnnnnnnnnnnnnnnnnnnnnnnnnnnnnnnnnnnnnnnnnnnnnnnnnnnnnnnnnnnnnnnnnnnnnnnnnnnnnnnnnnnnnnnnnnnnnnnnnnnnnnnnnnnnnnnnnnnnnnnnnnnnnnnnnnnnnnnnnnnnnnnnnnnnnnnnnnnnnnnnnnnnnnnnnnnnnnnnnnnnnnnnnnnnnnnnnnnnnnnnnnnnnnnnnnnnnnnnnnnnnnnnnnnnnnnnnnnnnnnnnnnnnnnnnnnnnnnnnnnnnnnnnnnnnnnnnnnnnnnnnnnnnnnnnnnnnnnnnnnnnnnnnnnnnnnnnnnnnnnnnnnnnnnnnnnnnnnnnnnnnnnnnnnnnnnnnnnnnnnnnnnnnnnnnnnnnnnnnnnnnnnnnnnnnnnnnnnnnnnnnnnnnnnnnnnnnnnnnnnnnnnnnnnnnnnnnnnnnnnnnnnnnnnnnnnnnnnnnnnnnnnnnnnnnnnnnnnnnnnnnnnnnnnnnnnnnnnnnnnnnnnnnnnnnnnnnnnnnnnnnnnnnnnnnnnnnnnnnnnnnnnnnnnnnnnnnnnnnnnnnnnnnnnnnnnnnnnnnnnnnnnnnnnnnnnnnnnnnnnnnnnnnnnnnnnnnnnnnnnnnnnnnnnnnnnnnnnnnnnnnnnnnnnnnnnnnnnnnnnnnnnnnnnnnnnnnnnnnnnnnnnnnnnnnnnnnnnnnnnnnnnnnnnnnnnnnnnnnnnnnnnnnnnnnnnnnnnnnnnnnnnnnnnnnnnnnnnnnnnnnnnnnnnnnnnnnnnnnnnnnnnnnnnnnnnnnnnnnnnnnnnnnnnnnnnnnnnnnnnnnnnnnnnnnnnnnnnnnnnnnnnnnnnnnnnnnnnnnnnnnnnnnnnnnnnnnnnnnnnnnnnnnnnnnnnnnnnnnnnnnnnnnnnnnnnnnnnnnnnnnnnnnnnnnnnnnnnnnnnnnnnnnnnnnnnnnnnnnnnnnnnnnnnnnnnnnnnnnnnnnnnnnnnnnnnnnnnnnnnnnnnnnnnnnnnnnnnnnnnnnnnnnnnnnnnnnnnnnnnnnnnnnnnnnnnnnnnnnnnnnnnnnnnnnnnnnnnnnnnnnnnnnnnnnnnnnnnnnnnnnnnnnnnnnnnnnnnnnnnnnnnnnnnnnnnnnnnnnnnnnnnnnnnnnnnnnnnnnnnnnnnnnnnnnnnnnnnnnnnnnnnnnnnnnnnnnnnnnnnnnnnnnnnnnnnnnnnnnnnnnnnnnnnnnnnnnnnnnnnnnnnnnnnnnnnnnnnnnnnnnnnnnnnnnnnnnnnnnnnnnnnnnnnnnnnnnnnnnnnnnnnnnnnnnnnnnnnnnnnnnnnnnnnnnnnnnnnnnnnnnnnnnnnnnnnnnnnnnnnnnnnnnnnnnnnnnnnnnnnnnnnnnnnnnnnnnnnnnnnnnnnnnnnnnnnnnnnnnnnnnnnnnnnnnnnnnnnnnnnnnnnnnnnnnnnnnnnnnnnnnnnnnnnnnnnnnnnnnnnnnnnnnnnnnnnnnnnnnnnnnnnnnnnnnnnnnnnnnnnnnnnnnnnnnnnnnnnnnnnnnnnnnnnnnnnnnnnnnnnnnnnnnnnnnnnnnnnnnnnnnnnnnnnnnnnnnnnnnnnnnnnnnnnnnnnnnnnnnnnnnnnnnnnnnnnnnnnnnnnnnnnnnnnnnnnnnnnnnnnnnnnnnnnnnnnnnnnnnnnnnnnnnnnnnnnnnnnnnnnnnnnnnnnnnnnnnnnnnnnnnnnnnnnnnnnnnnnnnnnnnnnnnnnnnnnnnnnnnnnnnnnnnnnnnnnnnnnnnnnnnnnnnnnnnnnnnnnnnnnnnnnnnnnnnnnnnnnnnnnnnnnnnnnnnnnnnnnnnnnnnnnnnnnnnnnnnnnnnnnnnnnnnnnnnnnnnnnnnnnnnnnnnnnnnnnnnnnnnnnnnnnnnnnnnnnnnnnnnnnnnnnnnnnnnnnnnnnnnnnnnnnnnnnnnnnnnnnnnnnnnnnnnnnnnnnnnnnnnnnnnnnnnnnnnnnnnnnnnnnnnnnnnnnnnnnnnnnnnnnnnnnnnnnnnnnnnnnnnnnnnnnnnnnnnnnnnnnnnnnnnnnnnnnnnnnnnnnnnnnnnnnnnnnnnnnnnnnnnnnnnnnnnnnnnnnnnnnnnnnnnnnnnnnnnnnnnnnnnnnnnnnnnnnnnnnnnnnnnnnnnnnnnnnnnnnnnnnnnnnnnnnnnnnnnnnnnnnnnnnnnnnnnnnnnnnnnnnnnnnnnnnnnnnnnnnnnnnnnnnnnnnnnnnnnnnnnnnnnnnnnnnnnnnnnnnnnnnnnnnnnnnnnnnnnnnnnnnnnnnnnnnnnnnnnnnnnnnnnnnnnnnnnnnnnnnnnnnnnnnnnnnnnnnnnnnnnnnnnnnnnnnnnnnnnnnnnnnnnnnnnnnnnnnnnnnnnnnnnnnnnnnnnnnnnnnnnnnnnnnnnnnnnnnnnnnnnnnnnnnnnnnnnnnnnnnnnnnnnnnnnnnnnnnnnnnnnnnnnnnnnnnnnnnnnnnnnnnnnnnnnnnnnnnnnnnnnnnnnnnnnnnnnnnnnnnnnnnnnnnnnnnnnnnnnnnnnnnnnnnnnnnnnnnnnnnnnnnnnnnnnnnnnnnnnnnnnnnnnnnnnnnnnnnnnnnnnnnnnnnnnnnnnnnnnnnnnnnnnnnnnnnnnnnnnnnnnnnnnnnnnnnnnnnnnnnnnnnnnnnnnnnnnnnnnnnnnnnnnnnnnnnnnnnnnnnnnnnnnnnnnnnnnnnnnnnnnnnnnnnnnnnnnnnnnnnnnnnnnnnnnnnnnnnnnnnnnnnnnnnnnnnnnnnnnnnnnnnnnnnnnnnnnnnnnnnnnnnnnnnnnnnnnnnnnnnnnnnnnnnnnnnnnnnnnnnnnnnnnnnnnnnnnnnnnnnnnnnnnnnnnnnnnnnnnnnnnnnnnnnnnnnnnnnnnnnnnnnnnnnnnnnnnnnnnnnnnnnnnnnnnnnnnnnnnnnnnnnnnnnnnnnnnnnnnnnnnnnnnnnnnnnnnnnnnnnnnnnnnnnnnnnnnnnnnnnnnnnnnnnnnnnnnnnnnnnnnnnnnnnnnnnnnnnnnnnnnnnnnnnnnnnnnnnnnnnnnnnnnnnnnnnnnnnnnnnnnnnnnnnnnnnnnnnnnnnnnnnnnnnnnnnnnnnnnnnnnnnnnnnnnnnnnnnnnnnnnnnnnnnnnnnnnnnnnnnnnnnnnnnnnnnnnnnnnnnnnnnnnnnnnnnnnnnnnnnnnnnnnnnnnnnnnnnnnnnnnnnnnnnnnnnnnnnnnnnnnnnnnnnnnnnnnnnnnnnnnnnnnnnnnnnnnnnnnnnnnnnnnnnnnnnnnnnnnnnnnnnnnnnnnnnnnnnnnnnnnnnnnnnnnnnnnnnnnnnnnnnnnnnnnnnnnnnnnnnnnnnnnnnnnnnnnnnnnnnnnnnnnnnnnnnnnnnnnnnnnnnnnnnnnnnnnnnnnnnnnnnnnnnnnnnnnnnnnnnnnnnnnnnnnnnnnnnnnnnnnnnnnnnnnnnnnnnnnnnnnnnnnnnnnnnnnnnnnnnnnnnnnnnnnnnnnnnnnnnnnnnnnnnnnnnnnnnnnnnnnnnnnnnnnnnnnnnnnnnnnnnnnnnnnnnnnnnnnnnnnnnnnnnnnnnnnnnnnnnnnnnnnnnnnnnnnnnnnnnnnnnnnnnnnnnnnnnnnnnnnnnnnnnnnnnnnnnnnnnnnnnnnnnnnnnnnnnnnnnnnnnnnnnnnnnnnnnnnnnnnnnnnnnnnnnnnnnnnnnnnnnnnnnnnnnnnnnnnnnnnnnnnnnnnnnnnnnnnnnnnnnnnnnnnnnnnnnnnnnnnnnnnnnnnnnnnnnnnnnnnnnnnnnnnnnnnnnnnnnnnnnnnnnnnnnnnnnnnnnnnnnnnnnnnnnnnnnnnnnnnnnnnnnnnnnnnnnnnnnnnnnnnnnnnnnnnnnnnnnnnnnnnnnnnnnnnnnnnnnnnnnnnnnnnnnnnnnnnnnnnnnnnnnnnnnnnnnnnnnnnnnnnnnnnnnnnnnnnnnnnnnnnnnnnnnnnnnnnnnnnnnnnnnnnnnnnnnnnnnnnnnnnnnnnnnnnnnnnnnnnnnnnnnnnnnnnnnnnnnnnnnnnnnnnnnnnnnnnnnnnnnnnnnnnnnnnnnnnnnnnnnnnnnnnnnnnnnnnnnnnnnnnnnnnnnnnnnnnnnnnnnnnnnnnnnnnnnnnnnnnnnnnnnnnnnnnnnnnnnnnnnnnnnnnnnnnnnnnnnnnnnnnnnnnnnnnnnnnnnnnnnnnnnnnnnnnnnnnnnnnnnnnnnnnnnnnnnnnnnnnnnnnnnnnnnnnnnnnnnnnnnnnnnnnnnnnnnnnnnnnnnnnnnnnnnnnnnnnnnnnnnnnnnnnnnnnnnnnnnnnnnnnnnnnnnnnnnnnnnnnnnnnnnnnnnnnnnnnnnnnnnnnnnnnnnnnnnnnnnnnnnnnnnnnnnnnnnnnnnnnnnnnnnnnnnnnnnnnnnnnnnnnnnnnnnnnnnnnnnnnnnnnnnnnnnnnnnnnnnnnnnnnnnnnnnnnnnnnnnnnnnnnnnnnnnnnnnnnnnnnnnnnnnnnnnnnnnnnnnnnnnnnnnnnnnnnnnnnnnnnnnnnnnnnnnnnnnnnnnnnnnnnnnnnnnnnnnnnnnnnnnnnnnnnnnnnnnnnnnnnnnnnnnnnnnnnnnnnnnnnnnnnnnnnnnnnnnnnnnnnnnnnnnnnnnnnnnnnnnnnnnnnnnnnnnnnnnnnnnnnnnnnnnnnnnnnnnnnnnnnnnnnnnnnnnnnnnnnnnnnnnnnnnnnnnnnnnnnnnnnnnnnnnnnnnnnnnnnnnnnnnnnnnnnnnnnnnnnnnnnnnnnnnnnnnnnnnnnnnnnnnnnnnnnnnnnnnnnnnnnnnnnnnnnnnnnnnnnnnnnnnnnnnnnnnnnnnnnnnnnnnnnnnnnnnnnnnnnnnnnnnnnnnnnnnnnnnnnnnnnnnnnnnnnnnnnnnnnnnnnnnnnnnnnnnnnnnnnnnnnnnnnnnnnnnnnnnnnnnnnnnnnnnnnnnnnnnnnnnnnnnnnnnnnnnnnnnnnnnnnnnnnnnnnnnnnnnnnnnnnnnnnnnnnnnnnnnnnnnnnnnnnnnnnnnnnnnnnnnnnnnnnnnnnnnnnnnnnnnnnnnnnnnnnnnnnnnnnnnnnnnnnnnnnnnnnnnnnnnnnnnnnnnnnnnnnnnnnnnnnnnnnnnnnnnnnnnnnnnnnnnnnnnnnnnnnnnnnnnnnnnnnnnnnnnnnnnnnnnnnnnnnnnnnnnnnnnnnnnnnnnnnnnnnnnnnnnnnnnnnnnnnnnnnnnnnnnnnnnnnnnnnnnnnnnnnnnnnnnnnnnnnnnnnnnnnnnnnnnnnnnnnnnnnnnnnnnnnnnnnnnnnnnnnnnnnnnnnnnnnnnnnnnnnnnnnnnnnnnnnnnnnnnnnnnnnnnnnnnnnnnnnnnnnnnnnnnnnnnnnnnnnnnnnnnnnnnnnnnnnnnnnnnnnnnnnnnnnnnnnnnnnnnnnnnnnnnnnnnnnnnnnnnnnnnnnnnnnnnnnnnnnnnnnnnnnnnnnnnnnnnnnnnnnnnnnnnnnnnnnnnnnnnnnnnnnnnnnnnnnnnnnnnnnnnnnnnnnnnnnnnnnnnnnnnnnnnnnnnnnnnnnnnnnnnnnnnnnnnnnnnnnnnnnnnnnnnnnnnnnnnnnnnnnnnnnnnnnnnnnnnnnnnnnnnnnnnnnnnnnnnnnnnnnnnnnnnnnnnnnnnnnnnnnnnnnnnnnnnnnnnnnnnnnnnnnnnnnnnnnnnnnnnnnnnnnnnnnnnnnnnnnnnnnnnnnnnnnnnnnnnnnnnnnnnnnnnnnnnnnnnnnnnnnnnnnnnnnnnnnnnnnnnnnnnnnnnnnnnnnnnnnnnnnnnnnnnnnnnnnnnnnnnnnnnnnnnnnnnnnnnnnnnnnnnnnnnnnnnnnnnnnnnnnnnnnnnnnnnnnnnnnnnnnnnnnnnnnnnnnnnnnnnnnnnnnnnnnnnnnnnnnnnnnnnnnnnnnnnnnnnnnnnnnnnnnnnnnnnnnnnnnnnnnnnnnnnnnnnnnnnnnnnnnnnnnnnnnnnnnnnnnnnnnnnnnnnnnnnnnnnnnnnnnnnnnnnnnnnnnnnnnnnnnnnnnnnnnnnnnnnnnnnnnnnnnnnnnnnnnnnnnnnnnnnnnnnnnnnnnnnnnnnnnnnnnnnnnnnnnnnnnnnnnnnnnnnnnnnnnnnnnnnnnnnnnnnnnnnnnnnnnnnnnnnnnnnnnnnnnnnnnnnnnnnnnnnnnnnnnnnnnnnnnnnnnnnnnnnnnnnnnnnnnnnnnnnnnnnnnnnnnnnnnnnnnnnnnnnnnnnnnnnnnnnnnnnnnnnnnnnnnnnnnnnnnnnnnnnnnnnnnnnnnnnnnnnnnnnnnnnnnnnnnnnnnnnnnnnnnnnnnnnnnnnnnnnnnnnnnnnnnnnnnnnnnnnnnnnnnnnnnnnnnnnnnnnnnnnnnnnnnnnnnnnnnnnnnnnnnnnnnnnnnnnnnnnnnnnnnnnnnnnnnnnnnnnnnnnnnnnnnnnnnnnnnnnnnnnnnnnnnnnnnnnnnnnnnnnnnnnnnnnnnnnnnnnnnnnnnnnnnnnnnnnnnnnnnnnnnnnnnnnnnnnnnnnnnnnnnnnnnnnnnnnnnnnnnnnnnnnnnnnnnnnnnnnnnnnnnnnnnnnnnnnnnnnnnnnnnnnnnnnnnnnnnnnnnnnnnnnnnnnnnnnnnnnnnnnnnnnnnnnnnnnnnnnnnnnnnnnnnnnnnnnnnnnnnnnnnnnnnnnnnnnnnnnnnnnnnnnnnnnnnnnnnnnnnnnnnnnnnnnnnnnnnnnnnnnnnnnnnnnnnnnnnnnnnnnnnnnnnnnnnnnnnnnnnnnnnnnnnnnnnnnnnnnnnnnnnnnnnnnnnnnnnnnnnnnnnnnnnnnnnnnnnnnnnnnnnnnnnnnnnnnnnnnnnnnnnnnnnnnnnnnnnnnnnnnnnnnnnnnnnnnnnnnnnnnnnnnnnnnnnnnnnnnnnnnnnnnnnnnnnnnnnnnnnnnnnnnnnnnnnnnnnnnnnnnnnnnnnnnnnnnnnnnnnnnnnnnnnnnnnnnnnnnnnnnnnnnnnnnnnnnnnnnnnnnnnnnnnnnnnnnnnnnnnnnnnnnnnnnnnnnnnnnnnnnnnnnnnnnnnnnnnnnnnnnnnnnnnnnnnnnnnnnnnnnnnnnnnnnnnnnnnnnnnnnnnnnnnnnnnnnnnnnnnnnnnnnnnnnnnnnnnnnnnnnnnnnnnnnnnnnnnnnnnnnnnnnnnnnnnnnnnnnnnnnnnnnnnnnnnnnnnnnnnnnnnnnnnnnnnnnnnnnnnnnnnnnnnnnnnnnnnnnnnnnnnnnnnnnnnnnnnnnnnnnnnnnnnnnnnnnnnnnnnnnnnnnnnnnnnnnnnnnnnnnnnnnnnnnnnnnnnnnnnnnnnnnnnnnnnnnnnnnnnnnnnnnnnnnnnnnnnnnnnnnnnnnnnnnnnnnnnnnnnnnnnnnnnnnnnnnnnnnnnnnnnnnnnnnnnnnnnnnnnnnnnnnnnnnnnnnnnnnnnnnnnnnnnnnnnnnnnnnnnnnnnnnnnnnnnnnnnnnnnnnnnnnnnnnnnnnnnnnnnnnnnnnnnnnnnnnnnnnnnnnnnnnnnnnnnnnnnnnnnnnnnnnnnnnnnnnnnnnnnnnnnnnnnnnnnnnnnnnnnnnnnnnnnnnnnnnnnnnnnnnnnnnnnnnnnnnnnnnnnnnnnnnnnnnnnnnnnnnnnnnnnnnnnnnnnnnnnnnnnnnnnnnnnnnnnnnnnnnnnnnnnnnnnnnnnnnnnnnnnnnnnnnnnnnnnnnnnnnnnnnnnnnnnnnnnnnnnnnnnnnnnnnnnnnnnnnnnnnnnnnnnnnnnnnnnnnnnnnnnnnnnnnnnnnnnnnnnnnnnnnnnnnnnnnnnnnnnnnnnnnnnnnnnnnnnnnnnnnnnnnnnnnnnnnnnnnnnnnnnnnnnnnnnnnnnnnnnnnnnnnnnnnnnnnnnnnnnnnnnnnnnnnnnnnnnnnnnnnnnnnnnnnnnnnnnnnnnnnnnnnnnnnnnnnnnnnnnnnnnnnnnnnnnnnnnnnnnnnnnnnnnnnnnnnnnnnnnnnnnnnnnnnnnnnnnnnnnnnnnnnnnnnnnnnnnnnnnnnnnnnnnnnnnnnnnnnnnnnnnnnnnnnnnnnnnnnnnnnnnnnnnnnnnnnnnnnnnnnnnnnnnnnnnnnnnnnnnnnnnnnnnnnnnnnnnnnnnnnnnnnnnnnnnnnnnnnnnnnnnnnnnnnnnnnnnnnnnnnnnnnnnnnnnnnnnnnnnnnnnnnnnnnnnnnnnnnnnnnnnnnnnnnnnnnnnnnnnnnnnnnnnnnnnnnnnnnnnnnnnnnnnnnnnnnnnnnnnnnnnnnnnnnnnnnnnnnnnnnnnnnnnnnnnnnnnnnnnnnnnnnnnnnnnnnnnnnnnnnnnnnnnnnnnnnnnnnnnnnnnnnnnnnnnnnnnnnnnnnnnnnnnnnnnnnnnnnnnnnnnnnnnnnnnnnnnnnnnnnnnnnnnnnnnnnnnnnnnnnnnnnnnnnnnnnnnnnnnnnnnnnnnnnnnnnnnnnnnnnnnnnnnnnnnnnnnnnnnnnnnnnnnnnnnnnnnnnnnnnnnnnnnnnnnnnnnnnnnnnnnnnnnnnnnnnnnnnnnnnnnnnnnnnnnnnnnnnnnnnnnnnnnnnnnnnnnnnnnnnnnnnnnnnnnnnnnnnnnnnnnnnnnnnnnnnnnnnnnnnnnnnnnnnnnnnnnnnnnnnnnnnnnnnnnnnnnnnnnnnnnnnnnnnnnnnnnnnnnnnnnnnnnnnnnnnnnnnnnnnnnnnnnnnnnnnnnnnnnnnnnnnnnnnnnnnnnnnnnnnnnnnnnnnnnnnnnnnnnnnnnnnnnnnnnnnnnnnnnnnnnnnnnnnnnnnnnnnnnnnnnnnnnnnnnnnnnnnnnnnnnnnnnnnnnnnnnnnnnnnnnnnnnnnnnnnnnnnnnnnnnnnnnnnnnnnnnnnnnnnnnnnnnnnnnnnnnnnnnnnnnnnnnnnnnnnnnnnnnnnnnnnnnnnnnnnnnnnnnnnnnnnnnnnnnnnnnnnnnnnnnnnnnnnnnnnnnnnnnnnnnnnnnnnnnnnnnnnnnnnnnnnnnnnnnnnnnnnnnnnnnnnnnnnnnnnnnnnnnnnnnnnnnnnnnnnnnnnnnnnnnnnnnnnnnnnnnnnnnnnnnnnnnnnnnnnnnnnnnnnnnnnnnnnnnnnnnnnnnnnnnnnnnnnnnnnnnnnnnnnnnnnnnnnnnnnnnnnnnnnnnnnnnnnnnnnnnnnnnnnnnnnnnnnnnnnnnnnnnnnnnnnnnnnnnnnnnnnnnnnnnnnnnnnnnnnnnnnnnnnnnnnnnnnnnnnnnnnnnnnnnnnnnnnnnnnnnnnnnnnnnnnnnnnnnnnnnnnnnnnnnnnnnnnnnnnnnnnnnnnnnnnnnnnnnnnnnnnnnnnnnnnnnnnnnnnnnnnnnnnnnnnnnnnnnnnnnnnnnnnnnnnnnnnnnnnnnnnnnnnnnnnnnnnnnnnnnnnnnnnnnnnnnnnnnnnnnnnnnnnnnnnnnnnnnnnnnnnnnnnnnnnnnnnnnnnnnnnnnnnnnnnnnnnnnnnnnnnnnnnnnnnnnnnnnnnnnnnnnnnnnnnnnnnnnnnnnnnnnnnnnnnnnnnnnnnnnnnnnnnnnnnnnnnnnnnnnnnnnnnnnnnnnnnnnnnnnnnnnnnnnnnnnnnnnnnnnnnnnnnnnnnnnnnnnnnnnnnnnnnnnnnnnnnnnnnnnnnnnnnnnnnnnnnnnnnnnnnnnnnnnnnnnnnnnnnnnnnnnnnnnnnnnnnnnnnnnnnnnnnnnnnnnnnnnnnnnnnnnnnnnnnnnnnnnnnnnnnnnnnnnnnnnnnnnnnnnnnnnnnnnnnnnnnnnnnnnnnnnnnnnnnnnnnnnnnnnnnnnnnnnnnnnnnnnnnnnnnnnnnnnnnnnnnnnnnnnnnnnnnnnnnnnnnnnnnnnnnnnnnnnnnnnnnnnnnnnnnnnnnnnnnnnnnnnnnnnnnnnnnnnnnnnnnnnnnnnnnnnnnnnnnnnnnnnnnnnnnnnnnnnnnnnnnnnnnnnnnnnnnnnnnnnnnnnnnnnnnnnnnnnnnnnnnnnnnnnnnnnnnnnnnnnnnnnnnnnnnnnnnnnnnnnnnnnnnnnnnnnnnnnnnnnnnnnnnnnnnnnnnnnnnnnnnnnnnnnnnnnnnnnnnnnnnnnnnnnnnnnnnnnnnnnnnnnnnnnnnnnnnnnnnnnnnnnnnnnnnnnnnnnnnnnnnnnnnnnnnnnnnnnnnnnnnnnnnnnnnnnnnnnnnnnnnnnnnnnnnnnnnnnnnnnnnnnnnnnnnnnnnnnnnnnnnnnnnnnnnnnnnnnnnnnnnnnnnnnnnnnnnnnnnnnnnnnnnnnnnnnnnnnnnnnnnnnnnnnnnnnnnnnnnnnnnnnnnnnnnnnnnnnnnnnnnnnnnnnnnnnnnnnnnnnnnnnnnnnnnnnnnnnnnnnnnnnnnnnnnnnnnnnnnnnnnnnnnnnnnnnnnnnnnnnnnnnnnnnnnnnnnnnnnnnnnnnnnnnnnnnnnnnnnnnnnnnnnnnnnnnnnnnnnnnnnnnnnnnnnnnnnnnnnnnnnnnnnnnnnnnnnnnnnnnnnnnnnnnnnnnnnnnnnnnnnnnnnnnnnnnnnnnnnnnnnnnnnnnnnnnnnnnnnnnnnnnnnnnnnnnnnnnnnnnnnnnnnnnnnnnnnnnnnnnnnnnnnnnnnnnnnnnnnnnnnnnnnnnnnnnnnnnnnnnnnnnnnnnnnnnnnnnnnnnnnnnnnnnnnnnnnnnnnnnnnnnnnnnnnnnnnnnnnnnnnnnnnnnnnnnnnnnnnnnnnnnnnnnnnnnnnnnnnnnnnnnnnnnnnnnnnnnnnnnnnnnnnnnnnnnnnnnnnnnnnnnnnnnnnnnnnnnnnnnnnnnnnnnnnnnnnnnnnnnnnnnnnnnnnnnnnnnnnnnnnnnnnnnnnnnnnnnnnnnnnnnnnnnnnnnnnnnnnnnnnnnnnnnnnnnnnnnnnnnnnnnnnnnnnnnnnnnnnnnnnnnnnnnnnnnnnnnnnnnnnnnnnnnnnnnnnnnnnnnnnnnnnnnnnnnnnnnnnnnnnnnnnnnnnnnnnnnnnnnnnnnnnnnnnnnnnnnnnnnnnnnnnnnnnnnnnnnnnnnnnnnnnnnnnnnnnnnnnnnnnnnnnnnnnnnnnnnnnnnnnnnnnnnnnnnnnnnnnnnnnnnnnnnnnnnnnnnnnnnnnnnnnnnnnnnnnnnnnnnnnnnnnnnnnnnnnnnnnnnnnnnnnnnnnnnnnnnnnnnnnnnnnnnnnnnnnnnnnnnnnnnnnnnnnnnnnnnnnnnnnnnnnnnnnnnnnnnnnnnnnnnnnnnnnnnnnnnnnnnnnnnnnnnnnnnnnnnnnnnnnnnnnnnnnnnnnnnnnnnnnnnnnnnnnnnnnnnnnnnnnnnnnnnnnnnnnnnnnnnnnnnnnnnnnnnnnnnnnnnnnnnnnnnnnnnnnnnnnnnnnnnnnnnnnnnnnnnnnnnnnnnnnnnnnnnnnnnnnnnnnnnnnnnnnnnnnnnnnnnnnnnnnnnnnnnnnnnnnnnnnnnnnnnnnnnnnnnnnnnnnnnnnnnnnnnnnnnnnnnnnnnnnnnnnnnnnnnnnnnnnnnnnnnnnnnnnnnnnnnnnnnnnnnnnnnnnnnnnnnnnnnnnnnnnnnnnnnnnnnnnnnnnnnnnnnnnnnnnnnnnnnnnnnnnnnnnnnnnnnnnnnnnnnnnnnnnnnnnnnnnnnnnnnnnnnnnnnnnnnnnnnnnnnnnnnnnnnnnnnnnnnnnnnnnnnnnnnnnnnnnnnnnnnnnnnnnnnnnnnnnnnnnnnnnnnnnnnnnnnnnnnnnnnnnnnnnnnnnnnnnnnnnnnnnnnnnnnnnnnnnnnnnnnnnnnnnnnnnnnnnnnnnnnnnnnnnnnnnnnnnnnnnnnnnnnnnnnnnnnnnnnnnnnnnnnnnnnnnnnnnnnnnnnnnnnnnnnnnnnnnnnnnnnnnnnnnnnnnnnnnnnnnnnnnnnnnnnnnnnnnnnnnnnnnnnnnnnnnnnnnnnnnnnnnnnnnnnnnnnnnnnnnnnnnnnnnnnnnnnnnnnnnnnnnnnnnnnnnnnnnnnnnnnnnnnnnnnnnnnnnnnnnnnnnnnnnnnnnnnnnnnnnnnnnnnnnnnnnnnnnnnnnnnnnnnnnnnnnnnnnnnnnnnnnnnnnnnnnnnnnnnnnnnnnnnnnnnnnnnnnnnnnnnnnnnnnnnnnnnnnnnnnnnnnnnnnnnnnnnnnnnnnnnnnnnnnnnnnnnnnnnnnnnnnnnnnnnnnnnnnnnnnnnnnnnnnnnnnnnnnnnnnnnnnnnnnnnnnnnnnnnnnnnnnnnnnnnnnnnnnnnnnnnnnnnnnnnnnnnnnnnnnnnnnnnnnnnnnnnnnnnnnnnnnnnnnnnnnnnnnnnnnnnnnnnnnnnnnnnnnnnnnnnnnnnnnnnnnnnnnnnnnnnnnnnnnnnnnnnnnnnnnnnnnnnnnnnnnnnnnnnnnnnnnnnnnnnnnnnnnnnnnnnnnnnnnnnnnnnnnnnnnnnnnnnnnnnnnnnnnnnnnnnnnnnnnnnnnnnnnnnnnnnnnnnnnnnnnnnnnnnnnnnnnnnnnnnnnnnnnnnnnnnnnnnnnnnnnnnnnnnnnnnnnnnnnnnnnnnnnnnnnnnnnnnnnnnnnnnnnnnnnnnnnnnnnnnnnnnnnnnnnnnnnnnnnnnnnnnnnnnnnnnnnnnnnnnnnnnnnnnnnnnnnnnnnnnnnnnnnnnnnnnnnnnnnnnnnnnnnnnnnnnnnnnnnnnnnnnnnnnnnnnnnnnnnnnnnnnnnnnnnnnnnnnnnnnnnnnnnnnnnnnnnnnnnnnnnnnnnnnnnnnnnnnnnnnnnnnnnnnnnnnnnnnnnnnnnnnnnnnnnnnnnnnnnnnnnnnnnnnnnnnnnnnnnnnnnnnnnnnnnnnnnnnnnnnnnnnnnnnnnnnnnnnnnnnnnnnnnnnnnnnnnnnnnnnnnnnnnnnnnnnnnnnnnnnnnnnnnnnnnnnnnnnnnnnnnnnnnnnnnnnnnnnnnnnnnnnnnnnnnnnnnnnnnnnnnnnnnnnnnnnnnnnnnnnnnnnnnnnnnnnnnnnnnnnnnnnnnnnnnnnnnnnnnnnnnnnnnnnnnnnnnnnnnnnnnnnnnnnnnnnnnnnnnnnnnnnnnnnnnnnnnnnnnnnnnnnnnnnnnnnnnnnnnnnnnnnnnnnnnnnnnnnnnnnnnnnnnnnnnnnnnnnnnnnnnnnnnnnnnnnnnnnnnnnnnnnnnnnnnnnnnnnnnnnnnnnnnnnnnnnnnnnnnnnnnnnnnnnnnnnnnnnnnnnnnnnnnnnnnnnnnnnnnnnnnnnnnnnnnnnnnnnnnnnnnnnnnnnnnnnnnnnnnnnnnnnnnnnnnnnnnnnnnnnnnnnnnnnnnnnnnnnnnnnnnnnnnnnnnnnnnnnnnnnnnnnnnnnnnnnnnnnnnnnnnnnnnnnnnnnnnnnnnnnnnnnnnnnnnnnnnnnnnnnnnnnnnnnnnnnnnnnnnnnnnnnnnnnnnnnnnnnnnnnnnnnnnnnnnnnnnnnnnnnnnnnnnnnnnnnnnnnnnnnnnnnnnnnnnnnnnnnnnnnnnnnnnnnnnnnnnnnnnnnnnnnnnnnnnnnnnnnnnnnnnnnnnnnnnnnnnnnnnnnnnnnnnnnnnnnnnnnnnnnnnnnnnnnnnnnnnnnnnnnnnnnnnnnnnnnnnnnnnnnnnnnnnnnnnnnnnnnnnnnnnnnnnnnnnnnnnnnnnnnnnnnnnnnnnnnnnnnnnnnnnnnnnnnnnnnnnnnnnnnnnnnnnnnnnnnnnnnnnnnnnnnnnnnnnnnnnnnnnnnnnnnnnnnnnnnnnnnnnnnnnnnnnnnnnnnnnnnnnnnnnnnnnnnnnnnnnnnnnnnnnnnnnnnnnnnnnnnnnnnnnnnnnnnnnnnnnnnnnnnnnnnnnnnnnnnnnnnnnnnnnnnnnnnnnnnnnnnnnnnnnnnnnnnnnnnnnnnnnnnnnnnnnnnnnnnnnnnnnnnnnnnnnnnnnnnnnnnnnnnnnnnnnnnnnnnnnnnnnnnnnnnnnnnnnnnnnnnnnnnnnnnnnnnnnnnnnnnnnnnnnnnnnnnnnnnnnnnnnnnnnnnnnnnnnnnnnnnnnnnnnnnnnnnnnnnnnnnnnnnnnnnnnnnnnnnnnnnnnnnnnnnnnnnnnnnnnnnnnnnnnnnnnnnnnnnnnnnnnnnnnnnnnnnnnnnnnnnnnnnnnnnnnnnnnnnnnnnnnnnnnnnnnnnnnnnnnnnnnnnnnnnnnnnnnnnnnnnnnnnnnnnnnnnnnnnnnnnnnnnnnnnnnnnnnnnnnnnnnnnnnnnnnnnnnnnnnnnnnnnnnnnnnnnnnnnnnnnnnnnnnnnnnnnnnnnnnnnnnnnnnnnnnnnnnnnnnnnnnnnnnnnnnnnnnnnnnnnnnnnnnnnnnnnnnnnnnnnnnnnnnnnnnnnnnnnnnnnnnnnnnnnnnnnnnnnnnnnnnnnnnnnnnnnnnnnnnnnnnnnnnnnnnnnnnnnnnnnnnnnnnnnnnnnnnnnnnnnnnnnnnnnnnnnnnnnnnnnnnnnnnnnnnnnnnnnnnnnnnnnnnnnnnnnnnnnnnnnnnnnnnnnnnnnnnnnnnnnnnnnnnnnnnnnnnnnnnnnnnnnnnnnnnnnnnnnnnnnnnnnnnnnnnnnnnnnnnnnnnnnnnnnnnnnnnnnnnnnnnnnnnnnnnnnnnnnnnnnnnnnnnnnnnnnnnnnnnnnnnnnnnnnnnnnnnnnnnnnnnnnnnnnnnnnnnnnnnnnnnnnnnnnnnnnnnnnnnnnnnnnnnnnnnnnnnnnnnnnnnnnnnnnnnnnnnnnnnnnnnnnnnnnnnnnnnnnnnnnnnnnnnnnnnnnnnnnnnnnnnnnnnnnnnnnnnnnnnnnnnnnnnnnnnnnnnnnnnnnnnnnnnnnnnnnnnnnnnnnnnnnnnnnnnnnnnnnnnnnnnnnnnnnnnnnnnnnnnnnnnnnnnnnnnnnnnnnnnnnnnnnnnnnnnnnnnnnnnnnnnnnnnnnnnnnnnnnnnnnnnnnnnnnnnnnnnnnnnnnnnnnnnnnnnnnnnnnnnnnnnnnnnnnnnnnnnnnnnnnnnnnnnnnnnnnnnnnnnnnnnnnnnnnnnnnnnnnnnnnnnnnnnnnnnnnnnnnnnnnnnnnnnnnnnnnnnnnnnnnnnnnnnnnnnnnnnnnnnnnnnnnnnnnnnnnnnnnnnnnnnnnnnnnnnnnnnnnnnnnnnnnnnnnnnnnnnnnnnnnnnnnnnnnnnnnnnnnnnnnnnnnnnnnnnnnnnnnnnnnnnnnnnnnnnnnnnnnnnnnnnnnnnnnnnnnnnnnnnnnnnnnnnnnnnnnnnnnnnnnnnnnnnnnnnnnnnnnnnnnnnnnnnnnnnnnnnnnnnnnnnnnnnnnnnnnnnnnnnnnnnnnnnnnnnnnnnnnnnnnnnnnnnnnnnnnnnnnnnnnnnnnnnnnnnnnnnnnnnnnnnnnnnnnnnnnnnnnnnnnnnnnnnnnnnnnnnnnnnnnnnnnnnnnnnnnnnnnnnnnnnnnnnnnnnnnnnnnnnnnnnnnnnnnnnnnnnnnnnnnnnnnnnnnnnnnnnnnnnnnnnnnnnnnnnnnnnnnnnnnnnnnnnnnnnnnnnnnnnnnnnnnnnnnnnnnnnnnnnnnnnnnnnnnnnnnnnnnnnnnnnnnnnnnnnnnnnnnnnnnnnnnnnnnnnnnnnnnnnnnnnnnnnnnnnnnnnnnnnnnnnnnnnnnnnnnnnnnnnnnnnnnnnnnnnnnnnnnnnnnnnnnnnnnnnnnnnnnnnnnnnnnnnnnnnnnnnnnnnnnnnnnnnnnnnnnnnnnnnnnnnnnnnnnnnnnnnnnnnnnnnnnnnnnnnnnnnnnnnnnnnnnnnnnnnnnnnnnnnnnnnnnnnnnnnnnnnnnnnnnnnnnnnnnnnnnnnnnnnnnnnnnnnnnnnnnnnnnnnnnnnnnnnnnnnnnnnnnnnnnnnnnnnnnnnnnnnnnnnnnnnnnnnnnnnnnnnnnnnnnnnnnnnnnnnnnnnnnnnnnnnnnnnnnnnnnnnnnnnnnnnnnnnnnnnnnnnnnnnnnnnnnnnnnnnnnnnnnnnnnnnnnnnnnnnnnnnnnnnnnnnnnnnnnnnnnnnnnnnnnnnnnnnnnnnnnnnnnnnnnnnnnnnnnnnnnnnnnnnnnnnnnnnnnnnnnnnnnnnnnnnnnnnnnnnnnnnnnnnnnnnnnnnnnnnnnnnnnnnnnnnnnnnnnnnnnnnnnnnnnnnnnnnnnnnnnnnnnnnnnnnnnnnnnnnnnnnnnnnnnnnnnnnnnnnnnnnnnnnnnnnnnnnnnnnnnnnnnnnnnnnnnnnnnnnnnnnnnnnnnnnnnnnnnnnnnnnnnnnnnnnnnnnnnnnnnnnnnnnnnnnnnnnnnnnnnnnnnnnnnnnnnnnnnnnnnnnnnnnnnnnnnnnnnnnnnnnnnnnnnnnnnnnnnnnnnnnnnnnnnnnnnnnnnnnnnnnnnnnnnnnnnnnnnnnnnnnnnnnnnnnnnnnnnnnnnnnnnnnnnnnnnnnnnnnnnnnnnnnnnnnnnnnnnnnnnnnnnnnnnnnnnnnnnnnnnnnnnnnnnnnnnnnnnnnnnnnnnnnnnnnnnnnnnnnnnnnnnnnnnnnnnnnnnnnnnnnnnnnnnnnnnnnnnnnnnnnnnnnnnnnnnnnnnnnnnnnnnnnnnnnnnnnnnnnnnnnnnnnnnnnnnnnnnnnnnnnnnnnnnnnnnnnnnnnnnnnnnnnnnnnnnnnnnnnnnnnnnnnnnnnnnnnnnnnnnnnnnnnnnnnnnnnnnnnnnnnnnnnnnnnnnnnnnnnnnnnnnnnnnnnnnnnnnnnnnnnnnnnnnnnnnnnnnnnnnnnnnnnnnnnnnnnnnnnnnnnnnnnnnnnnnnnnnnnnnnnnnnnnnnnnnnnnnnnnnnnnnnnnnnnnnnnnnnnnnnnnnnnnnnnnnnnnnnnnnnnnnnnnnnnnnnnnnnnnnnnnnnnnnnnnnnnnnnnnnnnnnnnnnnnnnnnnnnnnnnnnnnnnnnnnnnnnnnnnnnnnnnnnnnnnnnnnnnnnnnnnnnnnnnnnnnnnnnnnnnnnnnnnnnnnnnnnnnnnnnnnnnnnnnnnnnnnnnnnnnnnnnnnnnnnnnnnnnnnnnnnnnnnnnnnnnnnnnnnnnnnnnnnnnnnnnnnnnnnnnnnnnnnnnnnnnnnnnnnnnnnnnnnnnnnnnnnnnnnnnnnnnnnnnnnnnnnnnnnnnnnnnnnnnnnnnnnnnnnnnnnnnnnnnnnnnnnnnnnnnnnnnnnnnnnnnnnnnnnnnnnnnnnnnnnnnnnnnnnnnnnnnnnnnnnnnnnnnnnnnnnnnnnnnnnnnnnnnnnnnnnnnnnnnnnnnnnnnnnnnnnnnnnnnnnnnnnnnnnnnnnnnnnnnnnnnnnnnnnnnnnnnnnnnnnnnnnnnnnnnnnnnnnnnnnnnnnnnnnnnnnnnnnnnnnnnnnnnnnnnnnnnnnnnnnnnnnnnnnnnnnnnnnnnnnnnnnnnnnnnnnnnnnnnnnnnnnnnnnnnnnnnnnnnnnnnnnnnnnnnnnnnnnnnnnnnnnnnnnnnnnnnnnnnnnnnnnnnnnnnnnnnnnnnnnnnnnnnnnnnnnnnnnnnnnnnnnnnnnnnnnnnnnnnnnnnnnnnnnnnnnnnnnnnnnnnnnnnnnnnnnnnnnnnnnnnnnnnnnnnnnnnnnnnnnnnnnnnnnnnnnnnnnnnnnnnnnnnnnnnnnnnnnnnnnnnnnnnnnnnnnnnnnnnnnnnnnnnnnnnnnnnnnnnnnnnnnnnnnnnnnnnnnnnnnnnnnnnnnnnnnnnnnnnnnnnnnnnnnnnnnnnnnnnnnnnnnnnnnnnnnnnnnnnnnnnnnnnnnnnnnnnnnnnnnnnnnnnnnnnnnnnnnnnnnnnnnnnnnnnnnnnnnnnnnnnnnnnnnnnnnnnnnnnnnnnnnnnnnnnnnnnnnnnnnnnnnnnnnnnnnnnnnnnnnnnnnnnnnnnnnnnnnnnnnnnnnnnnnnnnnnnnnnnnnnnnnnnnnnnnnnnnnnnnnnnnnnnnnnnnnnnnnnnnnnnnnnnnnnnnnnnnnnnnnnnnnnnnnnnnnnnnnnnnnnnnnnnnnnnnnnnnnnnnnnnnnnnnnnnnnnnnnnnnnnnnnnnnnnnnnnnnnnnnnnnnnnnnnnnnnnnnnnnnnnnnnnnnnnnnnnnnnnnnnnnnnnnnnnnnnnnnnnnnnnnnnnnnnnnnnnnnnnnnnnnnnnnnnnnnnnnnnnnnnnnnnnnnnnnnnnnnnnnnnnnnnnnnnnnnnnnnnnnnnnnnnnnnnnnnnnnnnnnnnnnnnnnnnnnnnnnnnnnnnnnnnnnnnnnnnnnnnnnnnnnnnnnnnnnnnnnnnnnnnnnnnnnnnnnnnnnnnnnnnnnnnnnnnnnnnnnnnnnnnnnnnnnnnnnnnnnnnnnnnnnnnnnnnnnnnnnnnnnnnnnnnnnnnnnnnnnnnnnnnnnnnnnnnnnnnnnnnnnnnnnnnnnnnnnnnnnnnnnnnnnnnnnnnnnnnnnnnnnnnnnnnnnnnnnnnnnnnnnnnnnnnnnnnnnnnnnnnnnnnnnnnnnnnnnnnnnnnnnnnnnnnnnnnnnnnnnnnnnnnnnnnnnnnnnnnnnnnnnnnnnnnnnnnnnnnnnnnnnnnnnnnnnnnnnnnnnnnnnnnnnnnnnnnnnnnnnnnnnnnnnnnnnnnnnnnnnnnnnnnnnnnnnnnnnnnnnnnnnnnnnnnnnnnnnnnnnnnnnnnnnnnnnnnnnnnnnnnnnnnnnnnnnnnnnnnnnnnnnnnnnnnnnnnnnnnnnnnnnnnnnnnnnnnnnnnnnnnnnnnnnnnnnnnnnnnnnnnnnnnnnnnnnnnnnnnnnnnnnnnnnnnnnnnnnnnnnnnnnnnnnnnnnnnnnnnnnnnnnnnnnnnnnnnnnnnnnnnnnnnnnnnnnnnnnnnnnnnnnnnnnnnnnnnnnnnnnnnnnnnnnnnnnnnnnnnnnnnnnnnnnnnnnnnnnnnnnnnnnnnnnnnnnnnnnnnnnnnnnnnnnnnnnnnnnnnnnnnnnnnnnnnnnnnnnnnnnnnnnnnnnnnnnnnnnnnnnnnnnnnnnnnnnnnnnnnnnnnnnnnnnnnnnnnnnnnnnnnnnnnnnnnnnnnnnnnnnnnnnnnnnnnnnnnnnnnnnnnnnnnnnnnnnnnnnnnnnnnnnnnnnnnnnnnnnnnnnnnnnnnnnnnnnnnnnnnnnnnnnnnnnnnnnnnnncaaaaactaaacaggcacggtggcacatgcctgtagtcccaactactcgggtagactgagcaggtgggaggattgcttgagccagagaggtcgaggctgcaatgagccatgatcgtgccactgcactccagcccgggcagcagagccagaccttgtctcaaaaaaaaatgctatgctgtatgctttattatattaatatccaataccataaaggcaaatgccttctatatagagagaactagattaataatggtgagataacatagttaaattctcgtttagcaggagaaataaaaacatagactataggctaggcacagtggctcatgcctgtactcccagcacattgggaggctgaggtgggcagatcacttgaggtcaggagttcgagaccagcctggccaacatggtgaaaccccatctctactaaaaatacaaaagttagccgagtttggtggcgcatgcctgtaatcccagctactcaggaggctgaggcaggaaaatcgcttgaacctgggaggcgggggttgcagtgagctgagatcacgccactgcactccagcgtggggaacagagtgaggatctgttaaaacaaacaaacaaacaaaaaaaaaacacatggactctaataatacatggatacatttagtgaaataaggttaactgagtagagcagcactcataacattttaaaactataagaacatgtctgtacattagcaaatattagatgagaataatattgtcaatatttacttctggtaatttgaaattaaaaaacaaaactgttagcaaaatttacaataaagtataattattagaaaccaggctgggcacggtggctcacgcttataatcccagcactttgaaaggccgaggcaggcggattgtttgaggccaggagttcaagactagcctgcccaacatggccaaaccccatctctactaaaaatacaaaaataaaccagacatggtggtgcatgcctgtgatcccagctactcgggaggttgaggtgggaggattgcttgacctgggaagtagaggttgcagttagccatgattgtgccactgcactccagcctgggtgacagcaagactctgtcccaaggttttgttttggttaacttgctgtctcttttccaggaattccttgtgggctacccccaaccatcgccaatggagatttcattagcaccaacagagagaattttcactatggatcagtggtgacctaccgctgcaatcttggaagcagagggagaaaggtgtttgagcttgtgggtgagccctccatatactgcaccagcaatgacgatcaagtgggcatctggagcggccccgcccctcagtgcattatacctaacaaatgcacgcctccaaatgtggaaaatggaatattggtatctgacaacagaagcttattttccttaaatgaagttgtggagtttaggtgtcagcctggctttgtcatgaaaggaccccgccgtgtgaagtgccaggccctgaacaaatgggagccagagttaccaagctgctccaggggtgagtctgactgatgcctagaagggccctgccagtgacatgtgttgctgttggatcaggagatgagtatttgttaagggggaggtatgtatggtgaggagggtgggaaagtaagttttgggggaagaagcatgaaattaagaattgggggtgtgcatgcacccatgcatatgtgtcttcatttggaaagcaagaccttaattagccaagaaaaaagctattttggactcacctattatttgattctcagggcaaagtaccagctgcaatctctctcaagtatattgaaaaattatatggactttctctatgatcagctatgtgctaagcactttatatgcattttctcattcattatttacaacaacactttgaaattgtgctattgtattatccatttaatagtgacatcagcttgatctttcagaggttaaataaattagctaagtcacatgttctaagcgagacacccaggattttaaaatgcaagtgtatcagaccccagagtctgaatgttttggctcttgccatactttcatcagtatccattgctgaaagaaagagactggcttacaaagacagaaatcatagcctcagaatagacaaagaccttagagtttgtctataatggtctgcctcctacattttattttgattttattttatttaaaaactatttattagagttgacgtcccactctgttgcccaggctgaagtacagtgatacaatcatggctcactgcagcctcagattcctaggctcaagccatccacgtcctacattttatccctaggagtctaagtcaagagtgaaagtaacttgttcaaagtcagttaaatatttctaaattcatgtttaatgaggtatagattaggttgatgttaaaatgggttctgatgccctaagcatgaacgaacaggactataaataaaggcagatgttgagtcaaatactctccaaataatatgccctctcgtgacaaaggactgtcttatttaagggcttgtgtttttgatggctcatcttgtctactgatgccacaatagctggcttagcagctgtgtaggaggtgttatggttgatacatagggacagagaaggagcttacgattcttctaccaacccatgttagccttgtgcaaccactgagctgggaagatgaacagataaagggatataaagacggatgtactgaggcaggagatgggcagggcttgtgttctggtcacaatcctgctgaccaaaacaggctctggcccagacaggatgaagtgaaaaaacagcaggaaccagcagatggcgatgaaagcaattgctagctgccctcatagtcccatcagcaccatgacagtttacaaatgccatggcaacgacctagaagttaccgcccctttcctggaaagttctaaataactcgcccctcaatctgcattgatccactccttaatttacatgtaactgaaatgggtttacagcagtataaacacagttgcctgccaggaacccttatgttgctgactctgggtgtgctgcctgtgagttagccctgctctgcaagaagcagtgcctttcactaacagattgctgtctagcaccactggctcatccttgaattctgtcctggatgaggcaagaacccttccagagtaagccccaatttaggggcatgcctgtcccgaaacagtatgactgtactttagtcattggtgtgcaatcagagaaatcgggggaaatctgtaaaacagatttggtctcaggtgacagtctcattacctgaataacaatggtacaaatcgggattaccttcctaggaaatatgtagatggagaatccaccaatactgataacttcacattggatagccagagctaggagaaaatacctcatgccctgtagatttacaagtgaatttggggccttgtgctagggagaattgggttctatttctctacctctgactagctatgaggtcttcaggaagcataggaaattcccccataactaacaagtactctggaactgtcctttccacagtgtgtcagccgcctccagaaatcctgcatggtgagcataccccaagccatcaggacaacttttcacctgggcaggaagtgttctacagctgtgagcctggctatgacctcagaggggctgcgtctctgcactgcacaccccagggagactggagccctgaagccccgagatgtgcaggtgcctcaactctctggcttccagatttctctctttaccccacacatggaggtcttactcctattttttcttttttttttttttcttcttctagtgaaatcctgtgatgacttcttgggtcaactccctcatggccgtgtgctatttccacttaatctccagcttggggcaaaggtgtcctttgtctgtgatgaagggtaagtgtgacccagaattcagatcagggactcagcactgcagagtgactcttgagcttaaggatcaatccaaaaagagggctgacctaggagaagaagaatccagggagattaacctctggaagtgtagctttaaaataaaggtagggactaagtggcactactatcaggagataaagagataaagaaaaaatggcgcatataactgagtgtcaagtacaaacagaaatacagtcaccagtccagaaaaggggaccaacctggtggaaaagaagtactagaggagactaatatctgaaacaatgattggaaagtgtggtatgaaccagctggatccatgaacagaagtttaaaaagcaaaaagctcaactcatttgatttctcacttatagaggctcagaagtaaaatcattttggaaaacgtgcagcttccagtaaggcacaaaggaaaaacaatggccgaaatacaaaagatcttgaaaaaaaaagtgtgtatatatatgtatacatacgtatacatatggacacgtatatgtatacgtatacatgtacatgtgtatacatatgtgtatacatggacacgtatatgtagacgtatacatatggacacgtatatgtagacgtatacatatggacacgtatatgtagacgtatacatatggacacgtatatgtatacgtatacatatggacacgtatatgtatacgtatacatgtacatgtgtatatgtatacgtatacatgtccatatgtatacgtatatgtatacatatgtatatatacatatgtatatacatatatatggaacatatgtatatatacatatgtatatacatatatacatggaacattagatgtatgaataaataataatttgcagacatgaagagataaataaatattctaggggttgttaagaaaagtttgatatataagagaaagttgtatataagataaaataacatgcaaagattatttcacaaaacttttaatcaaataaatagtggaatttggaataggaacgaaagagtaagtagaaatattctaaattccaattacatgtgattgacagctctgccagctattattgctttgtcctcactgaaagctacactttttccaaaatgatttggcttctgagcccgtcaatgagaaactaagtgagttgagtgttttcacctgtgctttagcttgagcagtaaaatgttaattaacttaggaattctcagggaggaggttgagatctgtcacgaagggaagagagaaatggtgcattcatccagccactactgctttgttctttaggtttcgcttaaagggcagttccgttagtcattgtgtcttggttggaatgagaagcctttggaataacagtgttcctgtgtgtgaacgtgagtagatggaatacttgttcagtctggatctttctgtttttttcttaatatagtttgccccatgggattatctattgtttgtcccgctgtttgtgcccgcttttgatagaaattgttctttgttggaatagatacaagcaatgttttggggaaaaataaacatgagaatcatgtgttttgggtaccatcctataaatatttatgaggagagtctgtgctataaatagagagaaatgcttcatagaaataaatgtatggcaagatgctaggctaaatttttctcttctttcctgtcaaaagtaatagtcatacttcaacttttcagttcttccctcaatcatccatttagtcatatactcattctttcaacagaaaattatttgagcacctactatgtgccaagcaatcttctgggaactggggatatacctataaacaagacagataagtccatgtttaagtttttgtgcaaggataaagacaaaaatcaaagacatgaatagaaatgttcaaatgatactaagtgttattaagaaaatgctcttaattgagtcagtgctgtcaattgagaatgtagctgaggacccaaaaggcaagtgtagcccagcaaacctctgggtgtagctgagggttcaaaatgggaggctgttgcagcaatctaatcagagatgttggcccaggatagcaattgggaaaggtgatgatgagaagtgatcaaattctggatatattttgaaggtgcagatgacaggatttggtgatggttagcttagatagagggtgtgaaagaaagagaagaaacatagccagtttccaggtttttggccagagcaaccgccagggtagaatttcccttagctgaaatgcaggggactgcatgaagtttgggaatgggggaaatcaaaagttaagcttgggacataactttagtgttcctcttagatatccagatggatatgttggagagtcccaggctgcccatagatatgtagaagccatcattgtatctgctatgcttgaaatcaggactgaaagagatcttcacctagggagtgagtgctgctagagaacagatgcatggactgagcctggatgtccaggattaagagttgcaaaggtgagaaggaatcagcaaaggggattatgatgaagcagccactgcagtaagagaaaacacaggagggtgaggtgccctggaagccaagtatggaaattattttaagggattagactaatcaactgtgtcaaattctatagagaggtcaaattaggtgagaacagaaaattgatctttgggtttagcaacttggaggtaacaagtggaagtttcagtggagtgctggcaaacactgattggaatgaattctagggagaatgaatgggaggaactgtaacagatcatagacaatattttagaggagttttcatgtaaagagagtagaaataggactatagctgaagagggaaatgacagcaagaggtttgcttttgatttttaagagggcagaaaatagtgtgttaaaaacagaaacactactatgtcccatctatccatttacttcttcactaaatcaatcagggtattgcttccccttctgatcatagctattaaaaatacatgtttacaatagaattttgctcatatgaatactttgccttaaatcatttcaatgtcttgtattgatttatatgatgaaaatgataatttcatcttacattgttggaagtcagctatttgacaatcttaacttccctggaatagttaagaagtatgaaagaaaagaaaaagaaaataccctcatgaacccaacatatacctgaaatcgcttactagagtgtaaacattggttaagctattttaacctttgattagtttatctataattcttttaagctgtaatatcctcttcccaaattcaaagcaaattagaaaagggaaggagtgtccccaaatagaggcattccaaggaataaatgtgtttctttaatgaaaaaaataaataaataaacccttaaaaaccaatgagtatctcaaaaaaccgtaacattcttgagccttttgaaacacatacaggagtacatagcatttttttttcattgtgacagcattactgcaatctttcatctgtattttgaaaatcatagcctggcatcatcaagaaaaattaaatcactgatatacaaataataaatgtataatatattttagaaagatgtctctaggatgaagactcttgatgtcaaagatcatatttatcctgtgctttaaacagtacttgacatacagcagatattcaaaaacatgcttgttgaattaatggatgattcccctttaatgtgactgtgaagatttttatttactttaaaggaatatactctttattattcagaaatattaactatctgaaaaatttaggatgcttaatttgggaaaggcttttgtaataaacattgatttagttgtcatttcatttagctccatcttagcagaggcctaatacatttattttgcagtttctactttccttaagaagaaaagtacgcttaattggcaacacagtcacagtatgacaactgtagaatcgccttggattatactttaaaattttttatggaattgagagctcttgttttctttctagatatcttttgtccaaatcctccagctatccttaatgggagacacacaggaactccctctggagatattccctatggaaaagaaatatcttacacatgtgacccccacccagacagagggatgaccttcaacctcattggggagagcaccatccgctgcacaagtgaccctcatgggaatggggtttggagcagccctgcccctcgctgtgaactttctgttcgtgctggtcagtatccgcttccacatatcctaaatgggttcagaatatgtggacccaatccctcatgtttctgtaataagactatggtatttgtttgtgagcttaactttgtcataagtgtaaatgtcaaaattacataccatagctaaaacagatgggtttcagcagcgccaaggtatgtttgaatctataagatgaaaactcttcttgctggtggagtggaagagggtgggaaaaagggactgagggaggggtggagggaaggcagtaaggcacagttatgtaaatcaggaagaaaaatgtattcactggagacgacatgaaaacaactgcctctgaacactaaccagtatctgtataattgacagtctccataagttcatgaggggtacatgggcatgcaaagttcaaaattggaaatgtggatattatttagctaaggttttaaactagtgttctgctgcatgggctaagtaaccaaaaagactctctttgtcttgacttaaagtttgtccacttgtcatcttgcctccaggctgtcttaatctttgtacttgaactgttccactcagggggtaagaagcaaggaaagagtagcccaaagaaaagagtaggaaaaggaagaggctatttcttcctaaggaggggaagaagttgcctggtccttcagggcaaacattaggccttttccagagcagaaactggagtagattagggatgtggcaccagccttggaatattccattatccacagggaagccctgagagacaagagccagccaaggtgaaaagactaaacctgatgaaaggcatttaacctttctttgacctttactctccaactgagtggtacccatcagaatgcagtaaatttttttaatgtaaatgcctagaccccagtgcaggcttaatgaacagatggaggaagccttctccaaaaaggaggtaatggagttcagactctatttgaaaatatgcagcacatggctgggcacagtagctcacacctataatcccagcactttggaggccgaggtgagaggattgtttgaggccaggagttcaagaccaacctggccaacacagcaagctcctaactctacaaaaaataagactgaaaaattgtaaaaactgtaaaacaaaaaaagtaaaaatatgcagcacacaatatactctctcagaaagaagacatagcttcttacagaaggctgatggcttagtctgttttgttctggttctttttttgttttgttttgtgtgtgtgtgtgtgtgtgtgtgctttttttgagagagagggtcttactcttttgcccaggtggagtagagtggtgcaatcatagtttactgcagccttgacctccctggctcaagcaagcctcccatctcagcctgccaagtaggtgggaccacaggtgcatgccaccacacccagctaattcttgtattttatgtagaccggttttcatcatgttgcccaggctggtcttgaactcctgggctaaagcaatccacctgccttggcctcccaaagtgctgggactacaaggcgtgagccaccatgcccagcctattttgttctatctttaaatgcctggtttagcatcagaagaaaaacactgtattagtttcctagggctgctgtaacaaattaccacaaactaggtggcttaaaacaaaagaaacttattatttcacagttttgtaggctgaaattgagatgttggcagaggtattttcccatcttctaaggctctggaaaataaccaattctttacttcttccatctgctgctggttcctgggattccttggcattccttggtttgtggatgcatcattcaaatccctgcctccatcatagccttttcccctgtgtctctatatgtcaaatccctccactttttccctgatagggacaccagtcattggatttagggcccactctaaataaaagatgatctaatctcaagaacctaatcttaattctatctgaaaaaccattattccaaataagtttctattctgaggttttaggtagagatatcttttgggagaacatcattcaactcactacaaggggtacctgctatgaaaggccagagaggcagcttatgatgggcaccctgagaatggagtatggagagagatgataaaatatgtcttgctactcaggagtgaattagcacaaacacatgaagatttgagtggttaactgaggatataggcactccgataggaggtcagaatgtgaaactacaagctgaagttcttgctttggtgaaataagggaagaaagatcagaaagctgagtggtcttccaaatagtaaaaaaaatcctgctgagtagatgcattgaagagcttcatcccaaggtaacatcaaggagaagaaaatcttttgctattcttgtaagtctctttgtttctgtgatccacctatcagcttaattgaagagaaagaggaggtagggtggaagtctctctgctaactttgatattcctgtggtttttctctccaggtcactgtaaaaccccagagcagtttccatttgccagtcctacgatcccaattaatgactttgagtttccagtcgggacatctttgaattatgaatgccgtcctgggtattttgggaaaatgttctctatctcctgcctagaaaacttggtctggtcaagtgttgaagacaactgtagacgtgagtaacccctccctgggaactacttcatgtctgttaaagcataggtgggaccgggcttggtggctcacgcctgtaatcccatcactttgggaggccaaggctggcagatagcttgaactcaggagttcgcaaccagcctgggcaacatggccaaaccccacgtctacaaacaacaacaacaaaaacaacgtaggtgggatttgattcaatttgctcaaattttggaagcaagatgtctatatttgcccaagatattttgataaaggaaaggatggtcttgtacatcaccccttcttcttgcttgtagttcctgaaccttgactagatgctcatttcatgagaatggctctcacaaaagaattagagagaaaatttacattcactgtagatcatccttgatggctgacaccattaaatgaatgaaacaggggtacaaaagaaatttatgtgagttgcagtgaactgtgcttggctaactaaaaataggggagacatcccaaattttgaggcctttgattttggctggcggaatgagagtacaacactttagccataaatgacttgttttgtttttgttttgtttctgctgttgctgttgtgttttttgtttgtttgtttgtttgtttctgagatggagccttactctgtcacccaggccggagtgtagtggcgcgatcttggctgcaacctcctgggttcgagcaagtctccctgcctcagcctctcgagtaactgggattacaggcacccactcccatgcccagctaatttttgtattttttagtagagatggggttttgccacgttggccaggctggtcttgaactcctgacctcaggtgatctgccggcctcggcctcccaaagtgctaggattacaggcgagagcccatacataacctttattaggaggtgcaagatagtctttttcaaagttgtgttcgtagctacatgattctgaagttgtctgccaagtttcctcaaagcagtcaattccatgaaacaattggaactgtatatgctgtttagtatgccacactccagtctgaaccttacaaaggtaagttgaactctatatttaatcccaaattctgcttcttcccctaggaaaatcatgtggacctccaccagaacccttcaatggaatggtgcatataaacacagatacacagtttggatcaacagttaattattcttgtaatgaagggtgagttgagaataccatctcttgaatatgagttccagaacagcagagccaacttctgacccagtctcagatagacaaactaaactattgctccctttactttaaaagcaagcaataggacttatagatggagatgatacgttggacatagccatatgatcaaaggaatacaaaaaagaaggtacaatatgtattgtattgtaaaccagaggagggcaacatgttcctgtcaaaggtgatacatgtgaaacctggtcaggcattcattggatgaaaaggagcagcttacaaataaggaaaaggaaaaaaggtagttgaaccatgtaaacctccttaactgagatcagtaggtaatacagttgagttggaggaccctgaagcagagtttgggagggtaaacattaattgtaacagcagctctggaagagtatgcatcaaagtgcacacagagaggagacattatggggttcttgctcttgacttctccttgggacaagtagccacaccaaaagccattgcctcaactgagaaggggcttttaaaaactctggagtggacctccatcaaactccagcagacctgcagcagaggggcctgactgttagaagataaactaacaaacataaaggaatagcatcaacattaacaaaaaggacgtccacatgaaaaccccatccaaaggtcaccaacatcaaagaccaatgatagataaatccacgaagatgaggaaaaaccagcacaaaaaggctgaaaattcccgaaaccagaatgcctcttctcctccaaaggatcacaactccttgccagcaagagaacaaaactgggtggagaatgagtgagttggacagattgacagaagtaggcttcagaaggtgggtaataacaaactcctctgagctaaaggagcatgttctaacccaatgcaaggaagcgaagaaccttgaaaaacaggttagaggaattactaactagaataaccagtttagaaaagaacataaatgacctgatggagctgaaaaacacagcacaagaacttcatgaagcatacacaagtatcaatagccgaatcgatcaagtgaaacaaaggatatcagagattgaagatcaacttaatgaaataaagcatgaagacaaaaaaagaatgaaaaggaatgaacaaagcctccaagaaatatgggactatgtgaaaagaccaaacctacgtttgattggtgtacctgaaagtgacggggagaatggaaccaagttggaaaacactcttcaagatattatccaggagaactgccccaacctagcaagacagtccagcattcaaattcaggaaatacagagaacaccacaaagatactccttgagaagagcaaccccaagacacgtaattgtcagattcaccaaggttgaaatgaaggaaaaaaatgttaagggcagccagagagaaaggtcgggttacctacaaagggaagcccatcagactaacagtgaatctctctgcagaaaccctacaagccagaagagagtgggggccaatattcaacattcttaaagaaaagaattttcaacccagaatttcatatctagccaaactaagcttcataagtgaaggagaaataaaatcctttacagacaagcaaatgctgagggattttgtcaccaccagacttgccttacaagggctcctgaaggaagcactaaacatggaaaggaataactggtaccagccactgcaaaaacataccaaattgtaaagaccatcaacaatatgaagaaaccacatcaactaatgggcaaaataacaaatcagcatcataatgacaggatcaaatttacacataacaattctaacattaaatgtaaattggctaaatgcccccagttaaaagacactgactggcaaattggataaagagtcaagacccattggtgtgctgtattcaggagacccatctcatgtgcaaagacacacataggcgcaaaataaagggatggaggaatatttaccaagcaaatggaaagcaaataaaagcaggggttacagtcctagtctctgataaaacatactttaaaccaacgaagatcaaaagagacaagagcattacataatggcaaaggatgcaacaagaagagctaactatcctaaatatatatgcacccaatacaggagcacccagattcataaagcaagttctgaaagatctataaagagacttagattcccacacaataatagtgggagactttaacaccccactgtcagtattagacaggtcaacgagacagaaaattaacaaggatattcaggacctgaactcagctctggaccaagcagacctaatagacatctatagaactctccaccccaaatcagcagaatatacattcttctcagcaccacatagcaattattctaaaattgaccacataattggaagtaaagcactcctcaaaatgcaaaagaatggaaatcataacaaacagtctctcagaccacagtacaatcaaattagaactcaggattaagaaactctctcaaaactgcacaactacatggaaactgaacagcctgctctgaatgactactgggtaaataacgaaatgaaagcagaaataagtaagttctttgaaaccgatgaaaacaaagacacaatgtaccagaatctctgggacacagccaaagagtgtttagagcactaaatttatagcactaaatgcccacaggagaaagcagaaaagatctaaaatcgacgccctgacatcgcaattaaagaactagagaagcaagagcaaacaaattcaaaagctagcagaagagaagaaataactaagatcagagcagaactgaaggagatagagaaacaaaaaacccttcaaaaaatcaatgaatccaggagctggttttttgaaaagattaacaaaatagaccactagccagactaataaagaaaaagagagaagaatcaaatagacacaataaaaaatgataaaggggatatcaccactgatcccacagaaatacaaactaccatcagagaatactataaacacctctacgcaaataaactagaaaatctagaagaaatggataaattcctggatacatacaacctcccaagactaaaacaggaagaagtcgaatccctgaataggccaaaaacaagttctgaaattgaggaagtaattaatagcctaccaaccaaaaaaagcccaggaacagatggattcatagctgaatcctaccagaggtacaaagaggagctggtaccattccttctaaactattccaaacaatagaaaaagagggactcctccctaactcattttatgaggccagcatcatcctgataccaaaacctggcagagacacaataaaaaaggaaaatttcaggccaatatccctgatgaacattgatgcaaaaatcctcaataaaatactggcaaacgaaattcagcagcacatcaaaaagcttatccacaacgatcaagctggcttcatccctgagatacaaggctggttcaacatacgcaaatcaataaacgtaatccatcacattaacagaaccaatgataaaaaccacatgattatctcaatagatgcagacaagggcttcgataaaattcaacagcccttcatgctaaaaactctcaataaactaggtattgatggaatatgtcccaaaataataggagctatttataacaaacccaccactaatatcatactgaatgggcaaaagctggaagcatgcgctttgaaaaccagcacaagacaaggatgccctctctcaccactcctattcaacatagtattggaagctctggccagggcaatcaggcaagagaaaggaataaagggtattcaaataggaagagaggaagtcaaattgtctctgtttgcatatgacatgactgtatatttagaaaaccccattatctcagcttaaaatatccgtaatctgataagcaacttcagcaaagtctcaggatacaaaatcaatgcaaaaatcacaagcattcctatacaccaataatagacaaacagagagccaaatcatgagtgaactcccattctaaattcctgcaaagtgaataaactaccttggaatacaacttacaagggaagtgaaggacatcttcaaggagaactacaaaccactgctcaaggaagtaagcgaggacacaaacaaatgaaaaaaacatttcacgattgtggataggaagaatcaatatcatgaaaatggccatactgcccaaggtaatttatacagtcaatgctatccccatcaaattaccaatggctttcttcacagaattacaaaaaaaaaaaaaaaaaaactactttaaacttcatatggaaccaaaaaatagcccatatagccaagacaatcctaagcaaaaagaacaaagctggaggcaccacgctacatgacttcaaactatactataaggctacagtaagcaaaacagcatcgtactggtaccaaaacagatatatagaccaatggaacagaacagaggcctcagaaataatgccacacatctacaaccatctgatctttgatgaacctgacaaaaacaagcaatggggaaaggattccctatttaataaatggtgttgggaaaactggctagccagatgcagaaaactgaagctggaccccttcctttacaccttatacaaaaactaactcaagatgtattaaagacttaaatgtaagacctaaaactataaaaaccctagaagaaaacctaggcaataccattcaggacataggcatgggcaaagacttcattactaaaacaccaaaagcaatggtaacaaaaaccaaaattgacaaatgggatctaatgaaactaaagagcttctgcacagcaagagaaactatcatcagagtgaacagacaacctacagaatgggagaaaatttttgcaatccatccatatgacaaaggactaatatccagaatctacaagggaacttaaacaaatttacaagaaaaaacaaccctatcgaaaagagggcaaaggatatgaacagacatttctcaaaagaagacatttatgcagccaacaaacatgaaaaaaagctcatcatcactggtcattagagaaatgcaaatcaaaaccacattgagataccatcttgggccagttagaatggcaatcactaaaaagtcaggaaacaacagatgctggagaggatgtggagaaatagaaatgcttttacactgttggtgggagtgtaaattcgttcaaccattgtggatgacagtgtggtgattcctcaaggatctagaaccagaaataccatttgacccagcaatcccattactgagtatatacccaaaggattataaatcatccttctataaagacacatgcacacgtatgtttattgcagcactgttcacaatagcaaagacttggaaccaacccaaatgcccatcaatgatagactggataaagaaaatgtggcacatatacaccatggaatactatgcagccataaaaaaggatgagttcatgtcctttgcagggacatttatgaagctagaaaccatcattctcagcaaactaacacaagaacagaaaaccaaccaccgcatgttctcattcctaagtgggagttgaacaatgagaacacatggacacaccgaggggaacatcacacagtggggcccgtcagagggtaggagtccaggggagggatagcattaggagaaatagccaatgtagatgatgggttgatggtgcagcaaaccaccatgacatgtgtatacctatgtaacaaacctgcacgtcctgcacatgtatcccagaatttaaagtatgataataaaaaaaagactgtgtactcatttttggttgccatgataaattcagagaggaaaaacatgatatatattaaattttactgcaacaactaactgccccttgtcatcagcctattctgtcactagagtgagtcagtattcctcttttctgactgtctgagcctggacgatttaaactgcttttcacacaacctcttgcccaaccttttctcacctcccattgtgaatgaacatagatttccctatggtaaacaaaacaaaatatcaccaaatctaaggcaagataaagaaattgaagataaaagaaaccaacccaagagatcagagaaatattcatctgcacaacagcttcctccaataaacaggggacaatctttaaaaatctctcatatgtgtttgtaacatagaatcgatggaactatatgaggcatttataagatttaatgatctgatatcagaaaagttgagatttgaatgaaacacatgggagtcggaaaaggagtgatgactggtagattggagcctgcccccaacccccggaaaaaaaaaaaaaaaacaccaaagggataatgaagacaagattgaattctccagaattcatcaaggaccagacttgaaatgacacatatatacacacaaacacactacacacaaacacacagggatataatatagaaattccagaaaaaataaaagaaagcagaatgaatagaagcattaattagcacataatggaagacaatttctcaggctataaagaaaaatactaagttgatccttgaaggcttactagacaaatcaagattaacaacaatgggccccggccctacatggaagaaaattatgccatccaaatataaaaaaatactgccactctccagaaataacaaaaaagaagaaattcatcttagcaccaagcttccgttctgtaacactaagtagtagaagttagtgtttgagaggaaatattgtacaataaaatttctgtactcggccaagctgccattcatctgcaaggcacagatgcatcgtcttaaataagaaggaaccccaaacatacaccagttagatatactgcctacaaaaagaaaaactcccacaaagctgtgggagtttttctttttgaagaagaaatcaaaattccaaatggtgttgtatcaaagaaatattaatgaggcacaaaactagttaaatggggtcactaaaactgttttatttaatatggaaataaaatatcaaagcaggactaattcttgaaagataattcatgtaatatgaaaagaagaagaaacttgatataaaaaatagattttatcacttcagctaggaagttagagatgaagtaagaaaaaccatcataaacttatcatatgtaggggacacatattcttgacataaaaaataaggagaaaatggtacttcacaccagtataaaatctatatatctatatctatatatatctatatctatatctatatatatatatataatcaaattttaaaagataatcagaagggcgaaaccacttggtccataaaacaaaagaggggtgagagaaacaagagctagcaagctttctgtctctcttttgggaaactagcattattacgttaaagtgaattaatacatgtattttaatgcctcagtttttctttctaatataataaatattaacagatataaactccattggtaaaatcactttgaggtccttaatacttcttaaagtggccgggcgctgtggctcatgcctgtaatcccagcactttgggaggctgaggcgggcagaacacctgaggtcgggagttcaagaccagcctggccaacatggagaaaccctgtctctactaaaaaatacaaaattagccaggtgtggtggcgcatgcctgtaatcccagctactcgggaggctgaggcaggagaatcacttgaacccgggaggcggaggttgcagtgagccgagatggtgccactgcaccccagcctgggcaacaagagcgaaactctgtctcaaaaaataataataataataataacaataacaataacaaaaatgtttaagagtgaaaagaattcttgagaccaaaaaagtttaagaactagggcttgatgatgttcaagcaaagataggaaaaggctattgcaagtacggtacaaagcacagggggaaggtttcataagtatatatataatatatatataatataacataaaattcatatatattataaaaataataaatatgatataaatttgatataaaatattatataaatctgatttttaacatattttgattttatactggtgtaaagtactattttctctttattttttacatcaagaatatgtatcccctacatagtataagtttatcatagtttttcttacttcattcctaacttcctagttgtagtgataaaatctattattttatatcaataaaaatattgatataaattttatttacatgatatacaatatttaaatataacatattttatattacaaaatatactactatgtattacaaaaaaaaaaacaaactccatttagcagagcaagaatggagtttgttttgtacagtgctgagttccaacccatagaattgttaaataaataaaaaggaaagaacactataagatcaaactcatcagttataatagtaaatgtgaatgattccaatccccccttttgaaagacaaaggcttctaaatatggtcagaatcctatttacagtagcatcaaaaagaataaaatacttaggaatcaatttaatcaaggaggcacaagacctgtgcactgaaaactcagtaactgaaaatgagcaaatgatgtgatagacatgtctccaagggaaatatacaaatgcccaataaacacatcaaaagatgttcaacatcattagtcattagggaagtgcaagtcaacctgactttgtactaggatgttttgtattaggatggttataatatttttaaaaaataggaaataaaaggtgttggcgaggatgtggagaaattagaacgcttatacattgctggtggaaatgtaaaatggtgtagcactgtggaaaacagtttgatgattcctgaaaaagttaaacatagaattaccatataaccagcaattctgctcctaggcatatacctaaagaaattgaaaacaaggactgaagcagatgctcaaataccaatgtccgtagcagctttgttcaaaatagccaaaaggtagaaacaacccaagtatctacgagcagatgaatggataaatgaaatggagcttatccattccatggaatattcttcagctatacaaaggaatagagttctgatacatgctacaagatgcataaactttaaaaacattatgctaagtgaaatgagccagacacaaaaggataaatactgtattccacttttatgaggtgccaaaaataagaaaatttattggactaaaaatagattagagataaccagtggaaggagagaatagggagttacaactcaatacatccagtttctcattgggatggtgaaaatttttggaactaagcagtgataatggttgtataatgttgtgaatgtcattgatgccactgaattatacccttaaaatggttttaatggcaaattttatgttgtatctcttttaaaacaataagaaagaaaaaaatttttaaatatatcatgtgatattaggaaagaaaaaaacagataacagtataagaaaaataagaatttaaaacatatcaaataagatttaaaaattttgtttaagatattgatacttggtccagtgcacaataaagacaagaactttttttttttttcttttgagatggagtctcgctctgtcaccaggctggagtgcagtggcactatctcggttcactgcaacctccgcctccagggttcaagccattatcctgcctcagcctgccgagtagctgggactacaggcatgcgccaccacgctgagctcatttctgtatttatagtagagacagggtttcaccatgttggccaggatggtcttgatctcttgacctcgtgatctgcctgcctcggcctcccaaagtgctgggattacaggtgggagccaccgcgcctggcctgaagacaagaacttttgaacaagagagcgctaactaacgtattgaaatacataaaacaaatactgatatatagaagagctcattcagctgtttcaaagacagagctctgtaacacatgtactcttacctaaagaactgtctcccaccactggaaaggaggtcttctctgaccaaatacacagcatcttggagttggccagcattaacttggatcatctggctggccaggaaaggagtgctcagggagaaagaggatggtcaccatcccaaccagattggccattagatctatgtatcaacagagtgacatacgggagaattaaaattctagtatgcaaaaatacgccgtatgttaacagaaaatagactgcagggaaatttgtattaggtaaaaccgagagaaagttaagagcatacaacagtagataagcaatagacaacccgatataaaaatgaggaaagaatatgcacaggcaattcacaaaaggaaacataaaaatggccttaaaaattgctaaaataaatatttaagcaaaaaagctcaacttcactatggtttggggaaatgcaaattaaagcaacaatatgtcatgttttcacagtcacattaataaaagtttaaaagacggaagtagaggtaaataggaatttgaggaaaaggagccctctcatagtggttcattggaatgtgaattgctgcagctttcaaaaaaaaatcttacactatccacaaacaatgaaagcatagatatcttcttagctactaatcccactcctaggaaaaggagtattaattacaataggttctttattgcagtattgtttatataagcaaaaagagcaaacaaccttgacatccttctattagcagtaggttgaataaatcataagacgtctactatgaactattttgcagcaatcaagaagacttaattagatctctgtttagtgatttgaatgggtgaccatgttgtgatgtcaacagaaaaaaataatttgcagaaaagcatatagagtttgttctcaatttggaaaaataatgacaaatttggaggagatatcctatacacatatgtgtgtttgattgggtttggaaaaatcaggaccacctgagatggaggtgggagtgacaaaatatacatggtatactaagtgaatatataggttatacaattacgttgttaaatttctgaaaacaagtgcaacttaagcatataactaaggagtagatgttaacctggacaaatgaaacatagattgttttgagcaagagacggcaaaattttttgtcaagagccagatagcaaaattttcaattttgcagaccatgcaatctctattgcaattactcagttctgccattgcagtggaaaaatagccctagacaaatgaatgtgtgattgtattttgataaaacttcatttacaaatacgtgctatagaacaaatttggcctgtgagccatagggtgacaatctccggttagatgaagggattgagagcattatttttcttcaattcttgtcattatgcaaagtcagagaattttctaaaataaataaaaatacaaattggcaaaataataatagttgaaaacttcagattgggcaaataagtgaacaaataatcacatgttgaggaataaggctgctttgattcttgtgtgttcaactttgaaacctttatcacagttataaaaaccatttataaaagtgatataactccacagagtatacctcaataaatttgcacatagaagaaatcaaaatgggtatattttctcatcgcaatacaccaaaaactaggaattaataagcaaatgatacattaaaaattcaaagttttagaaaacggagtaccttagatcttgatcaaagagaaatttaaaaacagccattgcagattacctggagaataacaatcgctaacgatcctcaagtgcatgtgcctcaagcattcttctaagtcctttacttgaattgatttacttagtctttaaaagaccctttgaaatggatatcatgcatatccctcattgtatagaagagaaaactgagacagacaggttaactaatttgtccaaattcatgtgacaggttgaggttagaattagaatatcgccagtcagcttcaacaacctgtaatggtaagccttacattatttatcttcttaattaggaatgctgaaacatatattactcataaaaatttctggggtgctgatgccaaaactgtcctcagagaaatttttcaatcctttttgttacttgacaggaaaaaattcaaataaatgaacaaaacatttcttaacaatttttaaattattaaaaacatatataaaaggctgctggagtaaggaattaataaagtaatgaacaaagaaaaaatcatagaaattataaagaaatctaaaagcagattctttaaagtgaccaattataaaacaaacagactgggtcaattgtcatttcacaaaataacaattctataaatatacaagaatgagaaagaagacataagcctgttgatattgaagagatttaatacttgataaaaatattatatcttctctattctaataaaattaaaactatccatgaaatgtaccatgtcagaagaaaaatacaatttaccaggtgtagtttaaaataggcagaattgctgataaacccatatctgtttgagtccatattttcaattcttttaggtatatacccagaagtggaattcctgggggatatggtaattctgtttaacttttcaaagaattgccagactattttccacagctgctgtaccattttacatccccatcagcaatgcacaaatgttccaatttctctacatcctcaccaacacttgtcatttttctggtttaaaaaaaattattattataccaccctaaaaggggctgaagtcagtttgatttacattttcctaatgactaatgatgtggagcatcttttcttgtgtttattggccatttgtatgtcttttttggaaaaatgtctattctcatcctttgtccatttcgtaattgggttgtttgtttcattgttattgagttacaggagtcctttatatgttctaagtattaaatccttatcagatagggttttcacatattttctatcattctgtgggttgtctttttaatctcttggtggtatcttttgttcttgacttggactgcaggacacttcagttcctcactacatgggcttctccaaaggacagctggcctctcccagaatgagcatctcaaaaagagaagaaaacattgcagtgctttttgtggttagcctctgaagttgcacactatatcatttccactttattctaatcattagaatcaagtcacaaagcacagcccacattcaaaaagagaggaattgggctccatcacttgaagggacatgtataaaataatttgtggacatatttaaaaccaccacaaagaagcacctttaaaaaaagacaatggcccagttttgtaactcttttttaacttcaagaaatagataatccaagtattaatattatttaaactgttatggaacatagaaataaaattatagccataattaaagtttgccaaagattacaaatgaaaataaaataaaatatatctctggctcatttgctaatataaatactaaaaatcttaaattgactattaaataaaaccaatattaaaagaattatgcaaggggaacaagtaaggttattccagaaatggttccaaattaggaaacccacaaacttacaatattaaagagtacaacttttcttaaatgtcatataaatatactctctaatgccaaaaaacacaatgaatggttaaaatctaaaagcatgcttgaatataattaaagttcaaaggaaaagaacactcggcatccttcctattattcaaagtagttgtggaaattcaaaccagtaaaatgacagccccctgtatttagagagatatacatatagatatagatagagagagagagaaggcaaatttattattaactgatggttgtttacctgaaaacccgaaggaattatttgaaaggttattagaataggaaatggtagtgagatatcgagtaaaaaataaatacttataaattaattactttctttatgtaggtaacaaccaaatagaatataaggaggaaaaataccattcacaacagaaacaaaatcatctagaaagaaatttaacaggaaatatataggacttataagcagaagatttaaaagagggggacatagaaaaatacttcaagaaatggaagatataatattttatttaaaagatttaatgttgtggtgatgttaattatccctgaattagtatgcaaatttaatgtaatcagtttcaatgacattcttttttttaatttgacaagatgtctgtaaatgtcatgagacccaccaacagaatattctgagataataacaagaagggtgtttgataccagatcagaggtgggtttgatacccacctctcagtgtctggtaaccacctttctactctctacttctacgagttcaactattttagatttcacatgtaagaaagatcatgcggtattagttcttctgtccctagcttattttggaaggtattttaaggcacaaatatgttgtagtgtaattatgttgtaatttttcctgacctgatgtcccacgtctgtaaaattcttttattgaagcctaggctctttccctaggactccctgtctggaatcataaatatcttacttctgtacttaacagaattgttctgtctgcatatagtccccactttttctccaagtagtttctcaaacaaatgcacttcctttcctgaaaagatgagtaagattttaacagctttaaatctttatatatagatatattttaagccaaacgactacactgtacatggttttatagccctctttaatacttacgaactatattgtataattattctaattattatatattactctacaacaccatttttagtggttgcattttggttattacttggatagtccataacctacctaacaaagtccttaatgtctggaattaaagtggtttcgcatttcaactgttagcaaaaacactacaatgcacgatcctgcacacgtgaaaagaaatgagatgaggacttcactaacttcaaagacagcttaaggattcagatcttcacatgtacacaagagacaagatttgcagatttgagtgaaaggctatgcacgattttaagcctttcagtacatattgccaaagtgccctccactaaactttgaccatgacctacggagtgagtcacaacagtgactctttctttgagtttatattactgctaggttttgtcaatttgccaatctaatgggcaaaaacggcattttatttgcattttaaagtgtatttatcatgtttataaggaagctaaacttttcatatgttcatttgactatttccatttttcgtttgtaaattatttgttcataattctttaccatttttctacttgggtgtttgcctttttataattgatgtataagagttgtttttattatttttcctctgtggtttgtcttcaaatttgtatgtagaaaggtttatttgtaattattcagttttatcagttttgttcatagtagaatttttcctcaatgtatgtctatagaagcctcaaatcagaaacacgtttgcctaaatcacctagttcttttatggttttatttttgacatttaatctttgatacacacggattttgctttgatgaatgtcatgaggcagagatctagcttagcttttcagatatttgccctatcaatgaataattcagttttccgtgtcttgaaatgccatctttatcactgccaatttcttacaaaaacttgtatctatttcttgggctttcccccattttgctctagggatctgtgtctctattcctgcatcatttcaattattttacattttaaatgcattttaacatcccttctgtttttgtgccttaaaataccttccaaaataagctaggcacagaaaaactaatgccacatgatcttacttccatgtgaaatctaaaacagttgaactcatagaagtagagagtagaaaggtggttaccaggcactgagaggtggggagctgagatttggtcaaagggcgcagggtttcagttagacaggaggagtaagtttcagagatctattccacagcatggtgactatagttaataataatgtgtatttcaaaattgctggccgggcacagtgtctcatgcctatagctctttgggaggctgaggcatacgaattgcttaagcctagaagttagaaactaggctgggcaaaatggcaaaaccctgtctctaccaataaatacaaaaattagccaggcatggcagcgcatacctgtagtcccagctactcgggaggctaaggtgggagaatggtttgaacctgggaggcagaggttgcagtaagccaagatcacatcactgcactccagcctgggtgatagatccagaccctgtcaaaaaaaaaaaaaagaaagaaagaaaagaaaaagaaagggaaaaaaaattgctagaagagtagattttaaatattctcaccacacacacacacacacacacacacacacacacaaaacaaatatgagaggtgacggacatgttaattagcttaatttaatcatttgcaacagaaacatatatcaaaacaccacattttaccctataaatatatacaattattgtttgttcataaaaataaaatcagattttaaaaaatattcactgtgtttttttcagccatacataggctggaaccttcttcacattttggctccaacaatctagcttagtcacagcgagcacatctaaaacaacctctaggaggccaaaagtcagaggactcccatgatcctgtgctcttagacaacttttaaatgtatgataggagacaggcagaggaaaacacaggtaataatgggattatccttttctttcctttctccagtggttctcaacttgtttaattgcagcaatttttaagattttttttcttggcacacttgaaaagattgtataccatagcctaaacaggctagcaataagtaaaattcaatcagtacctaaaacgtaaaagagactcactgtgtctacaaaaacattgacggtcattgccatagtcacacagttccctttagctttctgtcactgtttcgggaagagctggtatatcagttaggatttccagctgtaaaagacagaagaaataaaataacaggatctcaaacatagatagtagtttacttctgtctcaggttaaaaatcacgaaagtaggcagtccagggtttatacgatgactccataatccacagaaacctgggttccttccactttgctactctgacctcttcaaaatgagagcccatcttatctcatggtctaaactccagccagtatagaggacacagggaagaagggaaggccaattcctttaaagacactttccagaagttgcacaagacactccacttacatcctctggccagaagttagtaacatggctatgcccggctgtaaggaaaggtgagaagtgaaacctttattgcaggtggccaatggcccagttaaaaatagagggttccattactaatgaaggagaggaaagtggatactagggatggcaccagtagtctttgctacaaatggttactgccctgatcacatttcttacataatcaagaggaaaagttcttaactgttgcagttactgcctcatcattatatggcattccattttaccctttaatttttacttggtcaagtttaggcctgctgtacaccagaacacatgaatagctttgctcagcattctttgtgacgttgctcacagtaacattatggatacctaataaattttttaaaagacaaaatgttctacgttttgtggcctactctggatggctttaaggtaaagtgggtgagtatccctaccctttacatttcaagtgtaggggtgtttagctgtctcttctggctctcatttactgactcttctgggtaaatccattgttctttcttttatacaagagactatctgagcacccaaaacttgaaagtctctaagctaggtgctatagtgttaaatatttcagtaagatattttccctgcttaatccaggagcttgtcatttccttgctggaagtacacatggataaaataactgcaaggtttctgaaagacttaagtacaaaaatgtcctgcaaagaaaaagggaaatatctcattcagttgtgagggattaggaataaaaatgaattggagaggtcaaaatgtaagcttgtcctcaaaaagaaaggactaatttgcagatggagatggggtttcttccttccgaggtctgccatggtgtaatctgtcctgtaatgtctaatgtctacctgctattattttctaaatggtgagttaaatgggaaatatgtgtagcgtataaccattttctatcctttgctttaggtttcgactcattggttccccatctactacttgtctcgtctcaggcaataatgtcacatgggataagaaggcacctatttgtgagagtaagttgaaatacttttctccacaaattcctctgtgtgatcctgacttgcccctggagtacaaagaataaattgaatccttcttgcacaaagtagtctctcagatatttgaaaataggagtcagatgcttcatggtcttcctggcttttctttatcttaaaaggtgatttatctgaaactgtgggcttgaacctaggcaaaataccctactttcccattataatagtaaatatttccagtatagagagtgttgtccttaatgagtacattttaaaggcgttagacaaaattagatctgtctttgccaactcttactatctatcaggttacaattccacaaagtaggctactcactttcttgttattctaatccaaataataaaaagaactcttcttccagttcttagcaattttcctaagcctctgatcattttgagttctaatcctccttcaattcttttaggcccatgtcttcagttgtatttgttctcgattagctgaccctccatttttcccataagatatttttcaatgaatctccaaaactttaaaaccatggaagaatgattgcaaattggcaaagtgttatagctgtgaagaagtcgtcatcgcacacagagttgatggcagcaaaagtaggcacagacttccagaaagctaatgaccaatataaacaaaagtaaagtaaataccctctgactgacaattccatttcccagaatttagcccaagaaaataatcatgaaatagtcccatgattttggtccagagatactcaatgcaataatatttgtgatagtggaaaatgttaaacaacctaaatgttcagcatggtttgaaaatagctagtagaagaaataaggcatattttaatggctatcagtttttcggaaaggtaaaaaagtgcaccaggaggaattaaaggttgagatgcctcatccaagtggaaaaagtacatctatgtagctacatgactgattattattcagccaccaaatatggtagtatagaaaatatatccatccatacatatgcatgtatccacatatgtatctaagaggatataattaaattgttacaaatagttatctttgaaccattttcactttcttctttctctttgtccatattttataaatttcctacaatgaatgtgttcattgtagtcactaatattcttcccccccaaattaacattgacttttaaacattaaatgaatgagaatgtatacaaggtgcctcccatatctgccaagaacttgaaattctatgaaataattcaaattatcaaagaattatcagtttactatacaaagttttcaaggcatggcaccttttgtagggggttatcttttataaaaaaatttccacttctacatttataggtcagtgatcatttaattgagtcaatactggttatgtgtgtatatgtgtgtagtcacttagccaatatgtgaatattattatcttatgatagaacacagtattcatttatcattttattgcccttaaatctgccattatttcatttctcatgccttatcttttgtgtttccttttctctctttttcttcataaataatgccagaagtggtatatttaaactgcaaagaggttattttaataacctataggaaaaaatagtccagcaatagataagtaccttaacaatctgtgataaaatcacatgtattatccacttaaaattataaatatataaacccaaaaaaacatggattttttttgtgaaatatgagcagaacccatatcatacacacctaaatttcaactaggtaaaaatgtctgattattagcaaatattttaagaaaataacagtattgtaattccatttagaaaatcattggattatttgcatttggtatttaaattcatagtaaaataattcattattaaaaaataagctgttttaccatactcttccttctctcagtcatatcttgtgagccacctccaaccatatccaatggagacttctacagcaacaatagaacatcttttcacaatggaacggtggtaacttaccagtgccacactggaccagatggagaacagctgtttgagcttgtgggagaacggtcaatatattgcaccagcaaagatgatcaagttggtgtttggagcagccctccccctcggtgtatttctactaataaatgcacagctccagaagttgaaaatgcaattagagtaccaggaaacaggagtttctttaccctcactgagatcatcagatttagatgtcagcccgggtttgtcatggtagggtcccacactgtgcagtgccagaccaatggcagatgggggcccaagctgccacactgctccaggggtgagtgtgacccatcaagactttgctgggtgtgagggtacgtatagatgataggagttgttgaaattaaggaagaagtgtataaggactatgaaattggcataaacataatagtagcttcactgtctgttatctctgttaataattgtctcaaagtaatggcttattctctcatctatagtagacatattttagatgcatttttgaatttaacatttacagcaaatatatgaagtagctactattggtatccccattttactttgagagaactgagtcttagtgatattaaagaacttttccaaggctctgactccagagcctaatcataatgtacagtggaatgtatcatgaacaataatgtgtaatagtgatgatcgtatctctatccctggagtggggcagtaggcaagtgagccatgaggaccaaaatgagagcatcaaatcaaaaaggccttggacttcaacttcaactttttctcattataattgaaaagactgaagctcagaaaaagtgttttgctcaaatccaaacaaatatatatatatgtatatacacacacacacatatatacttgatatataattatatattgttcagattgaggctcaaattcattctttgaggttttttgattgtttgtttgtttgtatgtttgtttgagagaaggtctcgctctgttgcccaggctggagtacagttgtacaatcatagttcactgaagcctctaactcctgggctcaagtaagacctctgcctcagtctcacaggtagctggaactccaggtgctcactaccacacctggctaatttttatttatttttagagacagagtcttgctatgttgcccaggctgatcttgagctcccgtcctcaagcaatcctcctgcctcagcctcccaaagtactgggatttcaggcctgagccaccatgcctagtttcaaatgcattctgatgccctgagaacacaccaattgtcctgtggatggaggcagccaacatttcggttaaaatacggtctaagcaatatgttctatcactaaaaagtctgtagcttttttttctttgagggggggttgttctttttgtttatttttaatttattaatctttaatttttgtgggtacatagtaggtgtatatatttatgggtatatgaaatgttttgatacaggcatgcaatgtaaaataatcatggagaatgaggtatccatgcccttaagcatttatcctttgtgttacaaataatccaattacactctttcatttttaaatgtacaattaagttattactaactatagtcaccctgtcatgctatcaaatactacatcttattcattctttctttttttttttgtacccattaactgtccccacctcccctccctaccctcaccccctatccccacgattttgttcttgatgcctcctcttttcttagctgaaatgactggcttaaaacatggagtgggaagaattaggactggtcacagggacagaaaggaagctaacagttcagccctgtgctgactgaaagagggtcagggagtgtggaaaatgaagaatacgtgaaggtgtctgttagatgagaccttggcaacagtactccttgctgttgccttacgcatgagcttgagggactgcctctgtaggaagtggaagagtggccaaaccacccgcactcacgactctgtgctccataaccagtagttgaaagcaagaggaatatgctgccttatagtctttggaacatgtttcagtagaaaaaacacagacaaggtgttggagagactttgattctagtcacagttctgcttggtttccttagcttccttgttagtgagatgtggctactgaactaccaatcttctcttttaatagctgcactctgcaatgacgatttttaagccctctggtaagcataagatatagcaaaggaaattgccccatatctaacaagtgctctggaactgtcctttccacagtgtgtcagccgcctccagaaatcctgcatggtgagcataccctaagccatcaggacaacttttcacctgggcaggaagtgttctacagctgtgagcccagctatgacctcagaggggctgcgtctctgcactgcacgccccagggagactggagccctgaagcccctagatgtacaggtgccttgactctctggcttccagattgctctgttttccccttcacatggaggacttactcctgttgttttattttttcttctagtgaaatcctgtgatgacttcctgggccaactccctcatggccgtgtgctacttccacttaatctccagcttggggcaaaggtgtcctttgtttgcgatgaagggtgagtgtgacccagcgttgagaccaaggactcagtgtggagaatcactctcttgagatcaggggttaatccaattaaggagctgacctagtagataagaagtacccagagagattaatttatggaagggtagttttgaaataagggtagggactaagtggcaccactttcagaaggcaatgagaaaatggcacatacagctcaatgtcaggtacaaacctaaatacagtcactgatcttgagtacacagttggaacttgaaatgaatgggtacgtatttatttggaggcaaaagaacataattttataagaggtatgctagaaaataaatgatgaataagacaaaaattgtttgccccataagaagtaaggtagaggttgtcttaagaaacttaaaaccaatcaatagtggaatctgtaatagtgcatggataagtgtgttttaacccaataatatatcttcaggtcaggaatggccagtgtaattcttttaatgcaggatttttctcagccactttgccagccagtgacttctggacagcaatgcccctgcccaggccttgcttgggcccaggctcaccgcaggaaacaccccagatacttagcccactgggcggcgtctggctggtgctctgactgggaccctggggccaccatgactgcacactcagcccctggtgggaggggatgtgtgagtgagtgagtgtggggtccagctggccactccaagcacctgcacaggaatgggctctgagcagtgctggcggctggaccaggcatgtcacactgaagggaacgtggtggtgcccaaacaggggtgcccatgaccccaaagcccagaggaggtgttacagcacactaatggctcttagcatttgataatgcctgcagcccaacagatggcagtgtgcttaacagctctgtcaatcctgtcgccccacatctcctgtcgcccagctctggcttgatccgctgctgcttcctttcgcgtggtacagctgccctcccacagcagagggcggagggccacagtgttacaggcttctttgtacctgcgtttggtgggtcctgagttgttgtcccgcatccaagaagaacaaggttatactgacaatagaagggtgaggagggtggagaagagttttattgagtgacgaaacagcttctcagcggagacgagacacgagggtggaccccagatgaagtcagggggtcattctctctctcagcgtggctggttctggggcttttatggacacagaatggggagcctgtgctgattggtttgtgactatgcaaaaaagactaaaacaaagacaccactcaaaggtgggcacaacagtgtaaaaaaccaattagggaagctcaggtatatgtaaactaaatgaacagtgaggatcaatcagaggaaagcacaccaaatgggaagagaggttctcaaaccagtccatggatttacctggaacttgtagctaggctttaaactgtcttcagcttgaaggtcgggtttcaccgggatctgccccatctgcctaggatttgtctgcctcctgcttctatcagtttcaagtggtattattagttgtttatgtgtatccattactcttggtggtgtgcactatgagtctggagggataactagattgggcaattaagcagttatttttaatgatttccaaagaatcttcggcatttacaaagtccaccacctaataatgatttccaatttcagaatgatttcagatttcagaaggcaagcaggattcaataagttgggcattttggggtgcaaagactcttcccccctcccttctttttttcttagagcacgtggttcagcatgcttctgtgagcctcctctggcctgttacagttgtagtagcaagaagaacagtgcccgttctctttctagatgttcctggctttgcttaccaaatcgagagctgttctgcctcatgacccactaatgagaataagtgggatgtcagagagccatcagtgaaagatgacacctgaaggttatggctcttgtgcccatggagaagtatggttctgtgttcatgccttctgtaggtgatgctgggctatgaagtttatatggcaattatgcacatcagctctaattgctttgccagtcacagggtaccatggttctttagaataaattggcctttgagtttctgtcagctactgaagaattcagatccctaatgaactaagacttttagctgggcctgaacctaagacctaaatgatagtcgaggaggaaatggtagtgaggaagctgagcatctattagcgaagaaatcaagggagagatgggaattgctcacacatttgctaccactttttttttctttaggttccgattaaaaggcaggtctgctagtcattgtgtcttggctggaatgaaagccctttggaatagcagtgttccagtgtgtgaacgtgagtagaaagaactatgtagtttggatagctctccttattttcgttttccagcatgtttttccgcatggcatcacctgttgtctagatctttacttaactaaattatggataaaaatacttctttgttggaagaatttcaagaagggtcttgtaggtcttctctgacatgtgtttttgttactaatctgcaaatcacttagtttaatgactgtttaattttgtggggaatgtgtggcaagaaactagatgacataaaggtgcagcacgttttagtcagtcatttatttttagttttcttatcaaggaggaatctttcttaaatttttatttttatttttattttctgagacactgtcacccaggacagagtggagtggtgcaatcacagctcactgcagcctcaacctcctgggctcaaatgaccctcgcacctcagcctcccagtagttgggactacaggtgcatgccaccacacctggctaatttttgtactttttgtagagatagaatctcgccatattgccccagctggtctcaaactcctgggctcaagctatcctcccaccttggcctccaaaagtgttaggattacaagtgcgagccaccatgcccagccaaatttttatgttcttttatcccctcgcatatcataaacaatttagtcagcttgttttttagcctgcagtatttaatgacatagggcttcccatgtgccaggactttccatgtgtagaaaaagcaatgaatagtgaatgaatagtgaagacacctccctactttcctgggatgtattttcttgttgggaagcagactatgaacaaggaaataaataagtaaacaaaattctaaaaattataacatataaaatggtagttaaatagggatgttatggagaaaataaaacagagttatatgataaattagtacgatggaaggagctgggatgatgaatcagtgtctgaaatgatgaggtgtcctaagtttccaaaccatccgcttaaataaaatatgccaaaattcagaaaaaattcagaaactcttagataaaagtacatgtttgacataccaagacattactgattgattctattctgtctactaaagcaaggcaagaattttttaaaccttgttttcctgattattagaaaatgtttattttaatttgtattgtgttaaaataacttatagaaatcaatttggataccttatggtgagtattatggtgaagaacattcaatacctgaggaaactcaagtattcaacaaactcaaccttacagagacacatagagctgaaaataaatatataaataaacttaggaaaacacaaacaggtaaaattcaagcatgagaagtcaatcattgtttgatgtactaggtcttttatatacacataattctgataaatttgggtatctcttcctaaattcatatcaaactagaagcatcaattgcttttagggaaggaactgttctaagcagactaaaaggaggaagaaatggtggctaataattggaagaaatcaaaaaaggctctttggcaccatttaatctgagtaaaaacagccttactggtgtctgatgacaccactggaaatttggtattggtcctgatggtaatggtcttgaatcaccaagaaacatttacattgctaaagatgatagctcatgtttattaaagttcatagatttccttgaaacttatggtctctgatgaccaaaactttgtctgtcttgaacctcattgtcaactcaggaatcttactatgcctgagttaaagtagacaaccaaatgggtgtttttaaaaaaaataaaaacaattactttccaaattcattgtgaacataggtacctgagtggtccaggaacactgtctttgggcttttgcaataaactgtaatttaggtctcacttcagttagttgcctctcaacaaaagccttacagatttaaattccgtctaccttagttatattctttctaaaagttatattctttttaagcgcacagtcacaggtcactattgtttcagtcatcttaagtgaaattctaatagaacttaaagctcttgttttctttctagaaatcttttgtccaaatcctccagctatccttaatgggagacacacaggaactccctttggagatattccctatggaaaagaaatatcttacgcatgcgacacccacccagacagagggatgaccttcaacctcattggggagagctccatccgctgcacaagtgaccctcaagggaatggggtttggagcagccctgcccctcgctgtgaactttctgttcctgctggttagtacctgcttccacatatcctaaatgggttcagaatatctaggtaagaacctccatatttctatagtgacagtcatttttgcttgtgaaaatggctttgctgtaactgtcagagacagaactacctcccaagtgaatgacaaacgggttatagataggcacgctgtctcaattgttggtattctgatggtccttcctatggggtgaagagtgtgggatggtaaggagagaagggggtggacagtgaagagaattgatgaggtccagatttagtagggaatgttttcaaagtactgaaaacaaatgctaaagaaaatactcttttattccacctctactactacgagttatctttatcctggagagatggatgtgctgtgcaaaaagtacacattgatgatgtaatttacttcagaactgataacgctataaaagtaatttgagaaactcagatgtagggatttatacttttatgttgnnnnnnnnnnnnnnnnnnnnnnnnnnnnnnnnnnnnnnnnnnnnnnnnnnnnnnnnnnnnnnnnnnnnnnnnnnnnnnnnnnnnnnnnnnnnnnnnnnnnnnnnnnnnnnnnnnnnnnnnnnnnnnnnnnnnnnnnnnnnnnnnnnnnnnnnnnnnnnnnnnnnnnnnnnnnnnnnnnnnnnnnnnnnnnnnnnnnnnnnnnnnnnnnnnnnnnnnnnnnnnnnnnnnnnnnnnnnnnnnnnnnnnnnnnnnnnnnnnnnnnnnnnnnnnnnnnnnnnnnnnnnnnnnnnnnnnnnnnnnnnnnnnnnnnnnnnnnnnnnnnnnnnnnnnnnnnnnnnnnnnnnnnnnnnnnnnnnnnnnnnnnnnnnnnnnnnnnnnnnnnnnnnnnnnnnnnnnnnnnnnnnnnnnnnnnnnnnnnnnnnnnnnagagagagagagagagattgtactcttagcctccatagctcattcctttgatatattagtctggctttaaacgacagtacctgacaactgtaggcacatgtgtggctgtgactgcccacaccagttccatcttccagtaaggacagaacagcactgaatcggtagcttgtcgatccctgtggtactcccccatctgatctagtttgaagttagagactgtagaggatagtgtttaaatgtcaagaggtctaggtttagagaacccgtctttcactgatcaaataggagggagtggcttatgacctggctggttgaggtcttcatgtacctctaatagccagagatattggatgtgttcatgtattcatatgtctatgtttaactgagtgtcttttcttgtgtttgtgtgggaacttgttcttagcctgcccacatccacccaagatccaaaacgggcattacattggaggacacgtatctctatatcttcctgggatgacaatcagctacatttgtgaccccggctacctgttagtgggaaagggcttcattttctgtacagaccagggaatctggagccaattggatcattattgcaaaggtgacttatttcttggtattccttattcttgctgggttgtatggaatgcatgaggcttgtaaggctgagagacattgaaatgagcttaatgaaagggataatatttttttcttctcggcaactgctttcttttcatttacataaaattatttcatcttattaactgtcctctttgcatggtcgatagcagtgcttctccatccagagcattaacaaaatcaccttgttaaaaagattctcaaactccattccatggcctctgattctgttttaaagtggggtcaaaagtctatttttaacaaactcatcagaatgctctgatgcaggaagaccacagaccacacttcaagaaataccactttgccttcttggtttgtatctaggaaaaaaatattgtaggcttaattttgagactattacaactgaaaagaagtctgtgcttgaagatgaaggatgtactgatggctgggcagaaaaagaaagtaaaacaaaggataagttaaacaaaataaagtagtctgggtgcggtggctcacacctgtaatcccagcactttgggaggctgaggcgggaagatcatgtcaagagatcgagaccatcctggccaacatggtgaaaccccgtttctactaaaaatacaaaaattagctgggtggtggtgcgcgcctatagtcccagctactcgtgaggctgaggcatgagaatcacttgaacccagaggcagaggttgcagtgagctgagatcacgccactgcactccagcctggcaacagagcaagactccgtctcaaaaaaaaaaaaaaaaaaaagaaaagaaaagaaagtaaattaattagaaagatgtattaaattcaggctgggcacggtggctcaggcctgtaatcccagcactttgggaggccaaggtgggcagatcacctcaggtcaggagttcgagaccagcctggccaacatggtgaaaccccgtctctaccaaaaatacaaaaattaatcaggcatggtggtacatgcctgtcgtcccacctacccgggaggctgaagcaggagaattgcttgaacccaggaggtagaggttgctgtgagcccagatcgcgccactgcactcctgcctgggtgacacagtgagactcaaaaaaaaaaaaaaaaagaaaaagaaaaagaaagaaagataaattttaaattcacaatcatgatttactaacttctttgttctatgtgcagaaattggccagaattatgcatttaataaagagcagagtgccagtatttgttgtgaagccagacagaattaacatggtactcctgttccctcacagcgtgaccccagtggctccagggctagatcaccgttagcctaattcctaatctttccacagctttccagttgcagagctgttaatcaacagtgaatgcacagtacattccatattctattactttacattaagaaatgggagtcaggaaatgttaaatcataaggtttttggaggaggaagattagtaacatgtttaaaaacatgcttcctcttagccaagggcaaaataggttttggctattttctcctattctcgcagttaaaacggacaatcaacaataaaatatcaatttctttctgatttgtctaatttcagaagtaaattgtagcttcccactgtttatgaatggaatctcgaaggagttagaaatgaaaaaagtatatcactatggagattatgtgactttgaagtgtgaagatgggtatactctggaaggcagtccctggagccagtgccaggcggatgacagatgggaccctcctctggccaaatgtacctctcgtaagtgcaagtgcaaggaatgtgggatcttcccggtcatggttattgctcattcattcatccatattggcatcaagtgtagtgtgatgtttatggcatatgctatgagctatagagtacaatatgagcatccacctattccaaaactcccatagtgagagtaaggccagacttcctcttctcatacttctcactgcagctctgcaccttttttgtctatatcactttgtggttgcatgagccacacagtaatgatttatttacagcctacgagccttacaagaaatgttttcagcatgagttagggagcaccttccaagctgcagagagcagccggcctgtctccctcactactggaggggacaggattttaagctagcacagctggatagagcagatttagaaattacgtatcattgagctctgtagaagagtagccctctgctggcaactggaaggtactgtaagatagaaaactacccacatcatggagcagatgagcaaagttaataatgaacagcctttcttaatccaagttagtgctacactttcccttctccccatctcttatgactcttctaatacatggttctacaccaagattgttcaagatccagttttacaattaatcctgtaaatatgctaatatgactcgcagataatatttctaaattatcagcttgacactcccttaatatcaaattatatttgcttttttggcaaaaatctcactggataacttactaaatgcttttagagtattctgaagatctggctgggactgacagaaaattcaggtcattggagaaccaaccgtatcaaatattagaacaaaatataaagcaataatacaaaagtcactttgcaccaggataagaagagacatacaaataagtggaacaaaattgatattaataaaataaaggggccaggtatggtggctcatgcctgtaatcccagcactttgggaggccgaggcggatggatcacctgaggtcaggagtttaagaccagcctggccaacatggtgaaaccccatctgtactaaaaaataaaaaaattagctggtcgtggtggcagatgcctgtaatcccagctactcaggaggctgaggcaggagagtcgcttgaacacgggaggtggaggttacagtgagccgagatcgctccattgcactctggtctcggtgacaagagcaaaacattttttaaaaattgtccattaaattaacaataaaaaggttgttaggtgaacacccaatacaaagcaaggatgtgatgaaactgatattgttgtgtgttgaaggtactattgtaaatttgcaaaaactcttatgaaaaacaattatgaaatgtatgtggaaaataatacaactattcctgccagttagccctcctagaaatttaatctaaggaaataatgtaaaatattaaaatattctatgcattttattaagggtttcatgagacagaaacctagaaacaagctaaatgcacaatagaagtcattgaatacactatgatgcatctactagattatgttagtttgcctttgttgtaacttatatttctagtatataattatgtgaaaacacacatataaggaaatgtaccagaacagaatgtatcaaaacattttttgggtatgaggattggggtgacttttttctttagttctgtattataaattttcttctgtaattgtattaataataatttttaaaagtcttctctgagtgcagaaggtaaaatgagagtatgtgaatgaaaccaatggctttttgcattagaaaaaatattagactgagtcctgaagaaaaatcaggatgacttgtcactggctgagaggtcctgttcaatcatgttgcatgccagagtgatgttttgtgacttttgtcttccttttaggtgcacatgatgctctcatagttggtaagttttatgaaagttttgctgaggaattctggcatctataacagtaagtacctacctataatgaatgaaatgtaaaaagagagatcaaaatgtcttgaggtgtaaagagatcaaaatatcttcagttgtaagttcaactagaaagaaaataatgataagttaggccacaatatggtgaaactggcatcgtcatatgcatactaaataaccttcatcaaaggctctttactatctttgaaccattacaaatgaataatcattcatcagtgtcaaaaattctttatttgaatgtggtgggagaatgcaacttcttctttcagttgtaacctggagtatgcttccagatggtgatcctgctcatttgcacaaatagaaagccataagaccagtcttctgagcccatatctgtgatttgcctaaataagaatagttttgtaataaagtttgcttccaagggaatactgtggcatattactcttacatccctttttacgcatctggacactgagacacagagagttaacgtaacttgtccaagaccacagaatggggtagcctgggtctacttatctgtggagactgtgcactttaacaatcaataaatggacaaaatgacctaaatatgtaattcaacaagagagagaattccagtattttcacaatgaaatgcctgtgtgttaagtcttaggcaagagacatgggcagggccatggagagctggtggccagctgccccatcacggttctcacttacttttggaaaagctgacattggactaaacgttacaaaacggctcagctcacaccttaactttaataaccctgtgggagtgagactaatgctatagaaacccagagtaaagcagaatgtatagttacatctttaaaaaaaaaaaagcattggcaatctgtagtgggactggatactaagatagaatttaaaacctgtaagttatattttccatgcatttaattaccttgttttactgcctaggcactttatctggtacgatcttctttattttactcatcattttcctctcttggataattctaaagcacagaaaagggtaagtatagccatattatcccaagaaatgtaaactgtacttaccccctcttggaagtcaaaagaaagtaaaagacaaacaaacccattgctacataaacagatgtggtaattcttataaagaaagtccttgacacacagtatagacaaagaggtattcacactaaaggaagtatataggatactaagaacaattaaaaaataataataataacaaaaaaaagaccatttggccaggtatggtgactcatgcctgtaatttcagcactttgggaggccaaggtgggcagatcactagaggccaggggttcgagaccaacttgggcaacatggtaaaaccctgtctctactaaacatacacaaaattagctgggcgaggtgggacacacaactgtaataccagctactcgggaggttgaagcatgagaattgcttgaacccaggaggcagaggttgtagtgagccaagactgtgccattgcactccagcctgggtgacagagtgagactacatctcaaaacacacacacacacacacacacacacacacacacacacacacacagcattttaagaaggaattgagttttacagaaagagaaagtaggcagaaggggtttttaaatagttgttcatgaggctgtttgatatcctagttttgctaagacattgcagacactgacctctaagcccagatcctatcatagcactagaagttagattgggtcacttatggcacacatatcatatggcacacataggctgccagtggggaagaattgaaactttccattgggtattttaatatataaacaaatattttgtaaacaccattaactttttttttttttttttttttttttttaagaccgagtcttgctctgtcacccaggctggagtgcagtggcacgatcttggctcactgcaacctctgcctcccagattcaagcgattctcatgcctcagcctcctgagtagctgggactacagccatacgccactacaccaggctattttttgtatttttagtacagaaagggttttgccatcttggccaggctggtcttgaattcctgacctcaagtgatccacccgcctcagcctcccaaagtgctgggattacaggtgtgagccactgggcccagccatcattaattttttaaatttgaaagaaaaaaaacttgcaaagactaagatctgaataaagaaacgtctttgacagggaagagaacctacacagcttttgtactggttgattgaattataacaacctcaatgaggccagaatcaataatatcaatgttatatggttgatgagcaagttctatacccatagaaaaactgaatttgtaacttttaagtgaacggttttctatagcaaatattctaaacaagtacagtttcctacaacaagctttacagaaactgaagttttgatatttcacaaagatgccaatatactttttaaaaagtagtttgtcatagtagatcttgctgtaaagaacctagacaggaactcaatttcatggaaaaatactgaattggtagatatttaaatttaaatatccatccttcctaactaatgttctctatattttacggcttgacatatattctttgctcttttccattataaaaagaaaaggtaagtagctgggcactttaccttaacaaagtacttgtgtcaatacatttttcctcttaaagtttctcattaagtaccatataattagtgagttaattttttaaaaaattactactacgtctgaattaaaggagttggggcttctaattttctgtatctatatcagtctgtagttaaaaccacacaggggaaatgattatcccttcttcttggaagtattcaagatactttaatatcttgaagatatttgattatctccacccttctaactatgtcattcttcattacttatggtccattccttgttaatcaactagagggtcacactcccaagcctaactattgatttgtttcacctacataatttaagatcatttcctcatattaatcaccttcaggcataaacatgactcaataaccatttcataaaattatttctttggaaatgattgtcttgtaaagtctaagcaacctgagaccatataccatttcttcatgttttccatctcgtaaaacctgcctcctatttttttcatattctttaaagtgtaatgtccatggcacaaccattctctctctgaccagtggctaccagaaatgtggcagaaagaaagatcatgatccttgttagacttaaaggtcagggaggtaaacctcccaaacatctatgtaacccacactaaaacctattctatatgtgtaatccaggaaagtttttaaacattttctaaacttttacttttgacctgtttcacttcttgggattgtaactgcctgatgtgttcttcctgcctgtcatacagacaaaaccagttccctgagataatggcatattgcagtaaagaaagagatgaattaatacaaggccagtcacgtggaagaactggagttatcactcaactcagtctccccaagaacacaggggctagggtttttatagatcatttggtaggaagggagctagggaatgggtactactgattggttggggatgggggtgtgggaaatgttcctcatgtgctgtgtccacctctggttgggggccacaggaccagttgagtcatgagtcacaagtccaggtagagtcagtcagttgccaaatgcaaaaacctgaaaaacatctcagaagaccaatcttatattctacatagtgatgttatctataggagcaattagggaagtcacaaatctctgagcagtaatggattataaaacctatgcctatattttagcagagttcaggtccctctcctaatcctaatctcttggcctttcattaggtttcaggtcctgagcaaggagagagctagttttaggaagagactgttattatccttgctccaaagttacattataaactaaattcctttcatggttagcttggcctacacccaggaatgagcaaagccggcccacctgtgaggctagaagcaagatgaagtcagccatgttagatttctttcactctcagaatctttgcaaaggtggtttcagcatagtgagtgcatttatctaacaaaacaccactgattttcatgttagaaataacacatagctaaaactgggaaaaagaagtaataaacttaaataatcagaaggcagaggtcccttctttcggaaggagttgggctgattaatcatgcagtcatacctccttgagtgggtgtggccaataagctaagtcattgtggctatgtgaggagggctgattattccttatctggagctcaagctttcctcacagaaagacaagggcataaagggcctcatggcaaagaagaaggaagccatgtgggaaacacagactatgagtggagagtatcgtagtggtcaccaagtcagaagagccatttatcctggagctaaaaaagactgacagatatagaatagtgtagaacaagatggcctgctctatgggagagccacagtcacaccaggcctagagaggtgcaggctgacttctacctcaaacactggagacaattcagaagctgcataagcagtctgaagacttactaagaaactaaaatgaggctgggtgcgatggctcaggcctgtaatccctgcactttgggaggctgaggcgggtgggtcacctgaggtcaggagttggagatcagcctggccaagatggcaaaaccctgtctctactaaaaatacaaaaattagcctggtgtagtggcacatgcctgtagtcccagctactcaggaggctgaggcaggagaattgcttgaacccaggaggtggaggttgcagtgagttgagattgtgccactgcactccagcctgggcaacaaaggcaaaactccatctgaaaaaaataaataaataaattaaattaaataaaacaagaaaagaaactaaagtgatagagaaatagaaggaatacacacacagaaatgatctcaccttctttaaaatgctcctcaaggaggtctactttaactatcctagtaaagatgacatgaccccacccccacattcccagtctctcttatcctgctttatttttttcatagccttattctcttttattataattaattaaataattacattccatgtttattctctctctccctccatgaagtcggggatttttgtcctatcttcaccaatggatacacaacaaatctaaactgtccctgggacaaagagagtctcaataaatatttatcaaatgaatgagtgagctacacaccactaacagtgttaccacaaggggaaatttctgccgtaattctctaccaagttgaacagtgcgtctttaacttgtcctaaacttactccaggtttcaaggctgctccttgttctaatataccaactgtctcagtctgttggtatatatacttgggcagttataacagaaactccatagactgggtggattcaataagcatttaagctgggtgcagtggtacctgcctatagtcccagctatctgggaggctgaggcaggagtactgcttgagccaatgagtttaaggccagcctgggcaatatggtaagaccatgtccctaaaaaacattatgtcatttctaaaaaccaagcatttttttctcatagttctagtgggtagagagtccaaggtcaaggcaactgcaaattcagtgtctggtggggatcgctttctagttaatagacttcaatcttttctccgtgttctcaaatcagagaaaaggagtaaaggagctctcctggtctcttttctaagggcactagtcccattcacaagggctctgctctcatgatctaattacttctcaaaggtctcacctttgagatcctatagtaattagatcctataaattttcaacatataaatttggaaagatacaaacattcagtccattgtaccaacactgcatttggtaagcacatatgcttaaacgatatcacacttgatttcatgtgccttctcaatcctcagctttccctgattaagaatacctaattactctgcccatttcctctgcaccctccaccttggcctttccactcactattactactatctcctgccttcttggtctctactattctcctcaccatccctgctccctggactatgatcccctgtgagcagggaccacctatatccacccaaagcaatttttatttaatgattttttaatctctacttgtacagcagtcaaaattaataataagagtagaaatggttaatgtatctacaaaaagagttaacatgtttatttataggtttatttaccatttattatcttctttggtcctcaaagcaactctgtgaggtaggtaggcccaatcatattgttatcccaaagcataaaacactctaggttcaaagaaattcagtggcttgtttaaagccagtaggaagttgttaggaattaggcctttagtccagattatttaactggaaatcttgaactctttgtgctagtattttgacaatgttagttgccatttctgaatctgactctatattactgaaattcagtatccagaactgtacatagtacaaacctaaagtattttccttttttctttcaatattctttttctccctatattttactgagtttgttttagctactttggtatattgaaccagtatctttctagagaaccgtatgcaatctctactttttttactctttattctgagtcattaggctataaaaaattaaggtatttctttaagggcatctttccatattgagatttcctggcgtttcacacagacttggcaagttcttcctgtgatttaatctcactgccttgttatttcactagttaaaaatatgcgcctgcacgttttgatatttcactgtgtatttacaacaataatttgtgataatgttaaataagataggtcataagataggtcatgcactcatcagtgaggaataatactggttagacttcttcattcagagcccattattgcctcttgttactgcctcgtacccactcccatttctacacaaaacagccttgtccacagtcaaaatttcaaagtttccattgttgtgatgtttagaatgataaaatacttaaggccatcctctgtgaagtctccctgaattttcctatgttcacattaaccaccagtaactaaccaaatagctcttcattcaacatatactcaccgagatcatattctccaaaaccccatgtaccactcatcacccaagaccaccttcagaacactactcatcttaccacttaaccaccactccttggaaggtcataccacctggctatataccactccactcttcctcatccatggatctcaagtgtgccttccctgtcctgtgaaaactctgccccctgaagcagtctgcctctttttctcaaatgatgctgtcattctaatttccataagatggtaaagaataactgagtgatgaggaaacagtggtacatgttgaagtgagttaactcttcaagcttccattctaaaatccctaataccaactcatacataaaatctccaggtactggtactgttttatcatttcattgataaaagatgaagtgtttattaacccccaaagaggcagtgtaccataccaagtgagggtgagggctttgcaaccgctaaggcctgtgttcacagtcactcactctctatgagaccctgagcaagatacttatcctcagtaaatttcattttccttgcctgtgaaatggagataataatagttcctaccttacttaacatagtgcctcatttatgatgcatgtcagaaaatgttagctattatttacacatgattgttattactgatattaaaaagtgagtaaatatttctttttactgttagttcttaaataccttcatgacagctactgctgctcccctaaccgtggatattgcttgtacagaaaacagaacacatatcttcactataggagaaaaaggaagcctcgtgtaacactgcagtgcaaagtcattcatgttgtgcagcttaagtgtcaaaatctcgatgtaaatcctatttactaatcaaaattatgtcagaaatagtgaaatgtgttaaggcatggacatctgcctataaacaatttagagtactctgacagaaaatataggatgattttagtattattttctaatctaagtttttgcttagtattaaaagatgagatttggttatgattttcctttcagacgtcttgcaaagatatcaggaacttaaggcaaataataccttaaatttcaaaatgcaaattactaatttctttcaaaacagatacttaaatgattaagacagtttttctatttttttctctgccaattagcaataatgcacatgaaaaccctaaagaagtggctatccatttacattctcaaggaggcagcagcgttcatccccgaactctgcaaacaaatgaagaaaatagcaggtacctatatacatactgaattcaaaatgttttcaacaactcaaatatcaaaaatggaaacaggacttgaatatgatattgcactaggtaggtcattgataccaaagaatttagaaagtacttcaggagttggaaacttcttttttttttattggattattattgtcatttccactgttttggggtgatgactctataagttagtacagtcacagtcactactttttcaaagcattcctataatttcctgtatttatgctatgaaactttgagaagtagtatgcttttttcttgtggaacccaagaatttgctgcctgcttgtacctccaagtcttccagcttcccttaaatgcacagagtcactttaatgtcctctagagactttcactttacctccccagccaccaacccccttgatttctgacttccactgaattctctacttcatttggcctctttgactgctccttcttttggtcctcattcccttgggcttattaaatacctaacctttcattctacctattcaaagcaggcttactgcaagctgttgtgcagtacacattgctaaagatttggggtgaaaagggaaattataccattatcaaaagtggtatgtatcaatattagaaatcactgaactgaaaagtaactagtacaccagggacctgaaaactaccacctgtgagccaaatccagctggccacttgtttttgtgaataaagttttactggggcacagccacacccaatcgtttgtctactgtctctggctcccttttatactacaacagcagagctgagtagttgcaacagagaccccaaaagccaaaagtatttactatctggccctttagtggaagactttgctaacccctgaactatatcatactatgagaaatttctcactggctagttccccttttaacctgggctttccatcctcttcccaggcctctctctctcattggatactcctctcttttgttcaaatctttactgcattctcagggtatgcagtaaatacaggcattcagactctcgggcttcttgcaaattcaaaactccatttttctttaaaattcagagcaatttatttggctctggcttactttggctatgcccaagaatcctaaaatgtcctacccataggtgtttggaacattttcaggaataagatcaccatatgccctagaacagaattaggccagtcctgtagaaagcagaagcaaaagcaccacaatcattactgaatttcctttctttatgtcctacctctttctcatatacctgtgcattaatctaaatttggcatgttacacctacatacatcagaaatcctaaattcaacagaggacagtggaaggggccccaggaaaagtaaaggaagtggaaaaggtattttatagttaaccaaaacataagtagaagcaattcaaacttttctaaacaaaaaattacagattatgtcctattttctcctataatagaaatgaatttgcaatgccctgtttattatctgtcttcctagttgctttgcttctagcttatttgtcattactgtttatgaaaacaaatgaaatatgcattgcttttttaaaattcagaattgatattttactttttgaagctttaatgtttatctggcctgatccttctcaaatgggcatatgtatacactgggggatacatggctaatgctaatataccaaggggatataaaaatcataagatgaaaatggcatggtttcctagagaatatatttttctaatattactccaatagttcaaataaaaattgtattatttcaacatgaacacaaacacatttataagggaggaaaagacaaataaataatgcaggaagtttaagataaaataagacggctgggcgctgtggctcacgcctgtaatcccagcactttgggcggccgaggcgagtggatcatgagtcaggagatcgaggccattctggctaacacggtgaaaccccttctctactaaatacacacacacacacacaaaatttagccaggcgtggtggtgggcgcctgtagtcccagctactcgggaggctgaggcaggagaatggcgtgagcccgggaggcggagcttgcagtgagccgagatcgcgccactgtactccagcctgggtgacagagcaagactccgtctcaaaaaaaaaaaaaaaaaaaaaaaaaaaagataaaataagacagaaaatattgtgctttcagggatgctttagactatgtctccaaagttcttgcgtgaggcattcattttcctttactatcagagtgctatgggggaaaagtcaggcagaactgattcagggccagctgtgtggccactcatttacaaacagacgaaataacagcagactggaagaacaacaaccatttttacaagagttcattttaaaaatattccacaatgataaattatttgatttagcctcattcctgtcagattacctgcctaaaacacttttccgcctttctttctatctaaattccctgaacccagctccagctctgaattcaatcaaccaagatgctctcccaaacaactctagtccaaaatgatatctctctttgaaactcacatttcctgactacaccatttaaaaaataaactaatttattttaacagtaatatctcatcattgttaaaaacaagaaataggggaaaatataaaaaatataaaaattacctgcaataatctctatctagtagtattcttaagcttctttgcatattattagacatttgcatatacaccttgagattatattgattgcacaatattgaatcctgctttttttaccaaatgacaaacatttctcccatcattataacagtacataacctatagtaattgacatttcctgtgttgttttttgcctgttaactctattgcattcatgtagttgcttatttattcttcaaacattcttagccacttacaatgtgccatacattgtgcttatgtgtgttttcttttccatgctaaattaacctctgatgaatagagacaattttttaaagatctccccaatctctgagtataatcaaatgagaaatgttcagtaatcaactgagcacgttaatcaattgagaaatttttcatgcacgtccctgtgaagagatcaccaaacaggctttgtgtgagcaacatggctgtttatttcacctgggtgcaggcgggctgagtctgaaaagagtcagcgaagggagataggggtggggccgttttataagatttgggcaggtaaaggaaaattacagtcaacggggctttgttctctggcgggcagaagtgggggtcgcaaggtgctcagtgggggagctttttgagccaggatgagccaggaaaaggactttcacaaggtaatgtcatcacttaaggcaaggaccggccatttacatttcttttgtggtggaatgtcatcagtaaaggcggggcagggcattttcacttcttttgtgattcttcagttacttcaggccatctgggtgtatacgtgcaagtcacaggggatgcgatggcttggcttgggttcagaggcctgacaaaattaatttatgaaaatttcatttatcctcaactttttggaaatactcttacatcaaagtacacctcaaattgtgtacactgactactgatcacttttcggtaggtataaagtccttaaaaattttgtttcaactttcccttttaagattagaattttgaccacagtgttccatgggaacaaagtgaatcatctgtggcaaaatatgctagtcaagaagtgagttagaatctgtgccaagcgttaagaccttgtgcacccaggttctggggcggagtaaagaggcaggctccaaagacatagctgtgtgttggacatgagagtatttggaggaatacaggtaacaggtgatgctgggaagtcctgtgaaatggaaggagaacgaagatgaggaatctggtggcagtaataaccggggaacagatgagctggaggcctcatcaggaggggtgtcccttggtggaaggacaccattcccggccttaaaaggagacgcttcagcacggctggggaagcacgtggataccttgtactaaatccactactgcagctcattcttaactgtaagtagaagaggaggacatgctttctgaagctgacccctccaagatgaccagttcctatttctgtcccctgctaccaccatggtgtagaacaacagaatcaaaaaaacattttttctgttatgggtgacctgtacgttttctagaatggaaggaggctgtttagtagctcaactctgagaacactttttctttggacaaaattaaaaaaggaaaaggtcaagttaatcattaatctctctgttttctactaatgtctccattttcgccatactttctatgtcctacatagcagccatcacagagggcaataaacacttctaatgaccgtgtaatttatatggaatgctgaaggggtgggttggccctccacacctgtggatgtttctcattaggtggaactagagacttggaaaagaaagagacacagagacaaagtatagagaaagaaaaaagggggcccaggggaccggtgttcagcatacggaggatccaccggcctctgagttcccttagtatttattgatcattaatgggtgtttctcggagagggggatgtggcagggtcataggataatagtggagagaagttcagcaggtaaacacgtgaacaaaggtctcggcatcataaacaaggtaaagaattaactgctgtgctttagatatgtatacacataaatatctcaatgccttaaagagcagtattgctgcctgcatgtcccacctccagccctaaggcggttttcccctaactcagtagatggaatatacaatcgggttttacaccgagacattccattgcccagggatgagcaggagacagatgccttcctcttgtctcaacagcaacgaggcgttccttcctcttttactaatcttcctcagcgcagaccctttacgggtgtcaggctgggggaaggtcaggtctttcccttcccatgaggccatatctcaggctatcacatggggaaaaaccttggacaatacctggatttcctagacagaggtccctgctgccttctgcagtgttttgtgtccctgggtacttgagattagggagtggtgatgactcttaacaagcatgctgccttcaagcatttgtttaacaaagcacatctgcacagcccttaatccatttaaccctgagttgacacagcacatgtttcaggaagcacagggttgggggtagggttacagatcaacagcatctcaaggcagaagaatttttcttagtacagaacaaaatggagtctcctatgtctacttctttctacacagacacagtaacaatctgatctttcttttccccacatttcccccttttcgacaaaaccgccatcatcatcatggctgtttctcgatggttgctgtctctttggagctgttgggtacacctgcagactaacaacagacaaaacaggcacacaaggattaatatgaaatttataatcgtagtacttccgatggtcttaacccaagtgacagggttaagatttgcgaggccatcagcaactcctgcgattgcctcagttcctggcaccaaatttaaatgggcttttgatgtttcaaaaatttgttcctttaatttggaaatgtctaaagtgagattatcttctgttccctgtagatggcatctgaccatgtcccagtgatgctcagactcattataaacttggggtgtaatacaaaaatctgagatattccagtcacactgtaactggaaacgatggtctaagttcataagcctgtctcccatccaaatgacagtttgtctaagatcattaatttggtttgccaatttttgatcaataccagattgtgaattccacaatcttgtagaatttttttgccaatcattaacaaagtttactgactgaacagaagagtgcaatgcaactcctgccatagcagccgtagctgtgactgcaattaatcccataatcactgtaattaaagtaaaaatgaatcttttggatctatttaaaatggcttttaatacttcagtcaaaatatggacggatggcaaggcctcccacggttggtccatggacatagaaatccacacggcttctcttgccctcaccagcagaatacactgttgccaattaaaagttgaataaatgcaagtaaacaatctgcaattttcacagcttatagtttgagagtctggtttaataactatatttcctacaactagcatataagggggctttacacaggtttggaaaggaactgttagactggaatttaggttgatagtataaaatagcttacgatctcgtttctaaagtttgatttctagaccaaattctaatgcagtatgaggccacagtaagcctccataattctggatgttcaggaccagaaacaggacttattatttttggtcttggggtagagattcctttttctccctattcccaagggtagaaagactgtaattttttagcttatgtttgtctaaactttctgttaagtcgctatcaacagctagactcacttgtgcactgggacacgactgagtttgtcctgtgcaattgtggtagaattgacctcgaggtgcccaatctataatagttccgaattcactgttttgtaatatcaccgcactattggccacacattcttcccaaactaaaacttctgtattttttgatcctttgggaatttccttggggcaaggtttccctttaggtctaaattttaatgatctttgataagaaaagtcttgtaaataatttacccgtggcctgagtgacatcccgcttaccatgtgataagtgaatctactgatgggactgacagtaggtacttctaccaaccaattttggactgcaggcattaaacatcctggtgctctccctaggcagataggaggataatgatacccaatggaaatatttatcatcatcccttcttcctcaggtttggcagggcaatgatcatctgtggggccaggtacccatacactatcattaacatatacttcaataggattatccatccatgtgactggtgtttccatctccgcggtggcgcttttctttgcatctccgatgggttcatcgtagatcttcaaatgtctagtgggtatccaaacaggaagctgattttctcctggtgaaacacaagcaaaacctctcccccacgtcaccaccttccctatttcccatgtcttatttttattatctttccaccaaatcagttttccttcatgtgggctgttctttttaccagtaaaatgttgttctgcagaagtagtagtctgatttctataaatgtttaaaaaatttaaagtatagagtgctagattaagttgcatctgaggagtggtacattccttactgtctcccccttctttttgcttaactgagttttgagtgttctattagttctttcaactatggcctgtctgtgggaattatagggaattcctgttgtatgtgaaactttccactgatgtaagaatttttggaaagctttactacagtatcctggtccattgtcagttttgatctttttctggaactcccattacagcaaaacaagataataaatgttttttaacatgggaagtactgtctcgattatctggccctaaacaatgtaaaatcacagtactttgatacacttctgaggctggcctacgctgacaagccctgtaacagcctttagtttaggccaatttttggccactgatttaaagcaatgatagagacatctgctccagtgtctactaacccttcaaactgttttccttgaataatggccttacacgcaggtctgttctctgagacccgacttgcccaatatgcagcctttcctgttggatcagtgcttccaaaccctcctgttctttttatctcactatttccaaccttaatataaggcaggagtaataattgcgcaatcctgtctcctggactggcactccaaggaattgaagagctaataaccaattgaatttcgccattatagtctgaatcaaccacatcagtacgaatttgaactcccttcagacttagacttgatctacctaagattagtcctacagtcccctcaggcagtgggccatatacccctgtggagattttttgtgggggctcccctggaagcagagagactgcctttatagtacataaatccacagctgcactgccgcttgtggcgggggacaattgttgtactgtggtaactggctcattccctgaggcacttgggacagtgggggttgttgtccctgaaaaccctgaggaacaaagggctgaattgggaatgccccagtttgttgcggggcctgaggctggcccctttgctcattttcccgacaatggttgcccatttctatcaaatttagaatgacattgactagcccagtgttttccttgtttacatcttggacataagtcaggtggctcttttttatttgagactgggcaattcttttttagatgaccaatttgatcacaattataacatttccctccaaatgttctaacttgtcctcctaaagcaactcctgttattgtggaataaagtttagaaaatatccaaagcttatcagcctgtaaattctgggtagttcagttgtctaccatgctgttaattaaatgaaaacatcctgttatttcagggtccttccttgacaaagtactatacagctgaagaacatctcgaatacaattttggtgggaaaggagccaattgatttcaacagaatcagatctgagcttcataaagtctttgaagtgacttcacagagacgcagacatgtgcacttgaagatgctgccccttccctggtacctagcaaagctcctgcctctttgtgtgcgtcactgtgaaacccccacccttctgcctcgtgctaaacgcacacagtatctagtcaggggaaaagactgcatttaggagatagaaaatagtttggattacttaaaggaataaggtgttgcctggaatttctggtttgtaaggtggtcactgttcttttttaaaatatttgtaatatggaatgggctcagtaagaagagcttggaaaatgcagaaagttatgaaaaataagtcacttataattatgctacctacctgataaccactcctaatattttgattcattttctgcctatcttctttcacatatgtgtttttttacatacgtacttttcccccttagtttgtttccttttattttatagagcagaaccctagtcttttaaacagtttagagtgaaatatatgctatatcagtttttactttctctagggagaaaaattaatttactagaaaggcatgaaatgatcatgggaagagtggttaagactactgaagagaaatatttggaaaataagatttcgatatcttctttttttttgagatggagtctggctctgtctcccaggctggagtgcagtggcgtaatctcggctcactgcaagctccgcctcccgggttgacaccattttcctgcctcagcctcctgagtagttgggactaccagtagatgggactacaggcacctgccaacacgcccggctaatttttttgtatttttagtagagacggggtttcaccatgttagccaggatggtctggatctcctgacctcgtgatccacccgcctcggcctcccaaagtgctgcgattacaggcatgagccaccgcgcctggccgctttcgatattttctaaactttaattcaaaagcactttgtgctgtgttctatataaaaaacataataaaaattgaaatgaaagaataattgttattataaaagtactagcttacttttgtatggattcagaatatactaaattaactttttaaaacacaacttttaaaaaatgtatcaaaataataaacgtgttctgatatttttaaaataagtgaccttgtgttctttaaccagtccacatctttagagaacaaaaatgtgttatgatattatgggccatgctaatgacctctagaaaacatcagaatatttctggatatttaataatagctttatatatgactaatgctcatttctatgtaattctgtttaatagttgctttaaaggtgaattttgccacatttactttgacagcagtataaggagtgagatagacatgaacctgaatttcaatttaaaatcatggaagagagggaaaaaaaaccagcttaagaaaaatcaactgataaactgcaagaaaaaaatgcaacttacatcacaaaagctaattgctttattatttagagagtacttaaaaattaaagaccaaacttctctccacccaacaaaaatgggcaaaggacatacagctaggtcaccaagaaagaagggcaaataggtggtgagtacatgtaaagatacttgataggacttttgcttagttgaatctttagcaaatctcttttatttcttgggattttgaagaagtaatttttaaaggaggactagaaactaagtgattgggaattggcctttttagaattaaaatttcccattacaagaaaaaaaaatcctgtgttcttttttttttccagaatggagtaggtcagtgagcaatgtgattaataaatatttcaatgtctgtgacttttgatttattttggagacagggtcttgctctgttacccaggctggagtgcagtggtgctatctaggcttactgcaacctcacctgtcactttttaattgcaagaaagctgaaaggtttttttctattatatcagttataatgagaaatactgtatatactaactatgagtaaaatactatattgcctaacttgtattattaagcaattctgctaacctgtgaccttacattttcatctgaaaagcaggggctggacaccaattgccctatgaagctattgctagtcctaacattctttgttttgtttgcttttttggcacacttaagtgtgtactatgaagtttatgatgctttaatgaaattttctgtctctaccattgtaatgagaaaggaataaaatactttattttgcaaatctacttatggaatatagttctgtacctgattgttttcataatccctgtgttgatgtgtaatgccacagacatgctcttgatagtaacaggaaagaaaatcagacacagctaaacataaaggtcagttggctggcaggtgcttagcaggtgtaaatagaggcccattcatgctgctccacttgctcctgaaaagcataatgtaaatacagtatactaattaggaggcaaagaaccatctaacatggttcttttttttttttttttttttttttgagataaagtcttgctctgtcaccaggctggagtgcagtggcgcgatcttgactcactgcaacctccgcctcccaggttcaagcaattcccctgcctcagcctcctgagtagctgggactacaggtgtgcgccaccacgcccagctaattttttgtattttagtacagacggggtttcaccatgttggccaggatggtctagatctcctgacctcgtgatctgcccacctcggcctcccaaagtgctgggattacaggcatgagccaccgcgcccagccctaacatcaaattttaaaagagttggccacagtttaatgacatccctgcacaccagcctccacccatactgcccttcataagccccttaaaggagatcccatagttctaaaccgggtccacaaacacacatatcctcattctctccttttcttctctttggcagtttgacaaaatctttagggggaattggaggaaacattaatctcctaaatcaacttcattcaaagctttggcttcaagttctacccgttaaggcctcaggaagttcattgtcgacattgaactcagtcactaaaatgacctcaaggctaagggatagaccacagctccacttcacaagtaagcttgcaacacctgatttaggaaagtttgctgtgcagacagttgtagctcatccattttacagaccgatctcgatttgtttcctagggtctaaaattatttaaatcaaaatctctcagaaatttctggacatttaataaattcatgctggaggagaactggcagagatatgttaaatgcacttgaccacaagaaccatttatttcatccaatatttaccagctattcattgtacacttactacagattttggcactggagatattataagaaagctctaaccctgacttatggaacttatcccaaaaaataggaaacaaggctcagaaccattcaaatgaagcttcagttaactcaaataaaaattagttttataaatttaatgtgaaagtcttcgagtatattaagaatggcttgattaaccccagggatggaaattttactgattgaaagaaagtttcaataaaataccgatcttcgaatctaatctgacacctgaaactaggaaatcaaacactagccatattttttcttctattctttataataatttttctcatgagaaaaaggtatctttcttccaagcctgaaaataaatggagaatttttaatatctattgatgtggagaaaaataaatagactatctgctttcacaaataagtgctggcattgagccacagaacatgtctgtcatattgctctttcacaccatacattaacaggaataataatttctcctcattgagtttcctatttactatccccttaattatacctcctttaattactgtcatagagtgtctgaattttataatccaagatactaagatgtttatttgatataccaccagactcaatgtcttgtattctatgccaaaaatttgaaaatgtttgggaagaggaaattccgtggtttggtgaacccagaaagtcttcagtacatctcagttatagaactgtattaaatacatttaaactctataattccataagacccattttaggtttatacactaagcatctaattcctcactatcctctcatacaaaccctgtgtaatacaagttctactcccataattctatgaacaaaacaacaattgatacatagatttgatttttaaaatacattttctttaccttattctaaatgtaacatagggtcaacatagaaaaagaaaactgaaaagcacaaggaaagtgaaatatctataatcttaaccattgttaattttgttgtgttccaaattagtgtatgtatatatatatatatatatatagcatttttgttttaataaaaggactgccaaaatgcacatgccaatttggactctgctttttccacttacaatgatatcatagtttctcacatttggtattcttttgcaatacttgctgcatagaattccatcacacaaaggtaactgcctccttattacttttgctagacacttagggtttacattttttacaaaaattataaatctttgatcacagctctgatgatttctctgggaactgagagcctaacacaagtcatttccactttaagacttttaacattctgaaaagttatgttacaaacagagtgctggtccccctgcaacatgctcactcacattggctgacattttaattctttgccaatctgaggggaagagatgtcaactttttttgtttgctcttttaatgccagtcatgttcccttttttttcccccttttaccagtcatactggcttactcagaaccctacaaatcaatcctgctcattcttaattttccaacattgttcctgagattgtttcaccagaaaagttctcccccttatccacttcgcctaacaatttctacccatcccaatcctcctgcatttattgcttccaggaatttggcacttaggacacccttgtccttacattgttcatgcatgtatatttcgtcttcaataaaacatttagttgctcaagggcaagggtcccatagagtctcaatatgctaacggcctggtgttgcttaataatttagattctgacgggtcctctccagggaggggagcaaagggcaaattatcttaggggctgggagtgcagaagccaaacctttgagactgtgaaaagaagacggcgccgagacgattcagtagcaggcattcaagcaagaaaaactcaaatattgttcccaataatgcctgactaatgccaaataccaagtaagggcccaggcagtcctgacagcctgcagtgccccaggataaaactaaccctgaggggtgctagcccacgataaccccctgccagggctctggacacgccctgtctcctcgaaggccaacgggctgcccctgcgcgccgaggccccgccccgcggcccgccgattggccccagccgccccggcgctaagactcaatttcacactacgcgcccaggccacgcccacctgtcatgcggccctggaaactgtgagtttggggattgttgtgtccactaaccggactcagaagggacttccctgctcggctggctttcggtttctctgctcacctccggataaatcacggggtctcccgcgccgctcatggcgcctcccgtccgtctcgagcgtccctttccttcccggcgctttcctgggttgcttctggcggccctggtgttgctgctgtcctccttctccggtaggaccccggggtggattcgcgcgtccgcggcgaggctagagctctgctcagtcagtcgggcaggaggcgcggggcgaagctcactgcacgtcgtgcctgcttgggatagagagcgaggccagggttctccgaggggtgccgtgctcagatcccgggggtatgtggcgggggatgcgggaaccacgcagaagcttgtttggtggcatcgtgtgcgcgggcgacatttacgcaggatctggctgcagttcccaaaagaagcgtgannnnnnnnnnnnnnnnnnnnnnnnnnnnnnnnnnnnnnnnnnnnnnnnnnnnnnnnnnnnnnnnnnnnnnnnnnnnnnnnnnnnnnnnnnnnnnnnnnnnnnnnnnnnnnnnnnnnnnnnnnnnnnnnnnnnnnnnnnnnnnnnnnnnnnnnnnnnnnnnnnnnnnnnnnnnnnnnnnnnnnnnnnnnnnnnnnnnnnnnnnnnnnnnnnnnnnnnnnnnnnnnnnnnnnnnnnnnnnnnnnnnnnnnnnnnnnnnnnnnnnnnnnnnnnnnnnnnnnnnnnnnnnnnnnnnnnnnnnnnnnnnnnnnnnnnnnnnnnnnnnnnnnnnnnnnnnnnnnnnnnnnnnnnnnnnnnnnnnnnnnnnnnnnnnnnnnnnnnnnnnnnnnnnnnnnnnnnnnnnnnnnnnnnnnnnnnnnnnnnnnnnnnnnnnnnnnnnnnnnnnnnnnnnnnnnnnnnnnnnnnnnnnnnnnnnnnnnnnnnnnnnnnnnnnnnnnnnnnnnnnnnnnnnnnnnnnnntccgtgttgcctgagatcgtattggtcttgaattttaagtggctgcttttttggggggtgggtgggccatcgaagtcatcttcctgttcccaaccaatatagacagtatctgattccattgcctagtggctttttgacattgttttccttcttttcattagtttgagtcatatttgagagatgtgaagcaacctaaaaaacactggtagccaaacctagtgagaaattagtatcctaacaaaggaaggcagataatgttaatcttgttttcccctacagctcataaactgaagcttaaggcctatcccactgttctgtatttcattgaatggaatcaatatttttaaaaatgcatgctaggccaggcccagttgctcacacctgtgatcccagcactttgggaggcccaagttgggtgattgcttaagcccaggagttcaagatcagcctggacaacatgtcaaaaccccatgtctacaaaaaataaaaaaattagatgggcatggtggtgtatgcccgtggtcccaactactccagaggctgaggtgggaggatcgcttgagcccaggaggagaagactgcagtgagctgtgatcatgccactgcactccagcctggatgacagtgtgagaccctgtctcaaaaaaaaaaaaaaaaaaaaaaagccaaaaaatacatgcttaaatacaggcttattgtgcaaaatgaacaaaataaaaggacaactgtttttaatattttgttatatttccttctgactttattgtgtttcatgtgtatctatatccaaattatatttaggatcttattccatgtacagattgtacgttgcatttcttctcttaggaacattcattcaacgaatatgggtcttgtatgtctggtgctgttacactggtaggtaataacagacaattcctattttctttatcctttttttactatttgtttacacacgtacatgcaggaagataagcagggactttttttgctcattgttaagtgcttaatgccgggaacacagtaggcaatcaacagatgtttgctaaaatgtattgggagtggcagacattaaccaaaacataatagtaacaaatatattaaccagggaagtgttctggaggaaaggagtataattttctgacagcatttaacaaatgactggggggagggaaggctttgcttctcatcaaacagacaaaactctgccactttggggcatctgtgctttctgttccctcagtcctggaacgttctccccatgacctgctgcataaatgggctgtttcttctgcaagctcagctggaatgttaccgcttcagagaccttcttggaaccccccaactcaggttgaacacatacaacccagttcaagtacctcttgtaatcacccttttaaagtgatcttttctgttctctgtctctccccatcagaatgcaggaatcttctgtcttcccccatttgtggttccaaaagccccatttgtttgcttctgtatgaaccctaactcagtatccatatagacatctgttaaatatcagaaaattaaatatactatttggctggggcttagagcctaggaaaaagtccctcctgcctccaagaggaaggttctttaaagagctatgctcaggatggtctttctgttgtacctaaaaagctagggcagcagcagctgagggccagaaaggatctgtctcccctgtttatgttgactctgcagggcttccagtacttcagtcttgcatctcactgatcattaaaacgttcattttgaaggagggtgatgggattagggagcagtggtgttaagaagaaaacgaaaggacttttttttctttttaaagattaatgtttagaataggcttagtactagaagtacatacagcctgggcatcataaggagagcccacctctacagaatattaaaaacaaaaaattagccaggtgtgatgttgcatgcctgtggtcccagctacttgggaggctgaagggcgtgaagggggaggatcactggagcccccatggtcaaggctgcagtgagccctaatcataccactgcactccagcttgggtgacagagtgagacccggtctcaaacacacacacacacacacacacacacagacacacacacacacacagaaaaaaaaaaaaaacctggaagttgaagaagataatgaaagcaatttgaaatagaggaacatagaattataaaatgaatagggtgcaacatggaagataacaaaactaaaaatgaagagaaggaaaaataaggttaagtttgaggttgatagggttaaatcaagacaggtatgaaacctagagaaagtaaaaatgagaactcacgatgctaggcagagagaatacatgaattaaaataaacattcaatttttggagcaactcactctcacaaagataaggttttgtaagcaggtggtgctgtgcatgggagacctgccctctcaaaggtagttgccaaatggttccagatagcagaaggaaacgtgtcaaatttcaggccagtctcattcattcctccagaagaggagctgcttttttggacaaaacccccgatctcctgttgtgtgtggtctcttctgcctatttcaggtgttttccttattttcaatgaaagaagccaagaccaataagttcttattgcttcttagtttcctcactcggcatactacaatgcaaaaagagcagtccatatctggtcacctgccaggataccagaagactgggagataggcagcacaagaaatggctaaatcttctttctccattgttctgtagaatgattattttcaatatgaaattgattacaatatattcttcacattgttttgtgtttgacagcagtggactttgagtaccaaatttttttcgaatagctactatgagggacatattgtgctgggtgttgtggccacatggatgaatggagtcggccttgttaactattaaactcaaaaacacgtgataattacctgagagatccatgcaggggagagtccaggggaaggtgactgatcactgcttcccagggggaggcagaaaatgcttcttggaggagatgatgggtggattaaagaagacaagagctgagcaggagttgtagctaccggccagggaggaagggtattcagagcagaggaagcaaggtgagcaaaggcaccaagatgtgacactgctggactgccaagctattcagtgtggcagagtagggtaaaggagacaacaaagaagggagaggaataaatcacagggtgagcagttctaaaaagcaacagtcttgtcaggaataaacaatcaccatcgtaaactcagactttgatattattccctgtccttttagggcagcttgagcccttttgtttgacttagcacaacgtgactccaaactagggttgttttaatttcccaagacacagtagtaggcaatttcttgaggacctaattgcagatagagtttgtcggtctcagcatgtgggagctccagatgaatggcagtaatgggaagcagtttggtagtggttcagcagtgtggcctgggaacctagttgactggcctgcctcctgggtctgccaacctaactggaatgtattcttgggttctgattgtgatgggatttaaaagtctctaagctatgttaggaagccttagacattatcctgaggtcattggagagccatcgaaaggtatctgtcttggaaaaaccttgattaccctgtcatataaatactgctctggtaatgtgaaaaatgaattgaatgaaaggtggcaagataggtatggagacctatttggttatgtcgtggtaatccagataagaaatgatagtggcttgaatgaaaagtaaaggatacaactacatagaataaacgggcatttcagttgtggaaacataacttgtttggggggcgtgtgtgtgtatgtgtatgtgtgtgtagagtcaaaagtggctcttgggtctccctttgttgtttgagctagagtgacacattccaagtagagctgtgtggggaggcaattgaatatgtagttttggcaccccagctagagatctgggatggagagatacccagctagga

SEQ ID NO: 101 - DNA, 4254 bp, Homo sapiens
aaatctggtttgtagatgtgcttggggagaatgggggcctcttctccaagaagcccggagcctgtcgggccgccggcgcccggtctccccttctgctgcggaggatccctgctggcggttgtggtgctgcttgcgctgccggtggcctggggtcaatgcaatgccccagaatggcttccatttgccaggcctaccaacctaactgatgagtttgagtttcccattgggacatatctgaactatgaatgccgccctggttattccggaagaccgttttctatcatctgcctaaaaaactcagtctggactggtgctaaggacaggtgcagacgtaaatcatgtcgtaatcctccagatcctgtgaatggcatggtgcatgtgatcaaaggcatccagttcggatcccaaattaaatattcttgtactaaaggataccgactcattggttcctcgtctgccacatgcatcatctcaggtgatactgtcatttgggataatgaaacacctatttgtgacagaattccttgtgggctacccccaaccatcgccaatggagatttcattagcaccaacagagagaattttcactatggatcagtggtgacctaccgctgcaatcttggaagcagagggagaaaggtgtttgagcttgtgggtgagccctccatatactgcaccagcaatgacgatcaagtgggcatctggagcggccccgcccctcagtgcattatacctaacaaatgcacgcctccaaatgtggaaaatggaatattggtatctgacaacagaagcttattttccttaaatgaagttgtggagtttaggtgtcagcctggctttgtcatgaaaggaccccgccgtgtgaagtgccaggccctgaacaaatgggagccagagttaccaagctgctccagggtgtgtcagccgcctccagaaatcctgcatggtgagcataccccaagccatcaggacaacttttcacctgggcaggaagtgttctacagctgtgagcctggctatgacctcagaggggctgcgtctctgcactgcacaccccagggagactggagccctgaagccccgagatgtgcagtgaaatcctgtgatgacttcttgggtcaactccctcatggccgtgtgctatttccacttaatctccagcttggggcaaaggtgtcctttgtctgtgatgaagggtttcgcttaaagggcagttccgttagtcattgtgtcttggttggaatgagaagcctttggaataacagtgttcctgtgtgtgaacatatcttttgtccaaatcctccagctatccttaatgggagacacacaggaactccctctggagatattccctatggaaaagaaatatcttacacatgtgacccccacccagacagagggatgaccttcaacctcattggggagagcaccatccgctgcacaagtgaccctcatgggaatggggtttggagcagccctgcccctcgctgtgaactttctgttcgtgctggtcactgtaaaaccccagagcagtttccatttgccagtcctacgatcccaattaatgactttgagtttccagtcgggacatctttgaattatgaatgccgtcctgggtattttgggaaaatgttctctatctcctgcctagaaaacttggtctggtcaagtgttgaagacaactgtagacgaaaatcatgtggacctccaccagaacccttcaatggaatggtgcatataaacacagatacacagtttggatcaacagttaattattcttgtaatgaagggtttcgactcattggttccccatctactacttgtctcgtctcaggcaataatgtcacatgggataagaaggcacctatttgtgagatcatatcttgtgagccacctccaaccatatccaatggagacttctacagcaacaatagaacatcttttcacaatggaacggtggtaacttaccagtgccacactggaccagatggagaacagctgtttgagcttgtgggagaacggtcaatatattgcaccagcaaagatgatcaagttggtgtttggagcagccctccccctcggtgtatttctactaataaatgcacagctccagaagttgaaaatgcaattagagtaccaggaaacaggagtttctttaccctcactgagatcatcagatttagatgtcagcccgggtttgtcatggtagggtcccacactgtgcagtgccagaccaatggcagatgggggcccaagctgccacactgctccagggtgtgtcagccgcctccagaaatcctgcatggtgagcataccctaagccatcaggacaacttttcacctgggcaggaagtgttctacagctgtgagcccagctatgacctcagaggggctgcgtctctgcactgcacgccccagggagactggagccctgaagcccctagatgtacagtgaaatcctgtgatgacttcctgggccaactccctcatggccgtgtgctacttccacttaatctccagcttggggcaaaggtgtcctttgtttgcgatgaagggttccgattaaaaggcaggtctgctagtcattgtgtcttggctggaatgaaagccctttggaatagcagtgttccagtgtgtgaacaaatcttttgtccaaatcctccagctatccttaatgggagacacacaggaactccctttggagatattccctatggaaaagaaatatcttacgcatgcgacacccacccagacagagggatgaccttcaacctcattggggagagctccatccgctgcacaagtgaccctcaagggaatggggtttggagcagccctgcccctcgctgtgaactttctgttcctgctgcctgcccacatccacccaagatccaaaacgggcattacattggaggacacgtatctctatatcttcctgggatgacaatcagctacatttgtgaccccggctacctgttagtgggaaagggcttcattttctgtacagaccagggaatctggagccaattggatcattattgcaaagaagtaaattgtagcttcccactgtttatgaatggaatctcgaaggagttagaaatgaaaaaagtatatcactatggagattatgtgactttgaagtgtgaagatgggtatactctggaaggcagtccctggagccagtgccaggcggatgacagatgggaccctcctctggccaaatgtacctctcgtgcacatgatgctctcatagttggcactttatctggtacgatcttctttattttactcatcattttcctctcttggataattctaaagcacagaaaaggcaataatgcacatgaaaaccctaaagaagtggctatccatttacattctcaaggaggcagcagcgttcatccccgaactctgcaaacaaatgaagaaaatagcagggtccttccttgacaaagtactatacagctgaagaacatctcgaatacaattttggtgggaaaggagccaattgatttcaacagaatcagatctgagcttcataaagtctttgaagtgacttcacagagacgcagacatgtgcacttgaagatgctgccccttccctggtacctagcaaagctcctgcctctttgtgtgcgtcactgtgaaacccccacccttctgcctcgtgctaaacgcacacagtatctagtcaggggaaaagactgcatttaggagatagaaaatagtttggattacttaaaggaataaggtgttgcctggaatttctggtttgtaaggtggtcactgttcttttttaaaatatttgtaatatggaatgggctcagtaagaagagcttggaaaatgcagaaagttatgaaaaataagtcacttataattatgctacctacctgataaccactcctaatattttgattcattttctgcctatcttctttcacatatgtgtttttttacatacgtacttttcccccttagtttgtttccttttattttatagagcagaaccctagtcttttaaacagtttagagtgaaatatatgctatatcagtttttactttctctagggagaaaaattaatttactagaaaggcatgaaatgatcatgggaagagtggttaagactactgaagagaaatatttggaaaataagatttcgatatcttctttttttttgagatggagtctggctctgtctcccaggctggagtgcagtggcgtaatctcggctcactgcaagctccgcctcccg

SEQ ID NO: 102 - protein, 1144 aa, Homo sapiens
MCLGRMGASSPRSPEPVGPPAPGLPFCCGGSLLAVVVLLALPVAWGQCNAPEWLPFARPTNLTDEFEFPIGTYLNYECRPGYSGRPFSIICLKNSVWTGAKDRCRRKSCRNPPDPVNGMVHVIKGIQFGSQIKYSCTKGYRLIGSSSATCIISGDTVIWDNETPICDRIPCGLPPTIANGDFISTNRENFHYGSVVTYRCNLGSRGRKVFELVGEPSIYCTSNDDQVGIWSGPAPQCIIPNKCTPPNVENGILVSDNRSLFSLNEVVEFRCQPGFVMKGPRRVKCQALNKWEPELPSCSRVCQPPPEILHGEHTPSHQDNFSPGQEVFYSCEPGYDLRGAASLHCTPQGDWSPEAPRCAVKSCDDFLGQLPHGRVLFPLNLQLGAKVSFVCDEGFRLKGSSVSHCVLVGMRSLWNNSVPVCEHIFCPNPPAILNGRHTGTPSGDIPYGKEISYTCDPHPDRGMTFNLIGESTIRCTSDPHGNGVWSSPAPRCELSVRAGHCKTPEQFPFASPTIPINDFEFPVGTSLNYECRPGYFGKMFSISCLENLVWSSVEDNCRRKSCGPPPEPFNGMVHINTDTQFGSTVNYSCNEGFRLIGSPSTTCLVSGNNVTWDKKAPICEIISCEPPPTISNGDFYSNNRTSFHNGTVVTYQCHTGPDGEQLFELVGERSIYCTSKDDQVGVWSSPPPRCISTNKCTAPEVENAIRVPGNRSFFTLTEIIRFRCQPGFVMVGSHTVQCQTNGRWGPKLPHCSRVCQPPPEILHGEHTLSHQDNFSPGQEVFYSCEPSYDLRGAASLHCTPQGDWSPEAPRCTVKSCDDFLGQLPHGRVLLPLNLQLGAKVSFVCDEGFRLKGRSASHCVLAGMKALWNSSVPVCEQIFCPNPPAILNGRHTGTPFGDIPYGKEISYACDTHPDRGMTFNLIGESSIRCTSDPQGNGVWSSPAPRCELSVPAACPHPPKIQNGHYIGGHVSLYLPGMTISYICDPGYLLVGKGFIFCTDQGIWSQLDHYCKEVNCSFPLFMNGISKELEMKKVYHYGDYVTLKCEDGYTLEGSPWSQCQADDRWDPPLAKCTSRAHDALIVGTLSGTIFFILLIIFLSWIILKHRKGNNAHENPKEVAIHLHSQGGSSVHPRTLQTNEENSRVLP

SEQ ID NO: 103 - DNA, 26385 bp, Mus musculus
  misc_feature (1)...(26385): n = A,T,C or G
gtttcctgattttagttggattttttttctcccaggtttctgcagtgtccccaccccccacccccattttctcccactcttacccaagagccttaactcttccattgtggattctactttcctcctgattccagtgatcttcagggtcatggcagccttggagtatcaggctgctgttcccaatgtgggatgcagagggcactgccagcctggttatcacgcaccactgtcacacagggaagcgcccccttcccaggatcttaatatttctcctctcttctatttcacagaggagatgcttggtaaggcagtgtcttcaggtcccaggtccctgctaataaatgaatccatgttaaagccacattcccaggaactgggataccgtgtttgcctcgcttgcatgaagccctagtttggatcaccagcactgcaaaagccaggaattggtggcgcatgactgtaaccccagcacttgggaggcaggaagatcagaagttcaaggctattcctcacctcccagcattctgtagacactctcaaaaacccaaagcaaggcctgtggtggtgcaagccttcaaccctaacacttggaaggcagaggcagatggatctctgtgagttcgaggctagcctggtctacattgagagttgcagggcagccagggctacatggagaatccctgactaaggggacaaggaagcacttgctgccaagcctgaggatatgagtccccgagcgtcgctggatggaaggagagaagactgacctctgacctccacaggcatccagtgtcccatgcacacacatgcacatgcagacaaagtaaataagaaaacaaattaaatgtaggctggacggatagatggttcattggttaaggggacttactgctcttccagaggacctgaggtgtttcccagcacccaggtcaggcagcttataactgtctgtaactcctgctcctgctttctccaaggacgttcccacacaaatgtgaatacgcatatgggcataaacaaaaagctacaaagtgaacctttaattttttttaatgtgtgaacaaaacaacaacagcaaacaaaacaaaacaaaacaaaaaaaaaaaaagaaaggcctccccaaaacaaagaagacccagcagatgaaagaaagtgtttgctgagctgggcgtggtggcacacgcctttaatcccagcacttgggaggcagaggcaggcggatttatgagttcgaggccagcctggtctacagagtgagttccaggactgccaggcaatacagagaaaccctgtctcgaaaaaaccaaaaaccaaccaaccaaccaaccaaacaaacaaacaaacaagtgtttgctggcaagccaggtgagctgcgcctcatccctggggcccatgtgatgaaagcagagacctgattctaaacacttgtcttttgatctccatgagcttgcacacttgctcacatacaatacacacacacacacacacacagatgcacacacagacatacacacacacatacgcacatgcacatgagcgcacacgcatgtacacacatgcaggcacacatacaataaaatataagaagattgctccaaacatgagacaaccctgagatatgtagaaagatcccatctcaaacaacaacaaaataataactaatgaaaaatagaataaacaatccccaggccaactctgtgtgggggcacatgcttgccagtcccagaacctggaaggctgaggcaggaggattaaaaagccttggggacaccaggcttggtggcaccggtcgtaaatccagcacttgggagttaagaagcaagtgagtcacatctgtgagtctgaggctatcttggtctacgtaaccagttctagtatagccagcctgggatacatagtaaccagttctagtatagccagcctgggatacacagtaaccagttctagtatagccagcctgggatacacagtaaccagttctagtatagccagcctgggatacatagtaaccagttctagtatagccagcctgggatacatagtaaccagttctagtatagccagcctgggatacatagtaaaatcttatctcaaagctaaacccaaacccagttgttattttttgcttttttgttttttgggggtagaggagtcttattggtttgattatttggttttctgagacagagtagccctggctgtcctggaacttggattgtagaccagactggcctcaaactcagacatccgcctgcttctgcctcctgagtgctagcgtgtgccaccaccgctagacttatttttttaatgtgttttgagtattttgtgtgcatgtatgcacatgtatcatgcgcatgcagttcacgcagtggccagaagagggcttcagattccctgagccactatgtgtgtgctgggaattaaacccccacccctctgcaggcgctcttaagtgttgagccatctttctagcctggttggttttgatttttgtttgcgtatttgttgctataaggtcttatgtagctcaggctggcttcaaattaaagatacggtcttagctagccttgaacttctgacctctcttcctccagtcctccagtggagattaggggcatgttccctcccccagacctgacagcccctttgaactcaaagcctatgcacactctttctgcatcgtcagtggctcagtggctgcctgatatgcagcagagcaggctggggtcccttttcagagttgacacagaaagaaagtgacttttaggtctggcctgccacctttttggcaccttttgtttccatctcgtctgctttttaagtatgatttctgactaaactccctgagtctgactctaaaagagcttgactctcagaatggatcagcctttcccgccaagctatactctgaggaagaaatgactgatagatttagttactgttcctggggcacttgtgtttaatttaaaatgtttaaagatttatttgtttattttatgtatatgtgtactgtagacacaccagaagagggcatcggatcccactatagatggttgtgagccaccatgtggttgctgggaattgaacttaggaccctggaagagcagtcagtgctctctcaacagctgaatcatctctccagcccttaatttaaacatttaatcactttgtgtgtgtgtgcctgagtgtctgtgtgtgtgtggagagagagagagagagagagagagagagagagagagagagagagagagagaataagcaaatgagtgagactgctatagcatgcataatcagagaacaacttacaagaattgattctctctttttagtacaaaggttccatggatggaactcgagtcgatagatttggtcacaggtcccataactttctgagtcatcccaataggtgtgaatgtgtttagaacaagatgtacatcaacccaaatgaagcttggtggagtcttaaaaatgataaatttattttcattttatgtgcattggtgttttgcttacatgcatatctgtgtgagagtgctggatcctttggaactggagttatagatagctgtgagctgccatgtggttgctgggaagtgaacccaggtcctctggaagagcagccgatgctcttaaccgatgagccatgcctctagctgctgagatattttattttattttattttattttattttattttattttattttattgttaatggaaatgtctttcccaggctctctcttagcctagaactctgcttcctccaaagatgaatttctgaggtataatatggaatggcctagcttcctacacatgtccgtaagctaggaatttctccacatagtaccctgcacagaaggctcaagggaatgagcactatagatgggtcgcctgactttgtccctgagaaattcctcatcactgaggcctgggtcactctgatgatttgaatatgcttggtccaaggagtaccgctattagggggtgtggccttgttggagtgggtgtggccttgttggaggaagtgtgcccttgtgcctgtgggctttaagaccctcatcctagctccctggaagccagccttctcctgtttgccttcggaacaagatgtagaactctcagctcctcctgaaccatgcctaacatgttcctgccttgatgataatggactgaacctctgaacctgtaagccaggcccaattaaatgttgtcctttgggctggagagatggcttcgtggttaagagcactgactgctcttccaggggtcctgagttcaaatcccagcaaccacatggtggctcacaaccatctgtaatgcgatctgatgccctcttctgatgcgtctgaagacagggacagtgtactcacatacataaaataaataaataaatcttttaaaaaatgttgtccttataagagtttgccttggagccgggtgtggtggcgcacgcctttaatcccagcactagggaggcagaggcaggtggatttctgagttcgaggccagcctggtctacaaagtgagttccaggacagctagggctatacagagaaaccctgtctcgaaaaaccaaaaaaaaaaaaaaaaaaaaaaaaaaaaaaagagtttgccttggtaatggtgtctgttcacagcagtaacaccctgactgagacctttcacacatgtacctttcttgatctctggtggtggaatgcaatctaagacagggaaaccctattatctatgagtaccgctgctgaagtggggacagaggggagagaatggctgtcaccacgatgcacactcaacaacccctcacactaataataaataaattaaaaatgaaaataagatgaaaactaaaaaatatatagggcaaagagaaatagaggaagacacccatccccacctctggcctttgcatgtgctcacacacgtatgtgtacatgcacacacacacgcacacacgcacacacacacaacttacctagcatatgtgaggtcctaagctttaccataggtatggtaaaaataaagagaagataaagccatgttcactgacgtgtatagtcctatcacttgagaagcagaggtcagagttcaatgtcatatttaactgcatattgagtttgaagctagcctgggttacatgtggctcaaaacaacaacaactgaagaaaaagaagaagaagaagaagaagaagaagaagaagaagaagaagaagaagaagaagaagaggaggaggaggaggaggaggaggaggaggaggaggannnnnnnnnnnnnnnnnnnnnnnnnnnnnnnnnnnnnnnnnnnnnnnnnnnnnnnnnnnnnnnnnnnnnnnnnngggaggaagaggaaggctagagtacacccagtttaagctggccaccttggcctagtcaaactcacttggcaaactatatggcttcatgcttcctattatatttatttaatgtatatggatgtgtgaccatgcaccacttgtgtgtttgctgcccatggagtccagaagaggatattagatcccctgggactggagttacagagggttgtcatcaccatgtggtgctgggaaggaatcgaaccttggtcctctggaagagcggtcagtgctcttaaccactgagccatctctccagttctcttgattcccaactatgactttggatatgaactcttgttgtatacctaacacttaaattcctcaaaattcacatggccaccactgaattcttaatctctccattgcctagtttgctctctttttagtcattctcacctcagtgaatgacagctctgacctttatcttcatggcaaaaaaaaaaaaatctttgaatcaggagtagcctctgcaggcaccaggcaccaggcacacacacacacacacacacacacacacacatatatatggaccttaattttaaattgtgtatcaaccttggcttatctgtttcacacctcatgtgaggctatcagcaaaccctgactctcagtctgtaaagcacacatctccagcttctcccttctagcctacagccttctctccaactgcagttcaaactaccctttctgaaaacaaagctgggcttgagagatggcccaggagttaagagaatatacccggccttacagaggacctgattcaattccctgctcccacttcaggtagctcacaactgtctgtaactccagcacctctggcctccaaacacagaaccgaacacaagcaattttaaaagtaaacaaataaaaattaatttccctgatcacatctttccaatgattccttatctcactccaaacccaaaatcttgacagtaactagcaggcctctccaggtctgaccctgttccttcttaggtcttcaggttcacaaccaaccaaatcttcccttgtgaattactcctttattgatctttctgacccttccaacataccaagcatgttcctttgtcaaggtctatggacatttctgtcttttggaatgttcctcctttagatatcttggggttttgttgttgttgttttgttttgaggcagtcatactatatagcccaggctggcctggaatttaccatgtatactaggctagccttgtagcctggaattccctcagctccacttgtctctacctttcttgtattcaaactaaaagcaaggcccatgaactgcctgccactcctagctctggcctcaaattattttttaaaattatttattagatttgtttttctttgtagttcaaatgttttgcctgctcgtatatatgcgcaccacactcatacatattgattcccaaggaaccaaggttatgaatggttgtgagccaccttgtgggcgctggggaattgaacctaagtcttctacaaaagcaacaagagctcttcgatgctgatctgtagatctgctctcctggaattcttgatctccctccctcaacttccttattctaggtatatgggacagggggcggcttgctgtcacttttggctacagttaactaaagaattgaagtagaaactctgtagcaaaacacaggccttggaatagatctaggagggaggcggtgggggagggtgaaagctttgcttagacgttgggatagagagagagagagagagagagagagagagagagagagagagagagagagagaacattggagcagagctctgagttcttgggcaagcctttgaagcccaggcaggcgctaccccctcgggctgggagggtgtaacccatccatcaacctatagtagacaagggggtaacattctgtcttgggtgagtcagaagactccttggggctactactgaatgtgggggcttctctggagtccagtagttcgtctgcaacatctctggcgcctctgggtggtggccttcggtgctgcagtggaagaccggtgaggtggagggaggcgtacagctgagctcaccgccgcaggcgcatccatccctccagggcctataatttgggttccctgggctggccgcccctatcagcggcttagcaacagatgagtcacccaagaccccagccaaggcaaacatcaggggagggggaggaggaggagattcccgagtgtagcccggctttagccaccgcctcagttgcttgatttccccatctccagaggtccccactcttttatttgacactccccgcccttcagggcctcgttgttcttcccacagtgttttgctacacgtcccccctccccatccccgcaagggccggaggggccttccacttttctcatcaaaaggaagatgggccaggttgctctcatttcctccctgcagtgatggcagccccccttttttccccctctcatctaggtctcaacccttgtcaaggtctctctggttcctgcccctcctctttcttggagctggctgcgtgcttggggtattaggcaatgggtgtgcacccgcaggcctctccaggccccgcctgtcccaccgccctctagctgcctgtgggtcagtgctcaggccagacggtcggcaagagggcaccctcggccagctcaggccacccactgcctgcctgtggcctcttatcaaagagcaagacttcagagaggttagagaacagcggtatgagttcttaggtttgggacagttcaacttggggagcccccaggccactaagaagttgaacctctgggcgctataatcttccttagccccttcatcatcatcatcaccttcgtcgttattattattattgtcgttgccgctgtcgtcgtcatcatcatcatcatcggttttagagacagggtctctttatatagcctggctgtcccagaactcactacatagtagaccaggctggccttgaattcaaggagatccacctgcctctgcctcccaagtgttgggagtaaaagcatggcgcgcgcgcgcacacacacacacacacacacacacacacacacacacacacacagctctacctgccccagcttgccctagtcccttcttgacatctgactgaatgatagaactaggaggtaaagatagcattagggacaaataggaacaagacaaaatccaacgtgtgaatggaactgcagccacgggagaaacgtgaatatcctcgagatactgatgaaggatctgctaaatacccttccagggcctgggtgagtcccaggctgacaggcaggagagaggatggggcactggtgaggatcctgggttctggagtagggtagaagttactgagacagtgctggcccatctcagaagttatacatggtttggccttcttcccctaaatgggaaggagctcttgggctgccttttccctactccagaggtgggggactcagaaagagcacctcccgctgtggtctagcttagggctccagcaccctcatcaaggaagcactcaatagtaaccccagatacctaacttcctttgtactagacacctagccagggatgcctcttcaacacaaggcaagacttgcaagaatgtagaccaggggctggttgcccagccttgctgctagccaccaccaatgaagaggtggttgtggctgtgggtaccagccctgtgcttctgtttccttggggggtcggctctggatctatgtgacttgggtgcgcagggccagtcatgctgtgcttggggctgcggtctggcagggggcggggggggnnnnnnnnnnnnnnnnnnnnnnnnnnnnnnnnnnnnnnnnnnnnnnnnnnnnnnnnnnnnnnnnnnnnnnnnnnnnnnnnnnnnnnnnnnnnnnnnnnnnnnnnnncccccccccccccccgctatcctgaagttgggctcactttgggatcctctcaggcctccctcatctcttgtgcagcaaacgcgcgagcgtggagcatgcatttgggttatctcaagcattcatccaggaattccggagaggagacccctgagatctcggatgcctaccagaaaaggggagcatagggactgacaggaggtcttaggagctacccgagcttttgaccaaggccaaattctgaggccaaacctgagccctcccaaggggcaggcgtaaggctctgaggtgggcgggagccaagccacacagtggctcctcacttgcaggctcagagtgccctggtgcgcacaggctcgtgggctcttcaagagaccgtcagtaaccctaaggtcgtctagatccgtcctcagcgtgtcaaaggagcgcttcaatcacccactctcggaggcaaaggaaaacgatgaaagaccctgtcattgggaccagatcctggtcccttggggtcaccgcactctccctacagcctcgggagaccccggagcaggtgagtggaactccgaccacttgcccctggagtggggctaatcgtgatcccggcgtcctgtgtgtgtgtgtgtgtgtgtgtacacgcttggggggggagcggctgcgttctcctggtcaagtcagggggtggggtgcgggtggggtggggatgccccgggctctgggaggggccgcagttccgtcagctcgagcagaaccacccgtgagttaggtcgagcagagccaaagcccccggtgcttcgtcgcgggttcgctcgctagctatctggatcactccctcccttttaccctcccttcctcccggcgggcggccgcggcgacgccggggaagcggcagagaggagtggctgggcgctgggagaatgctgctccgccgagggggctgaacccgacagtttccccacggtttaagccccaagagccgggcccgagtgactcaaccgcgagccttgtggatcctgcacctgaaccgctggaggtaatggggcgggagagaacagggagggcagagactagacaggcacgcgggcggtcagacaagacagacagacagacagacagacagacagacagacaagcgtcccccctcaagagcacagacaacgccgagaaagccagatatagagatacctacagaataaagaagtgccttcggattcagagggcaatgagggggtggggtagaattggggtcggacccttggggactagatggtgtcgcactgcagagggagcgtgtagttagaaaaggggcgggggtagatggggaatctgtggccttggcgcagggcacctggtttccctcggggcctttgtagcccactttccccctggtgggagccgaggccagagagtggttccaagagcctgacctcggacccttctaatctagcttgcctggtattgccagcacgaggaggcaacacccctccaggtggtggggaacccccttctaatccctccctctaaccctgtaagggcgggcagatcagttgtggggcccacagagagggagcggttggtgaggagggatagagggtctgagagaaccggtctcaaatgggtatgtgagtgtcccaggaccctgcgtcgtgtctggctggctcggactccaggggtgctccggagggcctcgggctgctcagacccttcctctttgacaggttccaggacgcagacactggaagtcaaggggtgactagtattgcacagtttggggaggggtgagaaaaagctagtggggcttcattggtggcttaaggagctgaaacagagcgtccttcggtcccagggagccaatctagtcctcatcaaatgtccctgtccccgcaggcgctgactgactcgcccaccggagcctccgggcttcgacatgctggaggagccccggtctcggcctccgcccttaggcctcgcgggtctcctgttcttggctttgttcagtcggtgagcgtttttttatccagttccaggggagggaaagcaccgatctgggttagggaggatagggatggggcgtgcgactagaccccagacccttgtcgcttgtccccagggctctaagcaatgagattctgggccttaaacttcccggtgagccgccgctgacggccaacaccgtgtgcttgaccctgtccggactgagtaagcgacagctggggctgtgcctgcgcagccccgacgtgacggcgtcggcgctccaggggctgcacatcgccgttcacgagtgtcagcaccagctgcgcgaccagcgctggaactgctcggcactggagggcggcggccggctgccgcaccacagcgccatcctcaagcgcggtgagcctgacggggcggctgtgtgtgctgctgcccaggcgcggggggcaggccgaggcgcgcggaggcgggaagggaccggctcacggcttcgggaggggcctctccgggaatttccccaggagctgcgctcagctagatctggtcaccggctgggcctctgcctgcctgcctgccttccacctgcgtcgctggcgaggcagctgggtccctgcttccctaccccagggcctcccttttctgcctccacctaattcggatctgggatgcacctgtgaacaagagatgccccccaacccaagaagcttcaaacacaccccccctcaaccccctatttttctctcccctccctctccacccagacaagtccaggctggtgtccccagagtctcagcgggggtggggtgacgcccccaaccgtttaagggttaaacctgctcccctaattgctggggttcccaggagccaaagctgggaacaaagaccctgatggctttgaagctggggagtagccccctcctctgtgctgtgggggccccaggtgtccctcacctgaacaggtgaggaatggctggagggccacaaaacaggtcactgctggcctggtctagaaggaatggtccgggaggctccattgcctctccctatactcaactgaagtttactcccagaggactaatgatccacggaagggggtgggggtgggctcagtccagggatagagtagtgctttggggactatggggttaataggcagctgccatctggaggggaattcccaagacgtgtgcaaacagcttcacccttggatggttgggggatcttggggctggccctggagccctagattcccgggtaagaggggcctggcctccaaaccaactgtctttcatcttctcagaactcttgcttgcaagtgcccttgcttaaaatgaaacgagggacccccctccttctctgcagggcctgatatagtggaaggttttgatggtgaggatgtctctctaagcctgggaaagatttgtcatcccaagccccgtcctcaatgaccgccccccccccaaacataacagagaagccaaccttttaaaagggccttggggaaaatcactcctgactttctcctcctcccagtattttataaggtaatagcaggttagaataaacataaagggcaaatataaaactagaacctgggaagggggtgggcagctccagcatgctaggggttgttactgcagtggtaggtggtagtgtggtttaaagactcatttaataaggtgggggaagaaccccaaagccaaaggtgccccccaagctccctgcagagagatgcagaactcctggaacacaccttcagaagtcctcaggactctttctgaattatctcaaatccagaggtctctctaggcccgtggttcttaacctctctggagggctgagaggatattcagtgcctgagggttgatcttggggtggtcaaaagtcagatatcctgcatatcaaatatttacattatggttcacagcaaaattgcagatatgaagcagcaatgaaataattttatggttggggtcatcacaacctgagggaacttgtattatagggttatagctttaagaaagttgagaaccactgtcacaccccaaaatgacagatttacagagatttggctttagtggtatcttgacccatgggtctgaggcctggtgttatttcttgtctcaggatgctgtcccaaatcactcagctgataaatgacagagtcaggactcagaaatttctgacattggctgctgctactagtggtagttcacacctatgcgcttaggaagctgaggcaggagaattgtcaagagttcaaggccagcttgggctacatagaagatccaattggattttttttttttttttttttttttgctattagagggtggctggtgtctctttctcagcctgccatctgccttctcccctcagctccctgtcaaccttaccccaatccattttctccccaggtttccgtgagagtgctttctccttctccatgctggctgctggggtcatgcatgctgttgccacagcctgcagcctgggcaagctggtgagctgcggctgcggatggaagggtagtggtgagcaagaccggcttagagccaagctgctgcagcttcaggcactgtctcggggcaagactttccccatctcccagcccagccctgttcctggctcagtccccagccccggcccccaggacacgtgggaatggggtggctgtaaccacgacatggacttcggagagaagttctctcgggatttcttggattccagggaggctccccgggacatccaggcgagaatgcggatccacaacaacagggtgggacgccaggtgtgtgtgcttacctcggcctgggtctccttccggttccgagacagccttgctgtgagacagccttgctgtgtagtacaggctagctttagatttggaatcctcccagtctgagggctgtggctgttaggtgtggccaccgagccaggcttttctcagactttctctgtccctccctccctccctcctaaagagaggccccacagagtaatgggatgaggtttggtgagtgattttgttactagcaagcttgtcgctagtagtcacccgaaatatgtttagaatctataggaagctgcctggtggcatttaccatatgtaaatgctagcatatagcatcttagtttttttttttttttttttttttttttttttttttaatttaaggtgtatcagtgctttgcccgaatgtataggtctgggcaccatttgtgtttttggtgccctcagaggccaggagagggctttggactccctagaactggggttattgtctttttttaaatatttatttatttatttatttatgtgagtacactgttgttgtcttcagacagcactagatgaaggtattcattccatcccattacagatggttgtgagccaccatgcggttgctgggaattgaactcaggacctctagaagagcagtcggttattgttgtgagtcaccatgtgggtactggaaattgaacccaggtcctctgggagagcagcagccagtgctcttaactatctggtcacatctccagcccctcatatactgtattctatacagtgccttgtacttggctcactgcatagacattggtttttttgttttgttttttgagacagggtttctctgtgtagccctggctgtcctggaactcactggcctcgaactcagaaatccgcctgccttgcctctgcctctgcctccgcctcccaagtgctgggattaaaggcgtgtgccaccacgccccgccccgggtactgcatagacactgttacaacagctgccttgcctgacagactttaggacattctggcctacagactccattttatccatgtttattctggaaagcgctgttgtctccttgtgagctagtgatcaaagtaaatgctttcctttccgttcccttccttgctctgttcatttgcaccccctcatcgttcccctctttgtcaccctgacgttgtaggtggtaacggaaaacctgaagcggaagtgcaaatgccatggaacgtcaggcagctgccaattcaagacctgttggagggcagcgccagagttccgggccatcggggcagcactgagggagcggctgagcagagccatctttatcgatacccacaaccgcaactctggagcgttccagccccgcctacgtccgcggcgcctctctggagagctggtttactttgagaagtctcctgacttctgcgagcgagaccctactctgggctccccaggcacgagaggccgggcttgcaacaagaccagccgcctcttggatggctgtggcagcctgtgctgtggccgtgggcacaacgtgctccggcagacgcgagtggagcgctgccactgtcgtttccactggtgctgttatgtgctgtgtgatgagtgtaaagtcacagagtgggtcaatgtgtgtaaatgaaggtgagcctcgcctaggcacgacgaggaggagaagcactgtgtgagggctgctctctttcagccctttgctcggatttctgtctagggtttatcgtggctcccggaagctcagagcatctgcctgagaacagctctgggggtgtagggtcaggtgaaatctgtaacgagcagccttttgtgggggaagtggccccacactctgttcttaaacactcgaatagactaagatgaaatgcactgtactgttagcgtcttctctacctacagctccctcgggctcaggttcctacttcctttggatagggagtctatcttttggccactcctcttcctcgaaggataatagcaggcattgtgtggagtcaataagacccgtatatatagcaagagaccacctcttcctatttgtggttctcaaactcctccactacagcccagaacctcctcttatgggacctcgggtgacaataatgagaggttttcggttggaaaaggacagagggcagggaagcctcagacagctgtcttgtcaggctcttgggaggcttctccttccgttcagttgttgaaagggtctctccaaaggaaaggttttagccataactcttggaggcccttttccttcttcagcaggaagggtgggaatggataatttattttactgagatgtgttcttggttcctgtttgaaactaaaataaattaagttactgaactactggactggcagtggcagatggtgatatgtctagccacactcggggtagtagcccgtgtttttttctctttctaggtgaagtctacactcctgtactcagtgactttttatgtatatcctgctgacttccacaaaggatttgaaatgatgctcaaagactgagtttaggtttttagtctgtacaaaccaaggtggacttctgggtgtgaaggacttttagattcaaatgtacatagaccctgttcaccccgagccctaggctccagggtcaccttcaccattactcagaaccaaagctggtgcttgtctcccctgtaaagggctagatggtagatacactaggctatttatactgtggtctctatgtcgacaactcacctccaccgtacttacccagttctgctgttatagaccccaaatagttatggcagggggtgaatgaaagcagacacagacctcacataagcggatggggatagctgtgttcaacacagctcacaaagctggtgtgcagggccagaccttgccctccgactgtcacttattgaaccctttgctatactacaaggtcatgtctgcaatgggagtttcagaacttaaacttaacaattaggtggacaattaaaggacaggtactgttgtctctaagtccaaaccagagaattgggcaggggttgggggctggagggtgggggtggggtggtnnnnnnnnnnnnnnnnnnnnnnnnnnnnnnnnnnnnnnnnnnnnnnnnnnnnnnnnnnnnnnnnnnnnnnnnnnnnnnnnnnnnnnnnnnnnnnnnnnnnnnnnnnnnnnnnnnnnnnnnnnnnnnnnnnnnnnnnnnnnnnnnnnnnnnnnnnnnnnnnnnnnnnnnnnnnnnnnnnnnnnnnnnnnnnnnnnnnnnnnnnnnnnnnnnnnnnnnnnnnnnnnnnnnnnnnnnnnnnnnnnnnnnnnnnnnnnnnnnnnnnnnnnnnnnnnnnnnnnnnnnnnnnnnnnnnnnnnnnnnnnnnnnnnnnnnnnnnnnnnnnnnnnnnnnnnnnnnnnnnnnnnnnnnnnnnnnnnnnnnnnnnnnnnnnnnnnnnnnnnnnnnnnnnnnnnnnnnnnnnnnnnnggtgatgggaaaaaaattgagaggattcctatgctcaaaatgcaaaatgtgtcgtttgtcagggaagagtctcactgtgtaccccaggctagccaggcggtcagtacgtaccctaggctggcttcagactttccactgtgtctcattcttgagttctggaattgcatgtaggccttaccactcccggctaaaaattagataattttagcaaaactagcattctctgccactgaattatttgcatatacattttgtctttctttattcaatgttctttttttttgtatttaatctgagtaaaataatttctttatcttttcaatttttctacatttatttatttgtgtgtgtgtgtgtgtgtgtgtgtgtgtgtatgtgtgtgtgtatgtgtgtgtgtgcacatgcaagtggatgcaggcatactgtggaactcatatggaagtcatgggacaacgtgcagaaggcagttcaccgtttaccacttgggttccagaaactgagtttaggtcttcaggtgcggtggaagcattctgacctgacctgctgggccatcctgctgcccatcccttgtcttttcagatataagtagagagacgagattttttttttttctacaacatctccaattcctagcctaatgtctttgaaaaggagcacctttaagatgccttaaggacagaggcaggaggacttctgagttcgaggtcagcctggtctacagagtgagttccaggacagccagggctacacagagaaaccctgtcttgaaaaacaaaacaaaacaaacaaagaaagaaagatgcaatgtggaggggctggggagatggctcagtggttaagagtattggctgttcttccagaagatccaggttcagttctcagtacccacatgtcagttgacaaatatctgcaactccagttccaggggatttgacagcttcacaaggacatacaggcaacagcaccactgcacataaataaattgggactggagggatggctcagccattaagagcactgactgctcttccagaggtcctgagttcaattcccagcaaccacatggtggctcacaaccatctgtaatgagatctgatggcctcttctggtgtgtctgaagacagctacagtgtacttagatataataataaatcttgaaaaaagaaaaagaaaaagtaaataaattgcctggtgtggaagctgacttaggcagagcccggtgagttcaaggccagccttgtctataaagtgagttctaggactgccagggctgttacacagagaaaccctgtctctaaaagatagataatagatcttttttattaaaagatgcaatatggacaaaagacctttcagagcacctgcatatttggggtctataagatgctcccagggaggctggagatagcacctgctgcttttgcagagggcatggattcagttcccagcatccacatggtggctcacaaccatctgtaactccagtccaggggatctggtgcccttgatggcctctgcaggcttctgcacagccatggctcagagacatatgagggcaaaacactcatacagaaaatcaaaatatatattttattttaaaaggccaaaaacatgcttcgacggagtgcagaagtagctccctatatttctctaggtgataggttatctggtgagacaggaccaaggggaccatgaggactgttggatcatggcagtactccatggtgacattatacctttttagtgtgggaggccaggtatcgtggaactcaggaagcagagacaggcagatctctgtgagttcaaggccagcttggtctgcagagtcagttccagaacaaccagggctctatagagataccctatctcaaaaaacagaaacaaacaaacaagtttggggagggaggggtttggggagatggcttcttggtgtagagtgcttgttgctcttgcaggagacctgggtttgatttctagctctcacagttgggcagttcacaacagtctttaactccagttccaagggatcaaataccccattctgacctccagaggcactaggtatgcatgtggtacgcagacataaatgtgggcagaacatttatataagcagataaatctttaaaaatcaaaagaactatatatgtgcatatgtgcacgtatatgagtatctagaagagcgtcaggaatcccctggtgttttgcactgcctggaatggatgctgagaactgaactcaggtcctcctgaattcacccatcctctccatggcaacaacttagcgggagatgtcagacacctgctaacctaatgtgtgaatgaggagaggaagaaaggagaggggactgaagtaagatggacttggatacaaccaagaataacagggaacatccagagtgcagatgccttccctctaggaagaggcattctccagatggggctgtggcgagagagtcttttaactttccttttccctcccctgtcggtccctttgcctccctcgctttcctagcttttctttccatagcatgcacgctctgtggtggacttaagccccaaaccacaaccttgacaaattccaattggatttggtcagcagggccaacaccccctcccagcacaggcgctgggctcaggcccaggactggggtcagtggtggggtgggagtttgcaacccacagaactggtgggtggctacagtttcagcttttactgggctctggtggcagctggagggagggaaaagagcacactctggaggagccctaccttgaccaaatggctaggaagcttagagtggtggggagcagctggttacaggggagtagcacttctatccacccctgcttgtgtcaggccaacctctcctgacccttgtctccccacacaccagagggtgaaggacagaagacctgagggggtctctccagccacacccaccttttccaccataggaagctgtcagtcatttttgtcttcctttcactctgccatacatttgtgggagggctcaaggtcttcatcattaggtttcctctccttgttgaggttccacaaggcatgctgtggaagcactagggagtggggtgagcagtccataggcatacagaggcaagggagtgaggacctaacctggtggagggttatcacaaagttttaggcgagaagtggagacgttaacaatcacactaaaggcatgtcagagcacatgtcagagccgcaggaatgcataatggtcttttttttgtttgtttgttttttgagacagggtttctctgtgtagccctggctgtcctggagctcactttgtagaccaggctgtcctcgaactcagaaatccgcctgcctctgcctcccgagtgctgggattaaaggcgtgcgccaccacgcccggcttataatgttcttaaggtttctattgctgagataaacactgtgaccaaaaacaagctgaggaggaaagggttaacttcacctcacagattctatagtcactgaaggatgtcaggacaggaagtcaggataggaacctggaggctggaactgaagcagaggccatggaggagtgctccccatggctttttttttttttttttttttttttttggataaatggtcttttctgtggaagcctggctactgtcctagaacttgctacgtagaccagcctggcctcaaattcaaagaaatccacctggctctgtctcctgagtgctggaactgacagtgtaccaccgtagctggctcagcttgctttcctgatattttcccctggtattgaacttatttttatttgcatgagtattttgcctgcatgtatgcttgtgtaccacatacatactacacacagtgtccatagaggcctgaatggggcctgggactagagtcacagacagttgcctgccaccatatggatgctgtgaatcaaaccaggtccttgggaaaaagctgcctggccccttagcctctgagtgactagtcagccctcacctgcttcataaaattcaaaggtcgtgccgcccacagtgaccttggcccttccatgccaatcatcaatcgagagaaatgccttgcaggttggctcacaatctggtgaggtcatttcttgattggggcttcctcttcccaaatgattgtaacttctatcaagttgtcatcaactagccagtacagttgacctcttgtcaatatgacacacaaacacatcactattcaactagaccctttcctttctcagttaccctcaacatggcatgttataatgatataaaacattccaatgctgatgtttcccatatttgttacaaattcaaacgtataaagaaacccggtccttttagaaacatctgaagtctctcttttttttttttaagatttatttattgattatatgtaagtacactgtagctgtcttcagatactccagaagagggagtcagatctcattacggatggttgtgagccaccatgtggttgctgggatttgaactctggaccttcggaagagcagtccagtgctcttacccactgagccatctcaccagccctgaagtctcttttaaagttcaatgtttttctaaaacattcaaaatcgctgtaaaattctgaagtttcttaagcgtggagtcctgtgaaataaaaaaaaaaaaaaaaaaaaagctacatacgttattgcttcaaaaaggagaaaccaggacaatcacaaacaaagcaaagcaaaaccagagtccagcccggtaaaaaggccagcgctggggcctcctcatggttctttgggcctcaaagtgctctgtggcctcaactctgccagcttgtctcctgggcccagggcagcgctattccacagtttcttctgtccttggcagttgtcccacggtgctggcatctccaaaaggctgggtctctgctgcagctggattgtgttctcctcctctcccccctcctccccccccccccccccctgaccttgccatgtggtgacagtagaccagactggtttcaaagtcagaggtccacctggctctgcttcccaagtgctgggattaaaggcctgtgccaccaccctggactgctctttccttaatcacagctgattcttcagccccagctgtccagtatcaattaagtaaagtaaaagtttcactttagttgttctttttttgttgttgttgttgtttttttgtttttttattattattggctggggtccctctatatagccctggctggcctggaacttactatgttgatcactctggctgtgaactcacagcaatccatctgcctctaccccccagagtcctgggattaaaggtgtgagccaccacatgtgcactttagcggctcttaattcaaaatatgagacttagactctttaagggactttccaatttctccctgtaacttcccaagtcaggcctctgtcgtctgcactgctcttggcattatcttctaagtccccacagcaacccacggaactctgagcacacaacggctttcccagcccagagttcagatgccaccacaatcctccccaaaacacaaggtcaggtctgtgacagcaacatctcacgcctactgtccaaatgcaacctgaggaagaaagggtttattatagttcatcactgagttggaactcagggtaggaacctggaggcagaaacagaagcagaggccacggaagattgctgcttatacataggcttgctcagcctgatttcttatacaacatacaacccaggggtgacacctcctacagtgagcttggctttctcaaactatcactcaaagaaaatgtcccccaggcctgcttccagcccgagctgatagagcaagacattttcttaattgaggttctctcttcctgcaggactctgtaaccggagtccagctgacataaaactacctagcacagtaactatattttggggagtctcttgcctttaagaacccaggatatgggctagggagatagttcagccattaaaagtactagcaagacaagcttggcccgagcttgttccccagagcctgttgtaataggtggagggcgatcaggctcttactgacctctcttgcctagaggacctggctcccagcaccacgtggaacaactgcttgtaactttgtctccagagaatgttacatttttttctccctgtagtagatatccacacttacaggcacctactcacacacagagacgtatgtgcgtaggtacagttaaaaataaatccatttggctggatgtgtgacaaatacctttaatctaagcactcaggaggcagaggcaggcagatcgtatttgagttcaatgccaacttggtctataaagtgaattccaggccaggtggggctacatagtgagcccctgtctcaaacacaacaataacaaatatatatattttaaagctggatgcctgtggtgtaatgaaagcattcctaaagtaagatgggggatgatgccaggagaatcacacagagctagcctagagtgtgcactgcagcagcagaaaccagagatcctggcccaacgagggaaaaaagtcaagaacagcgactcccaaaaggtgtcctctctaacctccacatcttgctagagcacaagtgcacccgcaatctctcatacaagcacacacacacagagttaataaatggagggaaaaacgagcaaaaaccagagcttaacaaaggctctcaacagcattgagtcctgagtggggacaaatataattctcttcgttataagcaagttccttgctgtccatctcttcgttaaccatctctggctgttctggagcctgctctgtaaatcagactgacctttaactcacagacatccacctgcctctgcaccctagtctccagtgctgggattaaaagcttgtgccaccaccgcccccagccagtcctgtaatttttgaggtaaacaagagaagacaaactggtataaaggtataaaccagagacagatgtgacaagagatagattctgttcccagcctatgttttggagggagagaagagttataacgctgcaccaagctcttatacttgatgcatttaaagaacgcagtgggggctggtgagatggctcagtgggtaagagcacccgtttctggcgaggacccttctagctcagattctaacatagcttgtggctagagtctcaggcagtgtctccatcatgtcaaaagatgagtgtcagggaaggaaggcggggtcctgggtgcgctttcctggggatactaaaatccagactcatctagagagacttcatgagagccgcctctgagtttctgccctctgcctttcagcctcaacctcctagacgaccccatccagatgtttcctctagtatctggaatgcatcgttctttctcctcttcctttatgggaaaggatctcagagaaagcatccttaggaactagggagcagagcggattagcaggtggggtgcgagtgatgcgctgtttatttggaataagactggactagagcaggatacagcaaccgttttcatcctccatgctccacatgggctctgcttaagaaaccccggagactccctggtccgagccctgtggccagcgcagccaggatgtggcaaggtcccggagctcgctctgctcgggagcctcacctcagtgcccacagccccctctacacgccgtgccttccgatcctccagcccccacacaggcccccgcctaggctcagcttcagcaccggctgcttttgctgcagccgctgccatggtgatgggtctcgcgagaactgccgctcgctaccgcgcacttctcgcgcgatcgtggaggtgggaagtagcccgggctgggggtgggtgttcgccgcacagctcctgtcgccgtcgcggcttccggtgctaggtggagggcgggcaggagggagccggggagcgggccagcggaccatcttcaccgcggtcgggtcggcttgcggagcgggaggcagcggccggagagccgggcggaacctgcgggggcggaggcggcggtggcagccgcggcgcagggagcaggaacaggttcggagctggggagggaaggcgggtccgggcagggaagaggctgggtccgggtgggagcccgaggcccccggccgcggtccggctcgcaccgtctgggcgaggtgctggtgtggggggtgatcctcgctgagcttggggaccccagccccactcctgtccccgcagccgaaggacgccgagctggggtgggggcggggggcgcacacggatttgtcctccgcctcccccgagggtgcgacctgggctgcagaggtgagcttgggagggttggggacgagggggaggcaggctgacctgtgggagggggacgcgggggcggtgtggctgtttggctctcttttccttgggtttaaagggctgcgaggaacgctgccttttctctctccctcccccgcccgagctgtgggggaaccaaagaaaagccgtgccgtgccgtggttattctcctccctcacccagcgcgaggcgtggggggccggggcttagtatcagggcctactggtggggctcggctggctgcgcacggtcctcacggaggtggcgctctgctctggggtgttgggaagagggcagcaggtggggagagggtggagaggaggctggagacgggggagggggacctgagctagctcggaggagagaggtggggccttcctcccccaggcggagcgggggcggtgtcaccgaaggagggagcagcttgtcactggccctgagtttgtgtcttccaatccgctttctttctctaggaagtaccaggattcccggaacagaaaatgaagcctttgcttagcatgccagtcctttttgaaggaaggagggggaggtggggaggt

SEQ ID NO: 104 - DNA, 2217 bp, Mus musculus
ctcgagcagaaccacccgtgagttaggtcgagcagagccaaagcccccggtgcttcgtcgcgggttcgctcgctagctatctggatcactccctcccttttaccctcccttcctcccggcgggcggccgcggcgacgccggggaagcggcagagaggagtggctgggcgctgggagaatgctgctccgccgagggggctgaacccgacagtttccccacggtttaagccccaagagccgggcccgagtgactcaaccgcgagccttgtggatcctgcacctgaaccgctggaggcgctgactgactcgcccaccggagcctccgggcttcgacatgctggaggagccccggtctcggcctccgcccttaggcctcgcgggtctcctgttcttggctttgttcagtcgggctctaagcaatgagattctgggccttaaacttcccggtgagccgccgctgacggccaacaccgtgtgcttgaccctgtccggactgagtaagcgacagctggggctgtgcctgcgcagccccgacgtgacggcgtcggcgctccaggggctgcacatcgccgttcacgagtgtcagcaccagctgcgcgaccagcgctggaactgctcggcactggagggcggcggccggctgccgcaccacagcgccatcctcaagcgcggtttccgtgagagtgctttctccttctccatgctggctgctggggtcatgcatgctgttgccacagcctgcagcctgggcaagctggtgagctgcggctgcggatggaagggtagtggtgagcaagaccggcttagagccaagctgctgcagcttcaggcactgtctcggggcaagactttccccatctcccagcccagccctgttcctggctcagtccccagccccggcccccaggacacgtgggaatggggtggctgtaaccacgacatggacttcggagagaagttctctcgggatttcttggattccagggaggctccccgggacatccaggcgagaatgcggatccacaacaacagggtgggacgccaggtggtaacggaaaacctgaagcggaagtgcaaatgccatggaacgtcaggcagctgccaattcaagacctgttggagggcagcgccagagttccgggccatcggggcagcactgagggagcggctgagcagagccatctttatcgatacccacaaccgcaactctggagcgttccagccccgcctacgtccgcggcgcctctctggagagctggtttactttgagaagtctcctgacttctgcgagcgagaccctactctgggctccccaggcacgagaggccgggcttgcaacaagaccagccgcctcttggatggctgtggcagcctgtgctgtggccgtgggcacaacgtgctccggcagacgcgagtggagcgctgccactgtcgtttccactggtgctgttatgtgctgtgtgatgagtgtaaagtcacagagtgggtcaatgtgtgtaaatgaaggtgagcctcgcctaggcacgacgaggaggagaagcactgtgtgagggctgctctctttcagccctttgctcggatttctgtctagggtttatcgtggctcccggaagctcagagcatctgcctgagaacagctctgggggtgtagggtcaggtgaaatctgtaacgagcagccttttgtgggggaagtggccccacactctgttcttaaacactcgaatagactaagatgaaatgcactgtactgttagcgtcttctctacctacagctccctcgggctcaggttcctacttcctttggatagggagtctatcttttggccactcctcttcctcgaaggataatagcaggcattgtgtggagtcaataagacccgtatatatagcaagagaccacctcttcctatttgtggttctcaaactcctccactacagcccagaacctcctcttatgggacctcgggtgacaataatgagaggttttcggttggaaaaggacagagggcagggaagcctcagacagctgtcttgtcaggctcttgggaggcttctccttccgttcagttgttgaaagggtctctccaaaggaaaggttttagccataactcttggaggcccttttccttcttcagcaggaagggtgggaatggataatttattttactgagatgtgttcttggttcctgtttgaaactaaaataaattaagttactg

SEQ ID NO: 105 - protein, 400 aa, Mus musculus
LTRPPEPPGFDMLEEPRSRPPPLGLAGLLFLALFSRALSNEILGLKLPGEPPLTANTVCLTLSGLSKRQLGLCLRSPDVTASALQGLHIAVHECQHQLRDQRWNCSALEGGGRLPHHSAILKRGFRESAFSFSMLAAGVMHAVATACSLGKLVSCGCGWKGSGEQDRLRAKLLQLQALSRGKTFPISQPSPVPGSVPSPGPQDTWEWGGCNHDMDFGEKFSRDFLDSREAPRDIQARMRIHNNRVGRQVVTENLKRKCKCHGTSGSCQFKTCWRAAPEFRAIGAALRERLSRAIFIDTHNRNSGAFQPRLRPRRLSGELVYFEKSPDFCERDPTLGSPGTRGRACNKTSRLLDGCGSLCCGRGHNVLRQTRVERCHCRFHWCCYVLCDECKVTEWVNVCK

SEQ ID NO: 106 - DNA, 26429 bp, Homo sapiens
  misc_feature (1)...(26429): n = A,T,C or G
gaagtgggagagatgggatgcgtatgaaccgcggggagtgtgactggaggtactcgggtgggcgaataaccgggtcttgagtgctagcgagtctgtttgggggagggctcgaggagagcgttcctgggggcgagtccgcgcagcgcctcacagacactcgtgcagtacgcgcgtgtgcgtgcagttgcggcagctgacgtggcagcaccagtggaaggtgcagttgcagcgctcggtgacgcgctgcgtgcgcgtgcggtggcccctgccgcagcagagcagctcgcagccgtccagcgcgggcgacgagctgttacaggcgcgccctgccgtgcctgctgtgcccaggcgtccgctgtacgtgcagaagttgggcgatttctcgaagtagacgaggtcgtggggggagggcggtttgtgggccgggtcttccggctccaggcgcagcagctccgcccgcgaagcgcggttgctgccgcggttgccgtacaggacgcgcgaggcgccgtcgaagcggtcgcgcagcacatcgcccacggcgcgcagcgtgggcagccgcatccagcacgtgcgcaccgtgcatgagccggacatcccgtggcacttgcactcctggcgcatctcggagaatacggtctgcggggataggggaagaaagagtgtcccagggcaccgggccagagtcaccctcccagacactgccctctcccggacgccacgggggccggacctcagcaaaggcccaggcctagctgagcccaggggaagggaggcgcgaaatgttccgctgagatttggaaaccctgcccaaccctgctccgccgcggcgagtcagtctcggcctctcaggcttatttttcgaatctgtacagcgaagagactgtgcttgatttgcaacctcttctacctgtccgcgggccagacatacctttgccctcagccactgtctcctctattctccgtcttcgttccaagcctccggctctcccaggacgccctctcctggtgccccttgccttatctcaccgaccgtcacttccccagcccgaggttggcccctgccgctccgcttagggtgcggagcctctcaaagctcaccgtacggcctgcctcgttgttgtgaaggttcatgaggaagcgcaggtcccgccccttctccccggagtccacgaactcccggccgaagaggcggccgaagtcaatgttgtcgctgcagcccccccagtgccagtcggggcccccggggccgcgccgccggtagtcacacgtgcaggattcgatggaaccttctgagcaggagcgcgccaccgaatgggtgaccccggcggaggtgatagcgaagataaacgccgtttctcgacagcctgtgggagaagggagcggggatcagcgagggggtacgcggggcgcggccagcaccctcatgaagggcttgggaccggaatcccacccccgactccgcactttgagtcctgagagccagggccggcagtgctggaaagctggtctctagggctagtagagaaagcaggtgcgtgggcacgcagccacgtccacgggcgtaatcacaccttactgggagattctagggcgcattttggctcgatagcggaagtggagcagccccagagagacaaaccgaagagaggggagcggaagaaccatacatccccaagacttcttcgcagcccaaaactttcggcccattttggcggtgcaagccttgctgggcgagaggccagacacacgcctgcagagagcagcttcccaggcgcttttgagagaggctgggggaaagcggcggtcagccggcgtccgcgacccgaaactttctttatctggggcagtagctcagaaaagttaagcttcgtttccagggtgcacggctggaaaacgcctggtagaagtctggccccgagctggcgctgggcacgaggcacttggcaaggttgattgtgtgaccctccaggcgcctgggacaccttctctgaactcgcccgcccatgccctgggggtgaccccgcgtttcccctgctcccggaagcgtcgccttcctgggcacccacctcggttgacgatcttgccgaagaggtggggccctggagcagtgggacagttccagcggcgattccggaactgccacttgcactcgcgcacggcactctgcagccccccactcacgctgtgcaggatccccggattttggcgtatcagacgccgctgtttgcggctcaacagctgcagactgggctcgagtaccagttgcagactcttggagtctgtaagcaggttcgtggaggaggctacgttcacaatacccctggtgggacgtatgatagctcaggctcaggaaggggatccgcaccctaaccataaaaactgtgccacccggtcctcttcctgggggtatgtggctggagagaatggcgggagattaataatacccgctctcccaggctcactaatttgaaagaactgggcgtccagacttgtgtgtgcccagtagtcccagggctgctcgcctgagccctaggtccggagactggacagaggaggtacccggagaccgagtgtctaccttggatctccgagcctcttccggtcagcctgagcgagataatcatggcctgcagttcttgcccacccaaggcgtgaaatgcttaggagtcccaccctcttctcccctcctttctaggcgaactcctggcccttcacttcccgaggtggggaaacctgtggtgagccaccgccgtgaggctggagttggcgctcaaaggggaagggcggtgctagatgagagtgggctccctgcctggggtatcttaggcctccgcgggcggatcattcgccccacttgtacagagctggagtctggggcagtttcatgccagatcgcccttcggtgtcgcggagggaagtcagagcggggagggagcctgtcggcagacggatcccagagcgtgggagctgggtagggttggcccctggctctgtgccgcgggacaagtggcgaccccgcaccagctcacttaccaccatcggccactgctgttggcagccagggctgcgggcagagcggccagcgccagcagcagcgtagcagaaacccagccaggcaacagcgcccagagccccatggcctgcctggctttgcccgctctgtgctgcagttgcggcgactttggttgttgcccgcgacggtgggacgggacgcggcggtggcggcagtggcgagagttcgcagtctggctttaacaaccctgggggcgggcggcggacagcatggctcgcggtcccggctggtgggctgaggcggccacggcgggcggcaccgcctcttatagttgcggcgctggctgaagtgacgggaggaggctgcccctccgggccgcactgtggcaccagggcgcaccggttaggggcgcagacaatgggcagcgagcggggctgtggttcccgcccgtctgagccgagagctgacgggttggccgtcggggctcacccccgccccctgcccggtggcccccgcctccgggcctgcactggccgcggacccctccccttgggacaccctcccacgcgcgcccgcctcactcagctgagcgtccggagcccgtcgaggactagcatccgccagggggcgcggcgagagtgtgctgcggggagagcccgccaggggcccagcccgcctcgccgcccgcggtggggttgtcccctcgacgtcaccccgggcccctccgacgtcccctctctcccccatcctgagtgtcggaaggaaagctgtggttctgggcagcgactccggggagatgcttaaccgcccaggaacccccgatggctggacagagaaggaaaaaggggagacgggggcgtgagtgcggctgtggtcagggaaatcccggggatgagttgtgggggtgagctaaccaaaaggagcctagcggtggagagaaacctaaagcaacaggcagtttgctcatgtgcgccagaagaagcgcacaagtggctgtgtgtgtgtgtgtgtgtgtgaagtggaacaacgtgaatatgggtgggagtgagaatgtgctgtgttctgagggtgcatcctccctgtgtgttggtacgtgccagaaactccttgttctgacgaaggatgttaggaaactttccaaagaattttggaatttagctcaagtcagaaaaggtcatggagtcaccttgtcacagtcaccgcctggggcagtgtgtcaggaaggaggtggcaactgtcgacaggagactcagaagcatgattgagggatgcagagtgtctggactgtgtgtggagtgggtggatgagcatgtgcatgggaagattaaatatgtgtgtatgcgtcattctgttgccctttgtacctcgtggcatcctatggcgtgtcacactgtggtatgtgtcaaccagtgcatgtcattgggggagagagccgagcctacaaccaagatggtattgaggtgaacccagcctggagtggctaagtctctgaggcctaggctcagaaaggatgggaaatggtgcggatgtccactgtatgtatggtgatggagaggactgggaagacaagggttgctggctacattgaacctagatgaggaaacttgtgcctccatgtgtttgcttctctttggatgtttctgccaagtttctgtctttccctaaagctctagttcccaccacactgggatacccagagtgcctgtgaccatctcatccattgtacacttttctcttctctcccagggactcctactcagcttcaaggccatttaggcctcctattgaagaagtgacaggctgggcgcggtggctcatgcctataatccccgcactttgggaggccgaggcaggtggatcatgaggtcaggagatcgagaccatcctggccaacatagtggaatcccatctctaataaaaatacaaaaattagctgagtgtggtggcgcacacctgtagtcccagctactcaggaggctgaggcaggagaatggcttgaacccgggaggtggagattgcagtgagccgagatcacgccattgcactccagtctgggctacagagcaagacttcatctgaaaaaaaaaaaaaaagtggctgcttttccctatatggggaatagggggcactgccagcctggttatcatgccccaccaccacacacatggcccctggaaggagggaagatctcttctctctccccattttgcagaattaaaaatagatcaggcacttgtccaaggtccacgtctaataaatgaatcaatggtagagccagattaaaacccagaccaatttgactcaaagcccatgctctttcgaccttaccagctgcttgccagtgtgcagcaattacaggctgggaacccttctcaaaattgatgggtaaaaataattttttgggcctttctgcctcccttttgagttctagctctcatttttttcatctcccttgtcttttaggatgccttctgactgagaaatttccccaggcctgaacctaaagtctcaagtcccagaaatgactaggattcccttctaaggcagggaaatcactctaaggaataaatgccaggtaagtttcattaatattcccgggcacttgtgttttaaatgagatgcatattaacccaaatgaagcctgatggaagttattttagaaagaaatgtccttctttcccttttttcttcccttttgcccagcctagtatatctggcccttccaaggatccaccccagagggaaaaggtgtagtggtccagcaccctccgtagatccaaaagccagtagtccctgcagagagcacccagcatagatagctcaagtaaatggacaatgtatcacggggagcctgtcctttatcccttatgagtttcttcccactggggcctgggtcacatcttttggcctggtggattgatacaacaccgtgagggtgggaggctggctggaaaatatggaagccctgtctttgacgactgttgtcaagcagaggtgggaagagaggaaaggagccactgtgctttgttccaacattccacacaccaggagtagggggcaagagggtaaggcccctagatctgggtcacactgtttatgacctggctgacatttctttttcaaaatatgaaatgcttcacaaatttgcatgtcatccttgtgcaggggccatgctaatctctatatcattccaattttagtatatgtgctgccaaaacaagcacccaactttctatttagatcaaataatcatgatatcaactgtcccctctttctttcctgcatcatccacttatctctctcctggaacatacacataagcatgcagacatgctgcaatagtacccatctgaaaaacccaaaaacttcattagaccccacattactgcccaagattgctccatttcagtgctccattttactgcaaaaatcaaaagggttgatttaattactagagccaatttctttctttctttctttctttttttttttttttgagacggagttttgctcttgttgtgcagactggagtgcagtggtatgatctcggctcactgtaacctccaccttccggtttcaagcgattctcctgcctcagcgtaccgagtagctgggattacaggcgcccaccaacactcccacctaatttttgtatttttagtagaggtggggtttcaccatgttggccaggctggtctcgaactcctgacctcgtgatctgcccacgtcggcctcccaaagtactgggattacaggcatgagccactgcgcccagcccagagccatctttcctaaaacagaagtctgattagttcatttctctgctcaaaattttccagcgagaccccatgtcactcaaagtaaaggggcctccttcctagccctccagcttcattgcctaccactctcttccttgcgaatttctccccactagcctcactggcctcttttctaatcctttgaaccaagcatgctcctttctaagggtctgtgcacctgcttttctgtcttctaaaatgctcttcctcagatctctccatgtatttgttccttcagtttgttttccctccccctttataaaatagaatcccactactaatctcctttaccctgcttcatttttctctgtatcagttttgaccgtggatgactttaaaggcttgaagttgaaaatcagtagcaaaccacccccctggaatagggttagaggtgagatgttagaggggagaggggctttgccttgactttgggatctggggaggaagcagggctccagggtttagagtttgtgggcagaggagcctaccctcctttgaagcacccgcaggcagcactgcccccttgggctgggaaggcacagcccatccattaggcctgagtacagaagggggcaaaattctgtctaaggtaatcccatggatttgttggagtggactgctgaaagtggggccttcctgagagtccagtatgcagtcggcccgcagaccctttggtgcctccaggtggtggcctacggtgctgcagcagaaggcgcattaagcggagggtgggcagcgcagctgagctcaccgccacgggcgcatccatccctcctgggcctataatttgggttccccgggtctggcctcccctatcagcggctcagcaacagatgagtcacccgggaccccgggccaaggcaaacatggggggaggaggaggaggaggcttctgaggctttagccaccgcctcagttgctcgacatcccccaatctccaggggcccccactcttttctttgacccccgccctccagggccccagtgttcttcccacattgctctcgttacaccctccatccctaggatgggaagggcagccctccactcttctcattgaggggaaggggaaccagcttgctcctagtccctccctgcagtgatgaaagccccccactttccccctcctgtcattggccctgacccacgtcaaggtctctctggttcccgtccctcccctttcttggagctggccgcgtgcttggggtattaggcaatgggtgtgcacccacagccctctccaggccccgcctgtcccaccgccctctagccgcctgcgggtcagtgctcaggccagccggtcgggctgagggcactgcgggccagctcaggccacccagtctgccggcctgtggcctcttgtcccagagttgggcttcagtagagagaaggagcaggactctgggtccttggatttggaacagtcctgcttggggagacctagggtcaccaggaagttgaaacctattgtagtagttctgcccctcgccccttcttggcacctggctgtatgctggagcctgacaagggtagaatcagaaggcaaaaaataatcccaaacctaagggggacccagagacacatggagaaatacaaatgtccatgaggtccccatggagaagagaggcttaggcaacctcattcccctcttccaaggacctggcaggaatcccagggtgactgcaagaaaaaggataaggacactggtggggatcatgaatccaggtgtaaggatgaaaactatgagatggggcttgcagattctggtgacctccaaaaccacacatggtttggctcttgtcctctaaatgggaaggagggtcaggaactctagtgctcccacttccccatcccagaggtagggaatcagagaaaagcagtctggtccaggctgtccagtgtcagggaccatggcactttcacctccccagactgctcacagcctggcacgtaaaggtgatctgtaaatatcccaacagatgtaagtttgctcgatctcctgtctcagactgctgtgcccgctatccaacagtgacccctgcagcacgggcaggacctccagcagcacagactggaggctggctgcccagcagagctgcaacgccaccaccaaggaagaggtgactgtggttgtgggtatcatccctgttcctctgcttgcttgggggcagtctgagtcaatgtgcctggggcgcgtggggccagccgtgccttgggctgcggtctggcaggggcggggggcggctggaaagcctggggcccctctctggcaaaaatagcccacagtggttagagcttcgagggtgagtcaggcgggagcacggtggcgcctaacccgttcgctgccactgggtctccctaaggcggtttgcctttgcctgtgcaccccaagaccaggctctttcccggctgcccttgggcttggctcaattttggatcccaaggccctcctcatcccataagaagcaagtctacagcttggagcaggaatccaggccacccaaagtgcagaccgggggaatcccgagaagggtaggatacctctgttggcaagcatccctgccaggcaaggaagcatcggggcaggctgacaatctttggtgctacttgaacctctgctagggccaaactctgaggccaaagctgtcccctccaaaggggcaggcgcagggcttggaggagggtgggaaccaagctgcccagacgtgtgcttctcctgcccgctctgagtaccccgggtgcgctcaggctgtgggtgccacatgtgactgtcccacaccgagaagcccaaagactgtctggctccatcctcatcttgtcaaaggcaccttccagccaccctgatcttggtggagaaactgacgcaaagaggagtgatgaaagatgtggccatctgggccccattctggctccctaggaaggttactacaccctccctgcagccttggcgaccccagatcaggtgagaggaactctggccacctccttcttcagtggggccaagcctgaacccaggcgtcgggggagagggtgtgtgagagagagagagtgtgtgtgtgtgtgtgtgtgtgtgtgtgtgtgcgcgcgcgcgcgcgcgcgctgggaggagggggaggctgcattcgcctggtcaaggctgggagtggagggtagggtggggaagccccaggctcggggaggggctgcagctccgtcagcccggcagagccaccctgagctcggtgagagcaaagccagagcccccagtcctttgctcgccggcttgctagctctctcgatcactccctcccttcctcccgcccttcctcccggcggccgcggcggcgctggggaagcggtgaagaggagtggcccggccctggaagaatgcggctctgacaaggggacagaacccagcgcagtctccccacggtttaagcagcactagtgaagcccaggcaacccaaccgtgcctgtctcggaccccgcacccaaaccactggaggtaattagacctgggaaagcagggagggcagggacgtgcacacgaggaagagacaggcacgtgtgtagtcagacagacagacagacacgcatccacccacagaagcacagagacgcatagagagccagagatattgctagagataaagacacagagaataaaggagtgcccccagatttagaatgcaatgaatgtgagagccaaggggtgaggaccagacgggcgactatggaggaggggagcttgtagttaggcaaggtgggggatagggaagaggactcagtctgtgccacggtcccttttaggagggagccaggctctcctccccatctttcctgcacctggagcctctcctctttccttgctgctcagggagggggcagtgtgagtggggaactcattcttagacctttctcatggagcctacttgcccttgatgacacctggaggtgacacccccttaggtggtggggaacctcctccctatccctctccctagccctgtgagggcggggaagctagtcgtggggccctggaaaagggagcagtaggcgaggttgtggagcaagtgtttgtgagtctgtgtgtctgagtttgcaagtgagtgtgtgtctgtgtgccgggcgttgtgtctgattgggcaaggttccaggggtgctcgcttgagtcctgagctgggacaacgccttgactcttcttctttaagacctccaagcctcagggactctgggaatcaaggggtgtttcttcttgttttgtttgaggaggaatgagaagggtcagtagggtggcaccggtgggttaggagcccgaagaagggcgtcacttggttccccaagcgagccgccctattcctgaacccgcatcaagtctcccgtcccgcaggtcctgatcgatctgcccaccggagcctccgggcttcgacatgctggaggagccccggccgcggcctccgccctcgggcctcgcgggtctcctgttcctggcgttgtgcagtcggtgagcagttccccttgtctcccaggccatagaaacaccgacccggggtggggagagttggaggggtctggaccgcagaccccagacgccttcttggttcccagggctctaagcaatgagattctgggcctgaagttgcctggcgagccgccgctgacggccaacaccgtgtgcttgacgctgtccggcctgagcaagcggcagctaggcctgtgcctgcgcaaccccgacgtgacggcgtccgcgcttcagggtctgcacatcgcggtccacgagtgtcagcaccagctgcgcgaccagcgctggaactgctccgcgcttgagggcggcggccgcctgccgcaccacagcgccatcctcaagcgcggtgagcctggctgggcgggtcggcgctgccgcggaggctagggggtgggcggcagggcgaggcgcgcggaggcgggaagggatggtttcgcggctccgggaggggcctctcctggaattccccgccccccccggagccgctctgagccaggtctggccactcgtctgggcccctgcgcgcctaacttccacctgcgtgctgccagcgaggcagctgggtccctgctctcctaccctagggcccccctttcctgcctccgctcagcttaatctgggttgcacctgtgaacaagagatgcccccagtcctggaagcttcaaacgcccccctattccctccaccattttctctccccccatcttggctggacaagcccaggctggtgtccccagtgtctcagcgggggtggggtgacgcccccaaccgtttaagggttaaatctgctcccctaattgctggggttcccaggagccaaagctgggaacaaagaccctgatgactttgaagctggggagccagtcccctcctctgtgctgtgggggctccaggtgttgctcacctgagcaggtgaagaacggctggagaggcagagaacaggtcactgctggcctggtctgggaggcatggctgcctctcctggtttcccactggagttcactccctgaggtgtaaagacccatgggggctcagcccagagatgggggcagtgctctggggactatggggttaataggcagctgccatctgcaggggaattcccaagacttgtgcaaacagcttcacccctggagggttggagttagggggatcagaaggctggcccaggagccctagatcctggggtagcagaggcctggtctctaagcgggtgctgtctctcgtcttctcagggctccggagagcccctgcctaaaatgaagtgagggtccccctccttccccacagggcctggtgtaggggaaggcttggacacccaaatggtgagcatgtttatttaagtctgggaaaggcttggcagcctgagcttctgtgacccccaaaacataacaaagaagccaaccttttaagagggccttagggaaaatcactccccaacctctctcctcctctcagtgttttatagggtaatagcaggttaggataaacataaaaagggcagtcttgaagggcaaatataaaactacatcttgggaagcggaagggcagctccatagctccagtgctttgggggtgctaggatggtggtaggtaggttggttaaaagactgattaaccctgaagtgaatttaaaaaaaaaaaaacaaaaaaacagaaccacaaaggctctgctcccacctcacccacccaagctccctgcagggttgggggaatttctaaggctttcagatgtagaactcggttgtacacatcttcaaagacctcagggactccctcttagtcatctcccgactccaggggtctctccctgtgggctagctctttcatctacacctgaaaatcacagacttacagaatgagaatgggcctcagagatcatcttgacccatcgtctcctgcctccctttagaaatgaagaatctgaggctctgtgctttttgtacccttccttgtcccatgactttcctccaaatcactcagctggtgaatggcagggtcaggattcagttaggaatttctggagttggaggggggctgtttatttctttctgcctccacactctcagctgcctgtcaaccttacctccaccatcacacccttctcatccccaggtttccgagaaagtgctttttccttctccatgctggctgctggggtcatgcacgcagtagccacggcctgcagcctgggcaagctggtgagctgtggctgtggctggaagggcagtggtgagcaggatcggctgagggccaaactgctgcagctgcaggcactgtcccgaggcaagagtttcccccactctctgcccagccctggccctggctcaagccccagccctggcccccaggacacatgggaatggggtggctgtaaccatgacatggactttggagagaagttctctcgggatttcttggattccagggaagctccccgggacatccaggcacgaatgcgaatccacaacaacagggtggggcgccaggtatgtgtgtacatcttgtcctgggtctccccagcttttgaggcctggttagagtttgagaggcatagggaaatgataggataaagtgtgatgagtgactgacactcaccatcagcaagtcacccagcctcagttttgtatctgtaaagaacctaatgatacttatcttacaatgttattaagactgagctagcaggccagtgtggtggctcacgcctataatttcagcacttttggaggctgaggggggaggattgcttgaggccaggagttcaagaacagcctgagcaacgttgtgagaccccatctctatatttaaaaaaattatacatataaaaacagactgggccgggcgcggtggctcatgtctgtaatcccagcactttgggaggctgaggcaggcagatcacctgaggtcaagagttccagaccaccctggccaaggtggagaaaccccatctctattaaaagtacaaaaattaggccgggtgcagtggctcacacctgtaatcccagcactttgggaggccgaggcgggtggatcaagaggtgaggagatcgagaccatcctggctaacatgggaaaccctgtctctattaaaaacacaaaaaattacccgggcatggtggcatgtccctgtagtcccagctactggggagactgaggcaggagaatcgcttgaacctgggaggcagaggttgcagtgagcctagatcgtgccactgcactccagcctgggcgacagagcaagactccctctcaaaaaaaaaaaaaaaaagacaaaaattagccaggcgtggtggcctgcgcctgtaatcccagctactcagtaggctgaggcaggagaatcgcttgaacctgggaggcggaggttgcagtgagccgagatggcaccactgcactccagcctgggcgacaagagcaaggctccgtctcaaaaaacaaaaacaaacaaaaaaacagactgagctagcaaatagtatacccagcatagtgcctcatcgttggctgactgcatagtagctcttattacagctaccttccctacagaatttaggcatgctgtgggccagactcccaattttataagtgcttacaatggaaagagcactggattgggagtcaggacaacttgagttgagtcttggctctattactagctgttgatggaagatggacaaatcacactgctctgtcttcaattctgccatcataaaatgaggaagttggctattagctaactgcaatgtcctttctgttctgatataccatgttattcttgcctccatttgtccctccctgtgttctctgttcccttccctctcctgtgcctctgtgttctgtccatttgctgccctctgcttcacctcttttccccctgatgctctaggtggtaactgaaaacctgaagcggaaatgcaagtgtcatggcacatcaggcagctgccagttcaagacatgctggagggcggccccagagttccgggcagtgggggcggcgttgagggagcggctgggccgggccatcttcattgatacccacaaccgcaattctggagccttccagccccgtctgcgtccccgtcgcctctcaggagagctggtctactttgagaagtctcctgacttctgtgagcgagaccccactatgggctccccagggacaaggggccgggcctgcaacaagaccagccgcctgttggatggctgtggcagcctgtgctgtggccgtgggcacaacgtgctccggcagacacgagttgagcgctgccattgccgcttccactggtgctgctatgtgctgtgtgatgagtgcaaggttacagagtgggtgaatgtgtgtaagtgagggtcagccttaccttggggctggggaagaggactgtgtgagaggggcgccttttcagccctttgctctgatttccttccaaggtcactcttggtccctggaagcttaaagtatctacctggaaacagctttaggggtggtgggggtcaggtggactctgggatgtgtagccttctccccaacaattggagggtcttgaggggaagctgccacccctcttctgctccttagacacctgaatggactaagatgaaatgcactgtattgctcctcccacttctcaactccagagcccctttaaccctgattcatactccttttggctggggagtccctatagtttcaccactcctctcccttgagggataaccccaggcactgtttggagccataagatctgtatctagaaagagatcacccactcctatgtactatccccaaactcctttactgcagcctgggctccctcttgtgggataatgggagacagtggtagagaggtttttcttgggaaagagacagagtgctgaggggcactctcccctgaatcctcagagagttgtctgtccaggcccttagggaagttgtctccttccattcagatgttaatggggaccctccaaaggaaggggttttcccatgactcttggagcctctttttccttcttcagcaggaagggtgggaagggataatttatcatactgagacttgttcttggttcctgtttgaaactaaaataaattaagttactggactggtggatgcagatggtgatgtatgtacccacacttgggatcccagtccatagcttcttttctaggtgaattctcctaccttcctacactcagtgactttatgtatatcctgctgagttccgcaaaggatttgaaatgaatctcagtgactttgttggcaacttttcctttgtaaaaccaggaaggactcctaggtgggaagggctagagttccagatgtaggccctattgactctctatgcgcctcaactccagatttcaccttgatcactgccttagaacaagggctggcaatttttttgttttttttcggtaaagggctggatagtaaatacattacacttgtggtctttgtcccaactattcaactctgccacaactactcaactctgctgttatagatcaacagcagccatagaccacacataaacgaatgagcgtggccgtgtccagtaaaacttcattcacagaaatgggctgcaagaccaaatttggtcccctagctgcagtgtgttgaccctcattctagaccacgaggttgcctttgttctggagtttttcagtcctaaatgtatctcaacactgaatttggacccaaaagaacaggtacttttttctctggttccaaaggagtgaacttgggatatagatgcaagactgatgggaaacgtataaaagagattcatatgcttgaaatgggagtttttccctctggaaactagcaaaaccagcatgttctctcatggaattatttgcatgttttttgtccttatttatttgattgagacagggtctcactttgtcacccaggctggagtacaatggtgagatcttggctcattgcaacctcctcctcctgggttcaaaccatccttgtgccttagtctcccgagtagctgggattacaggtatgcattaccatatctggctaagttttgtatttttagtagagatgggttttcgccatgttggttggccaggctggtctcgaactccttgcctcaagtgatccacacgccttggtctcccaaagtgctgggattacaggcgtgagccactgtgcctggcttatttattattattattttttgagacaggatctcgctctgttgccttggctggagtgcagtgacatgatcttggctcactgcaaactccacttcttgggctcaagtctgggtccaagagtagctgggactacagacacatgccaccacacctggctaatttttgtgtgtgtgtgtatttttttgtagagatagggtttcaccatgttgcccaggctggtctagaactcctgaccttaagcgatatgcctgtctaagcctcccatgaccttcctcatttagagctcttttgtatgtcatcttagtaaaataattcctttatcttttaagagataacatcaactcaacagaacaggatttatttttatttatttatttttgagatggagtttcactcttgttgcccaggctggagtgcaatggcgtgatcttggctcactgcaacctccacctctctgattcaagcgattgtcctgcctcagcctcccaagtagctgggactacaggtgcgtgccaccacgcctggctaatttttgtatttttagtagagatggggtttcaccannnnnnnnnnnnnnnnnnnnnnnnnnnnnnnnnnnnnnnnnnnnnnnnnnnnnnnnnnnnnnnnnnnnnnnnnnnnnnnnnnnnnnnnnnnnnnnnnnnnnnnnnnnnnnnnnnnnnnnnnnnnnnnnnnnnnnnnnnnnnnnnnnnnnnnnnnnnnnnnnnnnnnnnnnnnnnnnnnnnnnnnnnnnnnnnnnnnnnnnnnnnnnnnnnnnnnnnnnnnnnnnnnnnnnnnnnnnnnnnnnnnnnnnnnnnnnnnnnnnnnnnnnnnnnnnnnnnnnnnnnnnnnnnnnnnnnnnnnnnnnnnnnnnnntgagactcccgttctcaataaatacatacatacatacatacgtaaactgttttcttcctttcttcctttctttttctttctttatttcctttctttctttctctttctttctttcttcctttcctttccttcttctttcttttctttcttttttttttttttttcatacaatgtcttgctctgtcttccaggctgagtgcaatggctcaatcttggctcaatgcaacttctgcctcccaggttcaagcgattctcctgcctcagcctcccaagtagctgggattacaggtgctggccaccacacccagctaatttttgtattttttatagagatagggtttcgccatgttggccaggctggtcttgaactcctgacctcaggtaatccatccgccttggcctcccaaagtgctgggattacaggcatcagccaccaagcctggcctaagctgttatctttctaagattcaatgcagacaaggaatatgcatcacacatttagaacttcacaaatgactgcacacttatgcagctgccagatgctgactctaacagattatttctttggccagagaatgtagaaatagttctctccacttctctagacaatagacacttctgctaccctcaaaatcagatgaaatgagagtagtaccaaggtagtgaggacattttgaggagtattaggttagggcagtacttttttttgttttttgagacagggtcttagggtttctgtcacccaggctggagtgcagtagcgtgatctcggcttactgcaacctccacctcctgggctcaaccgatcgtcctgcctcaacctcttgagtagctgggaatacaggtgtgcaccaccaggcccggataatttttgtatttttagtagagatggggtttcgctatgtcgtccaggctggtcttgaactcctggactcaagctatctgccctcctctgcctcctaaagtgctacggttacaggcatgagccactgtgcctggccataggacagttttgtttgtttgttttttgtcttatttttaagagacagagtcttgctatgctgcccaggctggtctcaagctcttggacccaagcaattctcttgccttggtctcccaaagtattgggattacaggtgtgagccactgtgttcagccagtactttttttttttttttttaatttagagtcagtgtcttgctctgtcactcaggctggagtgcagtggcaagatcactgcagccctgaactccttgactcaagtgaacttccagccccagcctctcagagtgttgggatttacaggtttgagtcaccacactgggctctagggcagaactttgtggccaaattttatgtcctggatttccacttgagcattgagaattctgggtttggaaatttgatggagacaggagaaatcccatccttacttcaggcacttactgaacctagtgtatgtggaaggaagaggggatgcacttagaatgggcataggatataagagaataatgataaagaatatttataatcagaacttctcacactcaggacgaggaaggagaatctctaacagagtcacagcatgattatttcagctttttcctgtttccttcctctgtactttgggtccctctttcctttctagcgttccctcttccttcatcagacacactgtgtggcaaacttaagccccaaaccacaaccttgacaaattccaaatggattttgtcagcaaggccaacacaccccttcgccactccctatccctgctcctagcacatgcactggggtcagcgacagggttggagtatgcaacccacagagctggtggctacaatttcagcttttactaggctccaatggcagccagagggagggagaaaggctgatgaactgtaagacgggcctcttgtccctcttcagctccagatgagttctactcctgctggcctttaccaagtggctgggaagttagggaggggcagtggccagctaattgccagctgggcagcactcctcctatctctgctcctgtttgctccatgggcagcgcactctgatgctgcaacagacgttttcttcttcagactccagacaggtgaaggacagaagcgctgggagattctctagtcccattaatcagtcctgactgacataccatggtacctgctgcttactacattagactgtcaccatttccatctttctattgcactggggataaaaccttgagaagatctgaagcactgggcaggaatatcaacaggttccacctccttgtctgagttccacaggcatgtgcacgtggtaagggcactagggaggttttataaatcatagttttggtggacagcatggtgggataacctggtggagtgttactagaaatttctagagaaataaatgaaagagtaatcacatggaaatatcaaaaaacccactctaggagtaataatactggaggaagatccttttgtagttcataagcataatgactgggtgcttacacacatgtgagatgtgccaccctcaaaccttgttacattggcacactatccatttgacatgaacaacaacaacaaaatactggaggtgtcttttgtccttaaaaacacagagctgggctaggcacggtggctcatgcctgtaatcccaacactttgggacgcctagatgggaggactgcttgagctcaagagtttggcctgggcaacatggcaaaaccctgtctctacaaatagcataaaaattagctgggtgactgggcatggtggctcacgcctgtaatcccagcactttgggaggctgaggcaggtggatcacctgaggtcaggagttcaagaccagcctgaccaacacagtgaaaccctgtctctactaaaaatataaaaattagccgggcgtggtggcacatgcctataatcccagctacttgggaggctaagacaggagagtcacccgaacacaggaggcagaggttgcagtgagcggagattgtgccattgcactccagcctgggcaacaagagcgaaactgtctcaaaaaaaaaaaaaaaaattagccaggcatggtggcgtgcacctgtagtcccagctacttgggaggctgaggtggtaaggatcacttgagcccaggaggttgaggctgcagtgagccgattgcgccactacacgtcgtactcagcaacacagcaagacccagtttctttttttttctttcttctttttttttttttgagacggagttttgctttatcgccccggcttgaattcaattgcccgatttcgggttcattgttggttcaaattccgggtttaaggcattttccttgattaaccttagggattatttgggcttttaggcccttgcaccaaggcttgctaaattttttgaatttttgttagagacgggtttccccgtgttagccaggatgttctcgatctcttgacctcgtgattcgtgatccgcttgcttgggctcccccaaagtgctaggattacaggcttgagccaccgctcccggccaagatccagtttcaaaaacagaaaaaaaaaaaaaagcaagaaacaaacaaacaaaaccaccaacaaaaacacacccgacagaactacccagcacagtggcacatgtctataatcccagctactcatgaggctgagacaggaggacacaagaacccaggaattcaagactgaagtgtgctatgatcgctcctgtgaatannnnnnnnnnnnnnnnnnnnnnnnnnnnnnnnnnnnnnnnnnnnnnnnnnnnnnnnnnnnnnnnnnnnnnnnnnnnnnnnnnnnnnnnnnnnnnnnnnnnnnnnnnnnnnnnnnnnnnnnnnnnnnnnnnnnnnnnnnnnnnnnnnnnnnnnnnnnnnnnnnnnnnnnnnnnnnnnnnnnnnnnnnnnnnnnnnnnnnnnnnnnnnnnnnnnnnnnnnnnnnnnnnnnnnnnnnnnnnnnnnnnnnnnnnnnnnnnnnnnnnnnnnnnnnnnnnnnnnnnnnnnnnnnnnnnnnnnnnnnnnnnnnnnnnnnnnnnnnnnnnnnnnnnnnnnnnnnnnnnnnnnnnnnnnnnnnnnnnnnnnnnnnnnnnnnnnnnnnnnnnnnnnnnnnnnnnnnnnnnnnnnnnnnnncttagggaagagccatgtgttcattcccttatactgctgtaaatgaggagagagggcacttagagaaccttctattggccgggcacggtggctcacgcctgtaatcccagctactcaggaggctgaggcaggagaatcgcttgaacccgggaggcagaggttgcagtgagccaagatggtgccattgcactccagcctgggcgacagagtgagactcttgtctcaaaaaaaaaaaaaaaaaaaaaggaaccttctgttcttagcattactagtgcccttctatcacagctatttttgtttcaaggcagttctgcatgtctagaccaggtgcaaaacggagtgtgagggaagtaggagtgggtaggaagcaagaaatatgggtgcaaagtccttcacctttccttgggatactaaaatccctactcatctaggcacacttcctcaaaccacacttctgaatattaggtttccactctccgtctttcaagttccaacttaactggctcagagtccagctgttttcctttagcctcttaagttcatcactctccttcctcttccttatgggaaaggatctcttgattcagaccccacagtaatctagtctcaggaatagtgagcaacaacaatggtgcggtgagggctttcaggggatggcagctagcccagattaagaaataaagatgaagtctggctgggtaaggcatgccacagcaacgactgttcacccatatcccgatgctggctttgcccaaggagcccctgggcccctcagcccagcccgtctcctacgcagccaacttgccgcctcagtccttaaattccaggcacaaccctggagcttgggattgtcacctcagtcctcactgtctcatccccattcacggctcccgcctccgccgcccacagcccccacacctgcccccgccctgactccagctccagcgcccggctgccggtgctgcagccgctgccatggtgatgggtctcgcgagaactgccgctagctaccgcgcagctctcgcgcgatcggggaggtgggaagtatcccgggctgggggtgggggtacgccgcacagctccagtcgccgtcgcggcttccggtgctaggtggagggaaggaaggagggagccggggagtgggccagggcagcagccgggctgaagtcggcttggggagccagagggagcggagcggaacctgcggggcagaggcggcggccgcagcggcgcagctgatagcaggaacaggtgagaggctgggaagggaaggcgggtcccggtagagaagaggctcggtcagggtgagggctgaggagatagagcgcctcccgggccccgcccggcactgcttggcgtggggcggtgggattcttcccacccgagagctcagagagggtgcgtcgggccagcttcacgcctgcccccgcatttgaaggacgcagagctggggtgggggtggggggcgcacacggatttgtcctccgcctcgctcaagggggcgacctgggctgcagttaggttgtcgcctgcaggaggtgtgctgttgagggagaggaaaaccgtccgaggagaggtgatgagggggcggtgatggctgtttgtatcttttctgttaaagggctagggaatgctgctttcttctactccctctccctcccccaccttagcaataggagacgggagagaagccttgctgtggttacaccccctcccccatcatagggcaggggtgcgtaggggggttgggggttagccaacagggcaggctgctggggcaccacatgggcgctattgtggtagaggttgcgctttcgagtctagggaaccgcaggttgggaagagggcagcaagtggggagagggtggagaggaggcaggagaaggaggagggggatctgatcttcctgggaggagagaggtggggccttcctccccaggcggagcgggggcggtctcacaggaggagggagcatcttgtcactggccctcagtttgtgtcttccaatccgctttctttctttaggaagtaccaggattcccggaacagaaaatggagccattgcttacgcgaatcgtttgagggaaggggcgggagttggggaggtggagttccctgttaaaacgggccacttgattagcaaagtggtagctgttattttgggggaattcccgtcttgattgcattaaggcgggtctccatctttccaggccaggaggaatgtggtggtggaggtggaggattgtggtatgtggtcaggagtgagaagaaatagtaaggccgtcccggtgagggagaaatgtaacctaaaacctgtctctgctgttgttggattgggtcacccctggtctatggcatgaaagttttattgggaggagatctgctgcaagagtctgattgcttgggtcagtgcaacaggacagaatctagtcgctgcatacctccttccctgtcctcaatcaggtaggtagtaacagtctttgctgccattttgtcttgggcttgttgttggggtaggtgtttccacttgccgtgacttgggacatgggacagtgttatgggacagtggattatcatagcccattggacttgagtttgaaaaacatgtctgtaaaagttcattctaagaaagaaactaatccattaaggttcagcttttcaccgaatgaatgattgaccttggattcagccaggaaaggctcccatgtatcacatattcacatgcgtcctgtttcccagcatagaattattaccttgcatagttagaatttttatagttgtctatcttgcttttccaaagagactagacgcttttcgactgcaggaactggatttcgtctcctcttccacaatgcccatgcaaacagtaggtacccatgatgaatttagaatgtaaatagatagaactcaacaagctttctaactgtagtttaaggaaagggcaagagatggcttggctgtcagcagaagtgcctggaaatagcttagcaagggtacaaagacccttagcctttgtaattaagaagtttttgtgtctctgccttcctaagaggcacagaataggcatagataatggaaacttaagacccaaaaagaaaaatattactagaacacagagtcattatctgcagtcccagatttcctgcttccccattgtgggcaaaggggtctctccatcagacctaagtctttcaaagtgttatatatgaattgggatcctggagagtttggaggagggaccaatatatgtatatgtgtggtgtcaggtacagaattggtaccagtgaatggtagctgctattattatactgaatgcaagtataaaggagagcagactggaaagagtggaagtgagtgaaatactaagtgcacaaagagtcatattgtagtgtgtgttcaccctactcttttacactagagtcataataagaggaagtggactcaggatagagggtgggatttattggttagaaggaggaacttctttaaaaccaggttggttaaagttgagtatgtaactgaaggaaattgtagaatctgcttccctatatacctttatttttatccacccaggctggagggcagtggtgtgatcataactcactgcagcctcgagctggcctcaagccatcctgtacttcagcttctcaagtagctgggaccacatgcgtgtgccaccatgcccagcgaatttttttttttactttttgtagagatctcactgtgttgctagggctggtctcaaactcctggctccaatatatcctcccaccttggcctcccaaagtgctgagattacaggcatgaaccaccatgcctgaactctcctcaccatttttgttgaggtaaatttagaggcagaatggtatagtaattaagagtggatcttggaatcagacaaaattagattcaaatcctgcttc

SEQ ID NO: 107 - DNA, 2280 bp, Homo sapiens
gctcggggaggggctgcagctccgtcagcccggcagagccaccctgagctcggtgagagcaaagccagagcccccagtcctttgctcgccggcttgctagctctctcgatcactccctcccttcctcccgcccttcctcccggcggccgcggcggcgctggggaagcggtgaagaggagtggcccggccctggaagaatgcggctctgacaaggggacagaacccagcgcagtctccccacggtttaagcagcactagtgaagcccaggcaacccaaccgtgcctgtctcggaccccgcacccaaaccactggaggtcctgatcgatctgcccaccggagcctccgggcttcgacatgctggaggagccccggccgcggcctccgccctcgggcctcgcgggtctcctgttcctggcgttgtgcagtcgggctctaagcaatgagattctgggcctgaagttgcctggcgagccgccgctgacggccaacaccgtgtgcttgacgctgtccggcctgagcaagcggcagctaggcctgtgcctgcgcaaccccgacgtgacggcgtccgcgcttcagggtctgcacatcgcggtccacgagtgtcagcaccagctgcgcgaccagcgctggaactgctccgcgcttgagggcggcggccgcctgccgcaccacagcgccatcctcaagcgcggtttccgagaaagtgctttttccttctccatgctggctgctggggtcatgcacgcagtagccacggcctgcagcctgggcaagctggtgagctgtggctgtggctggaagggcagtggtgagcaggatcggctgagggccaaactgctgcagctgcaggcactgtcccgaggcaagagtttcccccactctctgcccagccctggccctggctcaagccccagccctggcccccaggacacatgggaatggggtggctgtaaccatgacatggactttggagagaagttctctcgggatttcttggattccagggaagctccccgggacatccaggcacgaatgcgaatccacaacaacagggtggggcgccaggtggtaactgaaaacctgaagcggaaatgcaagtgtcatggcacatcaggcagctgccagttcaagacatgctggagggcggccccagagttccgggcagtgggggcggcgttgagggagcggctgggccgggccatcttcattgatacccacaaccgcaattctggagccttccagccccgtctgcgtccccgtcgcctctcaggagagctggtctactttgagaagtctcctgacttctgtgagcgagaccccactatgggctccccagggacaaggggccgggcctgcaacaagaccagccgcctgttggatggctgtggcagcctgtgctgtggccgtgggcacaacgtgctccggcagacacgagttgagcgctgccattgccgcttccactggtgctgctatgtgctgtgtgatgagtgcaaggttacagagtgggtgaatgtgtgtaagtgagggtcagccttaccttggggctggggaagaggactgtgtgagaggggcgccttttcagccctttgctctgatttccttccaaggtcactcttggtccctggaagcttaaagtatctacctggaaacagctttaggggtggtgggggtcaggtggactctgggatgtgtagccttctccccaacaattggagggtcttgaggggaagctgccacccctcttctgctccttagacacctgaatggactaagatgaaatgcactgtattgctcctcccacttctcaactccagagcccctttaaccctgattcatactccttttggctggggagtccctatagtttcaccactcctctcccttgagggataaccccaggcactgtttggagccataagatctgtatctagaaagagatcacccactcctatgtactatccccaaactcctttactgcagcctgggctccctcttgtgggataatgggagacagtggtagagaggtttttcttgggaaagagacagagtgctgaggggcactctcccctgaatcctcagagagttgtctgtccaggcccttagggaagttgtctccttccattcagatgttaatggggaccctccaaaggaaggggttttcccatgactcttggagcctctttttccttcttcagcaggaagggtgggaagggataatttatcatactgagacttgttcttggttcctgtttgaaactaaaataaattaagttactgga

SEQ ID NO: 108 - protein, 389 aa, Homo sapiens
MLEEPRPRPPPSGLAGLLFLALCSRALSNEILGLKLPGEPPLTANTVCLTLSGLSKRQLGLCLRNPDVTASALQGLHIAVHECQHQLRDQRWNCSALEGGGRLPHHSAILKRGFRESAFSFSMLAAGVMHAVATACSLGKLVSCGCGWKGSGEQDRLRAKLLQLQALSRGKSFPHSLPSPGPGSSPSPGPQDTWEWGGCNHDMDFGEKFSRDFLDSREAPRDIQARMRIHNNRVGRQVVTENLKRKCKCHGTSGSCQFKTCWRAAPEFRAVGAALRERLGRAIFIDTHNRNSGAFQPRLRPRRLSGELVYFEKSPDFCERDPTMGSPGTRGRACNKTSRLLDGCGSLCCGRGHNVLRQTRVERCHCRFHWCCYVLCDECKVTEWVNVCK

SEQ ID NO: 109 - DNA, 91609 bp, Mus musculus
  misc_feature (1)...(91609): n = A,T,C or G
gaggaacagctggctttgctgagccttggtacttcacgctcatctatccactccctctgtgatgactggtgcagcaatggatgctggcatctggcaccgctgtgtgctcgagggtttcagcctgtttgactctctaacccacttgcagccttgaagacagctcagagaatgagtgacagagggattgagtctaatgttgattgaaagacaaacaaacacacaaacaaaaatttaaagaagaaagaccctacttctgtgctgtatcccagctctcctgccaacttgttgtgtggtctgacgtgtgacatggcgtgatgaagacttgttgtgtggccagatgtatgacatggcgtgatgaagacttgtgtggccagatgtatgacatggcatgatgaagacttgtggggcctgatgcgtgacatagagtggtgaagagttgttgtggggcctgatgtatgacttggagtgatggagacctgttgtgggtcctgatgtgtgacacgggtgaaggagatggtccctttctctcagggctgtggtgaatgagcgaatggcagtagcacatcttatgttggatcagtgcagatgctgatgccacctttactcccttagccttctgcctctcacctttcccggcccccatgaggattcttacatctcctctcctacccttgcccaccccagtgtttatgccactactgcatttcttgaagcctctttctgcttaggagtgacctttctcatgccatccacccatatgagttacaaagaattgctaaaaatgtgagtcaaaaagagggacagacatagaaccatgccataaagcattgaggggaacctgtccttctgaggcagacccagctctctcagtctatgcatcgctagcttctagaaagtactatttacaaactgaaacagacttaaagttaaatcaagatgagtacttatgtaagtggaagcaatgcaatttgattataattccaaagataaatatgataattcataaacggaagagtggtggttttggttctatctgtcataccaaagaattgccattttctcctaatttggagctctctctgtctttctctctctctctctctctctctctctctctctctctctctctctctctctctctctctctctctctctctctctctctgtgtcttctctctgtctgtcttctctctgtctatcttctctctgtcttctctttttttgtctgttctctctctctctctctctctctctctctctctctctctctctctctctctctctctctctctctcttgtggtgttctctagtaataattttagagctttggtttcttgtgaaaaaagaaagaaaaactaaagaactataagaatatgtttttgatttagtcccagctgtgggttatgggactgcttcagatggtccaccacagctgattatgattttcctcgagttctagcaggggtgtgattttgccagctgcagatagtttttgtgattgtgtgacatttgagattctgggaactttttatatggtctataaatgctcatgcccaggaaggcatggggagttatttttcggttgttggttgttgttgttcttgggtttttttgtttgtttgttttgttttgttttttttggttatgtacaaagaagatataacaacaagaagaaattaaatatcctgacagctaagatcaaacttgtcccaaggaaatccatgcccctaatcagcaggaagtagtctaatgataatgtcatatcctttcccctctatcccttttccctctgctgtctactgtgagggggttgaaagggtggaaagggggtagacaaggctgtaagaaagaagaacccatgtagtgccacagcagccaaagtccagctacagtgtctcgcctcttgttttctttctttctattctttctttcttttgtgtgcatgtctgtcatttttgataagatctcccactaaacctgaagctcactgcttaggttatgtcagattgcttgtaggatccacctatctcttgcctcttcaccccctggtgctggagttacagacaattactgccatacctaactttcacatgggttctgaactcatttctcttctcttctcttctcttctcttatcttatcttctcttctcttctcttctctaccnnnnnnnnnnnnnnnnnnnnnnnnnnnnnnnnnnnnnnnnnnnnnnnnnnnnnnnnnnnnnnnnnnnnnnnnnnnnnnnnnnnnnnnnnnnnnnnnnnnnnnnnnnnnnnnnnnnnnnnnnnnnnnnnnnnnnnnnnnnnnnnnnnnnnnnnnnnnnnnnnnnnnnnnnnnnnnnnnnnnnnnnnnnnnnnnnnnnnnnnnnnnnnnnnnnnnnnnnnnnnnnnnnnnnnnnnnnnnnnnnnnnnnnnnnnnnnnnnnnnnnnnnnnnnnnnnnnnnnnnnnnnnnnnnaaacccccctatcccatcccccttcccttgctcaccaacccacccactcctgcttccctgtcttggcattcccctacactggggcactgagcctttacaggatgaagagcctcccctcccattgatgtccaacaaggtcatcctctgctacatatgtggctggagccatgagtccctccatgtatactctttggttggtggtttagtccctgggagccctgggggtactgactggttcatattgttgttcctcctatggagctgcaaacctgttcagcactttgggtcctttctctaacttatccattggggatcccgtgctcagtccaatggttggctgcgggcatccacctctgtatttgtcaggcactgggagagctctcaggaggatgctatatcaggctcctgtcagcaagcactttttggcatccacaatgtgtaacaagtacttttcccaaacagagccatcttcccatccccctgatccagctttctctgatggtatcttcaatagataaagaaatgccttgagctggccctgtggctacccactgagcaagactaagaagcaaacattatactaacatttcggatcaagcacttccagcccagagcagaccttctggttgggttggtgtgccccatctatagcctgcttgccacatgcaccccagctctgaatgcaacacaatataaaatggtaattggacttaaaatatgaggctttttaaagccatttctttctttttgtcagtcaattgcatggctcccaagtgtgaactttatatatagtggcatcatggaataatgtcaaaagattgctccccaacctcagaaggtcactagaaagaacatgagcagtagatatagtgttctgtgctatgatttttaaaatgtatttgctgcagctggtaagccacagtggcacttaattaaagtgggaaaggtatagctggaacatttaaaataaaagcgtgcagcactgcactgtttacatgcagtccagcatgagaggcacagctcagctctgatcctcctccaagtgttcaggagccactgccctctctcacttaggcccttaatttacagagcaagccctacaagccgggaccaaaggcagagcacactcagcccaactgtgcctgaacctgcccagatagagggcttgcctgcagccatgcgccatcttttgtgttgtagtgtgacacagtgaagcaagcccaaagagttaggaaagacaaaggactggcataaaaatgctcaacttaaaacgtaggtgacaacctttgctgctccttaagggcattgcacagtggactgggagaagtcagacgatttgggtagattgctcaagtggggttttcatcggtcagctggtgaatgggtatcaggatacctggcatggaactaatgagatggttcagcggatgaagcactgctacacaagcataagtatccgagtctggagtttcagcactcacaaaaaaagccctagtaaggcactgcacccttggaatcccggtgctagtcaggtggaggcagaaggatccctgaggctcaccagtcagctagtctagcaaatcagcaagcttcatgttcagggagagcccctggctcaaaaaaaaatgaggtggagagtaatagaagacacattgatttctggctccccgtaggcatgagtgcgtgtgtgcacatgcatgattggaaacacatatacaaacaaaaacatgtacttgatgatagtaaatagtaatggcaggcatgactgactgaacattattgaacaaggattttctgaaggccttcacattgtaaccagggaccaccgttcttcctactttgcagctgagggaagcactcagagaggtttagtagctttgccagtgtcacacaggtgggaggtaggagaacagggcaatgttctgcagaggaaggctgtacagctggtgctgtcgctaactcagccatacttgcataaggacccagggaagtgatattaccatcatgagtgggaaatggccctggtgagtggcagatgatgccagaagatcacaagaaggctggggtgtcctagtgaggaactttaaagacttacaacatgctgagaacccttgctttctgttcctcttgatctttctgatcatggcaaagattaaatcctgctaacaggctgtcttgtccttgtactgtcccagtctgtttcagcctccccttttaaacagagagagcaggtgtcagagactccaggaagtaataacatctagccagtctttataaaaccatttcctgctatctttattgtcatgctgaggagatgctggcttttcatgatataggccatgcaaatatttctcttcaaatgcagtttgtgctaacccctttagaggaaacaagaacaaggtgtcactgagacatttcaaagctaacaaaagttggggaaaggaaggttgattgctgagtgaatggtggccttttgcaggttttcggttcatatacaacccatggttcacactcaacacatgccaaggtcactggggagagaagaatgccattctcgcttctagtttgttaagaagtgaagcaagccttttgtgggctggataacactaatctttgcaccgaaactatgggtgttaaccaagcttgttctgagagctgatggctaaaatgggaggatgagaaagacattcatttctgtcttcattgaaccataaaaagtgagtcatgcaggataggctctggggtcagagcgtgcatcagaactgtgaggaagcagggccttccccataatggctatgctcagggcagcttctgggtggcttcttttgctacttcccaccctacccccagcatggtgagtctcttcccatagcagcaactggactccgtggcaatccctgaagtatgaactgagtcatggtagaactcagtaactcaaagtttgcagacatttccccaatgtaccaccattagacggaacaccatgaattgcagagagactccacaaagggaaaggcagagatgattgtctccaagctccagtatgtaacatgattgtgtggtgcaattttccctggaaagagtatcactaggaaggtaagcagcccaggtctactgtaacagtcagctagaaacgttctggaagaggaagaagtcccgaatcagttcagtcagctttcaccaggccgtgcttcaggagcaaacagtccttaatttcagaggctcccaacaactaaagcgtggacttcagggtttgactgagttttctcagtatgagctccataccaagaagcaaaggtgcatcttatagcaaagggacaaagagcgatgacaggaccatgggaaagctcttcatgcttctgcttggaaggtgacaggtgtgacttctactctgtacttattcaagttctcaggggaaggttctaagacaagagtctgagttcatttatatcatttgcaggaaatgctagtatcgaagtggaaagtgagccaaggaaggatcagtagctggggcagatgggtcatggagctccagaccaccccaggctaatgtgttgacccttttaagcttgttgatcatcgctgcttcgtagaggtcagctccccagagctccaggctgtgtgaacacaggcagactgaccttctcatttctgatgggctgtaggtaaagtcagagacactagcaggtggctgcttgcctgatgtcactggagtgatatggcatgagatatgagggcatgagattgtggacatttcattggcaacacatgttttggggatgtgtgctgtctttccatgaagaaatagaaaacattgaaaatgaaggcacagtttctgcaggaagtatgaactctgaggtattaaatgctgggaaatctttagtggtagaaagtggacatgtagacacaggggtggggttcatctatgctttgcaggatccctccctcacctgcacaaagctacttctgaatccttccttctacaatgactaaaatgatcagatattgccaactgcccctaggtggaaaatttaccctctaacaaaccagtgctgcacactgctatttctcaaggagttgcctgctgaaagatgtcatggcttaataggagaaacaagacaattgatataggagctacagtggtagccacccagaggtgctcgagtctgttcagataacttcacagtgaaacagaaattctttgagaatgggaatatcagctatcttaagggcgggatgtccaggggagactctagagataataacatctgtagatcttgaaggcgatggggcattttccagatgagcatgggcctttgtgtagcttgtgatgagaagggataagaaaatgacaggtgggggcatttgttcaacagtatgcaggttttctccctactttagctccaaccctggcttgaaaccctaccaaaaaagcatgttggcagcaagtcactttctttctgtgcattgtaagaagttcctataaagcaccttctttcagggtcagtcttgtccatcattcccagatgaccagattagttagcagcattcctgagcaacctgtatcctagaattccatcacttgggggaatccctcatctgtctcccaatctcaagagtatctctgacaaactatgcatattagaaagtatagcccccttgattgtgagtgggtcactctcatcaacgtgttccaggtgtttcctgtccacagtcccttcctttctcataatcaggcttctggctgctggctgcctgctgctggctgccacctactcaagcctgcatgatggggagcagggcgagtctgtcttacagggtggaatctgaattttctgcctgggcgatgcctgactaatccattaaccagctgtctcctctgcacattcccagaagatggctttctttccattcctagtctaccctactcccacctccaccatgttccatcctttctccttactcatgccccacctgtacccttctgtagggaggcagcactccttcccaataagagatcatgtaggacagctcaccattggcctactgttcaaactgaggaatgttacccagcctctctggacattttccttctctttttttatgaatgggactatagcagtacccacttacaggggtgggaagatttaaagaagtcagatacctgggaagtatttccgatgtggctagcacatggaaagccttccatgacagccagctagcgtcagtggtccaaagtgataaatgtcagctaaagagaacctagagtctgtgactagatgtggatgtagtcaagctactaggaagctgggtgcaggaaatccagtccatcatgcctctgctgtgattccaatatcaatctgcagcagcaaaatggcctctgagggaattaagggctcagaaaggaatggcaatattcttgcccaagaagtatttatgaaacgatcagataaatgccaatgatggtgataatagtcacactgtagcccatgttctcttccaggcttttctgcacctgacaactgattacatttttaccacagtcccatgcattgttattactgtcagaaattctccttgtgtgaatgatgtgtttgggattcagtgtggttaaaacaatttgcctaaggtcatgcaggtcgtaattgtcagaaggagaactgaatgtgtcttgggctgtgctccggcagatgtcatcatgtgcactaattcagattatccagctatgtccatttatagctgtgattaggaccaagctaggtacatgtctttctcagatgcaataatgcctgtgaaattttggattgggacggaagtggcccacagtgaggctagacatactctatgaaacagccacacattaagaggactagttgggagatctaaaacttaaggaactctgcacagtcacatcaattcatctgtgaaatgttcatggtttccatattctggggcagatagccccagtttgggtatccctagatgaaaatagaggctctgctcttcacaccacacagatgattcacacagatggtcaccaggcagatgattctatgtggcaggtggacagactcccaccaccttctgacaaaagcctttccatagcttctacagcataagacaacatccaactgtgtagctcactgcagttgctcctctttgaacctgaaaccaacacccagtttggagtgcctgccacagctgtgtgagcattgctcaggagccacccacgtgcatgatagtgagtatgctccctggactccttaaacataggatgcatgcagtgttcacaaaaggaaagtagacaggttctttgtgaccttgggagttgcttgactaaatgaagtgatgttgaatctctctctctctctctctctctctctctctctctctctctctctctctcttttcccttattccctctctcttaccccctttctccatctctacattccttccttccatctctctaaatctattgttatgtatgaatattggcactattatgccacaatgcccatatggaggcccttcctccttgtttgaggcacagtctcttgtttgctgcttcgtacactggtcctagagcttctggggcctttactgtctctacctcccaaatcagcataggaaccctaagacaagcaccactgcacctaggtttgcatgggtgcaggagagctaaccccagacccatgcactcctgtgacaagcactatacccacagagccatcaccatccaggtccttgatgagattcttcacagtggatcttttcagaacgtttggtccccagattcacattgtcaccaagagcatctctgctcattcacgttatcaccaagagcatgcatctctttccagtccttggcccctttacctttagaatgaggagtgcttgaaggtgttagtaatattcagagagacacagcctggggaaagatgttcctatcagaggaggccatgaaggtgcttaggtgccaaagctgagttccttgggtagactccattgagttaaataaaccacagaccattgagactgtgcatgtagagggagtctcagatgctgaactaatcctgggtattgataccgagataagtccgaggcaaacttcaaatgagcatggctttaaggagttaagtggttggttcatgatgatgcttggaagaagaatgtttagaaaatgaaaccagggaggagcacgtgatgaatggctaggggccaggcaactttgctaggctcaggagctggctgctgacctgtgggctagctcttggaaattcactgggtctatgaagaagatagatctggctcttgttcacagagagaagagggacatcaaaggccccaaatggtcccgatgaggcttctttcaattcctgtaagttatgcaatgtacaaacaaacacctagcaaccttgggggttggagccaaatgacagccctcaataggacagcatgtgacttctttgacatcaaaacactggataggtaagctttaaaatacccaacttcatgctggggatggacagttgagctcattccagaacttggaagccagtgcacttctacagctgagagaatggtcaggtcagacatttgggttggggcatgatatgggtgggctgtgaatggtaatgtgtagggacaaagaattttatacccggaaaagtgaagacatgtcaagaaggagggatgaatgggaaggaacacggaagggaagcaaggtggatgggagggagggtaggttattaaagatgtgtgagaaccaatgttggcagttggcaacatctgcctactatggctaagctgaccttgcttaaaaatggagagactctgtgagcaaaagggtgaaaagcggctgtatagtaagtgcttaggaaatgtctctggatagtgtgttatatgtggaggtctctgaacctttgtgtacaatgagaatccaggcatctcacggcacacttctcaatgtccatgtgccttttgggtttgaatctcttttactgatgctcatctttctacctgaagttttttttttctccttgaatgactcctaagtcacatgtctgtgagatgctcagtggtgtgttgggaaagctggatcgtcaaccaaaccatcatccatgactttctcatataacgcgtcagcatacagaggggaggtgatgtgtgctgagttgacccacgggttctattttgtagaggttcaaaggcgagcatcatcagcaatcactgctgaagaactgctgaagaacaggttcagatgaaactccacacatcacagcgctgctgtcttatctgtctgtcatgtgacagctctcactgtacttgcagagacagggcagaacaagagatgctactgaaattttattttcagttatccttgctgaaagcactgcaggccaaagattgatgcccaagttaagagactctctggtcttggtgtgctgggaaagagcagctggcttagtgttgatggtgaaaaggtagttttctagcattgcaaaatccacgaactatctgctcttatgttatctttggaaccttgtagaatatgcttcttcccttcttacaacaaacacagtgtgggagttacaccagcccacctcactccctcagctaacttcctcttcaagttactcttccctttccagatgtggaaagaaaatggtggggcaaccccagttcttccacacacctttgctaggctcttggcatagttttagggggacactgtaattagacaaccttctaatacttcattcttttacatgctggttcctagcttcagaagtccaagaaagtgatttaaaaaaaatcaaacaaacaaaaaacagaagctactggtagcagtggttcaggaaaccaaaaagaaccacatagattttgagcgaggactgtcttgttgcacggaggtaatacacatcaaaacctccaagtatgtccccttccactcattacgtaggaggaaacatctggaactgtcttttgcagttttgctcttaagcctgtctttaaggttgtctctctcactttttgttttaaggaaaatggacttagaccattttactgtagaatcttatttaactcacttctagccttggacattgtagataatgaccactcttaggtcgagaggacaaggcactagatgtacttcatactcgaatttttaaacacactggagtcgacgcatgggaacgtagatatggaattctgttttttctggttcttacttcactcttgctgggccacttgcttagccttttcttgatttaactgggctgtttctagtcctcttgattcataactagcatggaaaagacttgtctttgttggtatgacattttatcttcttagagataactccatgaaccatatttgaaaaacatggttactaggcccatgaatgcaatttaaaatactccctaccaatttccagcaagagcaagcctggattgaatggctacctatggtgtcacgtgtgcttctctgcatgaagctacactctcgaatggtttaagtcactctcctctgatttactgtcatactaggaacctgaaagtaaagttaattaggtatgcttaagtaaacagtttaagtttgctaagaaaataagttaagtaatgcttactagtttttagtaaaaaaatactattttatatatacatatatgtatacatataaacacacacatataaacaaacatatatgtgtaaacaaagctccataatgggcagtgtttccactttctacataagacagcaactgcccattgtgacctaatttgtccaaggtgcaagttcatagccagcctcactctgaaattgagtctcaacccttgctgttttcagtacaagaaaagactggcagagagacatggatgcatctctcccaggagctgattgcctggattggtgttagttatggaagaaaatagacaaaggagtgttgggatggctagagtggagatgtcggaagagggagaccagggcttcacagtgctgcaactctgacagtaaacctgtcttggctggtgtcatctgcagaattctggccataggtcttttatcctgaaggcaaattctaccctttagacctttctacaaccgaatggaagaaagtgagctcacactggccaaggcaccaatagaaggaaaatgttctttgaagaagccttatttttgtttgattcttggaaattttatgtcacactccatcactgatttatatttatttctacatgagtgtctgacactaccaatttcttggcttctaatgtgtaatcatttataaatttcataatagaaattctttttaggaaaatcaaattcattataagacattttcagttttcagaaatgtttaaatgggagaaagtatgtatcttagaataaaaccaaaaccaaaaacattccttggagatgtgtggtgtttctagtgggcccagagctgtcttctggcacacagctgtgagcatgctgtggatggcaagtcctcagtagacggtgcacatctgtaaatgttattggggcgtcagtggtgagataggtagagtggggagtgtgaggggttctgaggctctccttatgttttttagctctcctcgtttccacccagtaggatatttctacttgtcattaattgcctttgggcccagatagtctctgttgtaggacagctatggttagcaacactcctggctggtaaccactatagcatctcttcctttagatgggacaacccatgcctccacaaaactgccagtgtcagggcagaagatagacttctggaaaggtatctgataaaaccctcttgaacttaggctctgctcttcattctaggaggtttcttttctaggatgtcacccacaagacacagttatgtcacctactaatgggtttgtatcttggtccccctctatttgatgtttgccgaggcttactgagagaaatatctggtcatttaaggtaggaatcaaacacttgtttcctaacttagtgtgacaatggggggagatctgagtttatcctcataggaagtaccgtctagcagggacggtgggagtctgacacacagaggattagacccaggcggttgagttgggaaggcttctaagagaaggtagtgctgcaccttggtgagaaggatgagcaggagccgccaggagaagggagggtgtggagccttgctcgccagcatttgtatggatgtctctagtagtcatagccaaatcatcaggatgacaggacaggagagggtcaaggaggacagcctcacccgcccatctcagaggttcttcaacagctgcacttactgtgtgctttatttctgtgcatgtaagctgcacttgaaactgaatatgtctttgtgtaatagagtcaccattgtagatgattatagtgtatgaaactatatgcaccaacgtttcagaagtgttaagtgttaaacaagccagagacagaattctgagttactgtatacagtggtccctggttgtaaaccttttcacctgcctgggttttctagccctttaagcttctttccataaggcatattcaactttctcttttttgtctattgaatgcacacttaacatactcccgaaggcactttatcttgtaaattcactaaatattatttgcataccacacaacatttagcttaacattttcttgggactattgctaagtaagttgctgggagaacacaagtttatattgttatcaaaatcctatggcctgggatgtcctccgaatagacctactccacagtctcagcagaaactgaagtcccaccagggacagtaagagcactctggccactccaggaagtggagaagggatcaaaatgtcccatgacctctctggagatggcatcgtgtagacagtggagcaccagcttccaactagggtctctagaacagattctgtttctgcccctccctaggtacctgatcattaatatcccacttaattttctgagccccccatggtctcctctgtgaagtagtactatgataggaactgttttaatgagctatttggaccgtgatgccagactcacgtaagtattaactgtcattaatatgctgttgctattcatctctcagatgaacctgggtcagtgaattgttgttggttggattagaccactggagaggtcagatacacacaaaaaggatataagatgttatctggacgagaaaaagggactcacaaaccctaagaagaagagctattgacggttgatgacttctgggggcggggggagtcagttttactgaaagtccggtctctcacactccagtggatagccccacaccaatgaatatataggcagtattagttggacttggtggtttatttttaaaagaacatgaaatttggtgtgggggaacgaagtggatagatctgggaagagttaggggaagagttaaagggtgattacaattaaaatacattgcatacatgtgtggaaatgtaaaagaattaattaaatgtcattagaattattctttgaattctaaagaaaaaaaaaacctataacaaaaccctgttctcagagggatggcatgtttaagattagtgtggctgaaataacagaatcttcaattccttgtacaacattttctggctgagaattgagggggcttcagtggctcacgagaagtttcaagcatcttctaatcaggtttgatcagtcatccaggtctattggagtcaatcatcaaaggacttgttgcctaagccaagctctttgagttgtgaaatcttatcagtgtgcatctctgccaagatccccaggtgcttcaggcccaggtcgagctcaaatcaaaagccaggacctagcgcaggacagccttgggattccaacctagctctgtgatttattagtcatatgacgtcgaacaagtttcacaaccccagcctctctgtcttctcaattaacctggagtaaattgtttgtgtctttggggtaactgagaatttatagaaacagaggttgcaaagcacacggcatctcactgcacttggggcagacagtcaataaaggtgacaacgcctgtgcctgcctcccacacctacatgataaagcaaggcaggaccagagagtctctgaggctcttcatttgtcaaaagcaaactaaagaaagaatcaaatgcagaggctggctcagcctctagggactgggctatgttctctgcagatttgaccatcagtctccctcgatgaaaaacaggacatcagaatttcctggttcacgtcagacagtggttatgagacatgcagctttgtactcagcccttggcataggcgaccccatccagtgttctcactttagggtcagagatgctgacagcttatttacagttctagtcagtggtagagctaggatgtgtatgataaggacatttctggtgtccatgtttgtaaccaccccaaacaacctagacttctgacactggctggaaagaaatgtagaaaatggatgggaatgactttttcatgcgcacagttctaaagctttctgagaccccaaactatcttctcatctctatgtcctctccaagcccatagcacttagactacagagacatctggtgaaagcagaaacatctaaccagatgtctgatgaggattctgagtaggcacacatgtatatgtctgtgtgtgcaagtacatgcgtgagcacgtgtatgaacatgcatgtggagaccagaggacagctgctgttattgttcctcaagtaatggtcctcagaactcaccaggatgaccagtaaatgtctgccttcctccacaaagcaaccttggccaagatgggcacacttgtggatgtgtattgagattgtgtctttggcaagcttggctaatcaatcatagaacacattctcagtgactctgaaatccacctcagaacactttgttccaggcatccatccactgtaagtgagctggatgctggccctggggtaaaatctcagtcacatccagttttgtctctaaagtgatataaacaccactgagataggttgtggagactgctcaagagattgtgtgcactgagttcctccgtctggccagggttaatgaggaaaatccctcagtagtgtccagaagctagagacagctgatctgtgagacacttgcctgccttaggtcttatggctcctttatgcttggctgctgtgggttttcctctcaggcatagctgtctctaagactcaagtttcgcctgtcttaagatctttttttttttcttcatgccttctctctgttggagagctggatagctcaaactccccagtccagactctggcacgggatctcttccactgtctaaccccactttaccctcacaactctctcctcagcctgtttaaagtgcatgaccttattctacttggggacaagttgcatggtgtcagttaagggccctggagaaatcttgtcaccaccttttctccattttgtctggtctcatctggcccatgagtctcattttcactcaccgagaaagtcacttctatctcctttatgctttttgaagggaacacgtgccactagccatagttcttatgagtaactgagtcactcgagtcacttgatggttaggaagtgcatcttataagccccttgtgacaatgaggcaatcgggccctaatggagcctagagtctgaccacatctgttattctcttggtcaagtgcctgcctctgccaccacatcagacctgctgtggtcaggggatccacactatcagacctcctcaactcggtgcatttgcccaatgttggctgaaatgtggcttctccttctgtctgggcagctatccattctataatatgccattcttagaaaggttcacttgaggatggagggttgtcagtaggaacaatgcaaggagcttatgttaggtgtgctttgcaatgctgcattcttggtatcaggcgcttgctggcatgggtgcctcagggggagagcagggagctaagatgtgagaagaacattacatggacttaagtgtcagcccctctgctgggagccttctattatctatgtctcagtggtctctgttgaaaaacaggtcttaaaacaaccccagcctgataaaatggttgtgagatttaaaggaataaaggatttttgactacagaatattgtacctcattggtacaaacattgatgattatttaaattttcctggcaacaggaatgaatattggattttacttttactttcacaactttctgtagaaaaaaatgcacattattcatataatttgaaaacaatacaatgaaacattattttttgcaataggaacagagtttcgttggtaaagggtgtattgttgttaatcctactagcttctatctttgcccattgtgggtacttcaggatttacttagtttaaggaggaagtctttactctcggtcctctgcatccctccctctgtctgtcttgcttgccaaccagtggaggctccaaccctcctgggtaatgttgggattggcttaggggagtagggagggaaatatggctgtgtgtgcaagaacagaagcaaggaaggaactgtttatggggtgttttacagtgagactgtaattggagctctggaacttagcaagagttataaggtgggataggcttaacaccaagcatcctgaggtagtgtagatggccctggcatggagaataactgtgtgtcacggtgtgtgtgtgtgcatgtgtgtgtgtgtgtgtgtgtgtgtgtgtgtgtgtgtgtgtgtgtgtagaagtggagggccaggtcctgaagacatggtgggtttagtaacttgtctgagactctgtatgtgcacagagcaggacatataggagtcccagttgtgaactccagtcacactctagggacattgtcattctgttcagaagtgtgccatgactgaacatggatgcacaggccaagcctggggctagtgtcttctgatactggaatgccagcatcaacaggtgtctcacctctgctattgaataaggggcagtgggattaaggtgagggaaggattccacagtttctaaaatttaaagggattaattttttcctgagcatacttttttataagatattttctttatttacatatcaaatgttatcccctttcctggtttcccctccgaaaaccccctattgaatcaccctttccctactcaccaaaccacccactcccacttcctggccctagcattcccctacactgtgacatagagccttcacgggaccaagggtctctcccccattgatgatcaacaaggctacatatgcagctagagccatgggtccctccatgtatactctttggttggtggtttagtccctgggagctctgagggtactaattggttcatattgttgtacctcctatggggctgcaaacccccttcaactccttgggtcctttctctagatcccccattggggatttggtgctcagtccaatgggttgctgtgagcatccacctctgtagttgtcaggcactggtagagcctctcaggagacagctatatcaggcttctgtcagcaagcacttgttggcatccacaatagtgcctgggtttggtgactgtatatgggatggatccccaggtggggcagtctctggatggcctttccttcaatctctgctccacactttatctctgtaactccttcttctatgggtattttattcccccttctaagaaggattgaagtatccacactttggtcttccttcttcttgagtttcatgtggtttgtgaattgtatcttgggtattctgagcttctgggctaatatccacttatctgtgagtgcatatcatgtgtgttcttttatgattgggttacctcactcaggatggtattttctaaagggattcaataaaagggattagcatgctatgtttcctgctggaagtggagaatccagagattgcatactctgctgagaggtaccttctgccagagaacatcctccatctctccaaggcagattgtgtgctttgattctcaaacacataaactctgcagtgctggggcagaaggttatcttttgtcaatatatgtaccacgtgagctggggaagggaggaggccacccatcagccaggctttgccagcctctgcctttgtacaggcagcttcttagattcattgttttaaaagtttaagagctctcttccattagaggtgaccaattctcaatctcttgacagaagtcttaactctgcagcacaatacagaagcataaaaacaaaaccctcagatgagtgtttgtgctgaacacctgccatgccagccctaaggaggcagagggggtggctgcaagctggaagccagacaggtctacatagtgagttctaggccatgcagtggtacagagcaaggccctgtcgcaaaagtaagcaaagaaaaacacaatacacctgtccctaaaactccagaaaatgtgtaataattctcttcacctattctcccaagactttcttccactctctccactctcagaggcaacccatgcaaataggttttttgtttgtttgtttgttttttgtttgtttgtttttactttgcaaaagttcttccatatatacagttgttcacatgcaggtacagttttcagtctccatgcagagtgcatctccatacttttgtatatcagcccactggttatcttttaaagaggtttttagtctttactgcatcagcaatgtagagaatgtattcaacatacgtactgtccaactctagcttattacacagttttggccacagaagcatttttcaaagagtagacatctttatgaatgaatacatttctctaaaacagtaaggagatattgtggtgtgccaaatgcatactttatgttgacggaaagcctgaaaacgctccacccacggtacctgcttggcctttcacattaagcatcttggtgtttgctcataatagaagttctcatctgtgtgcatgcactcatgtatttgtgcgttgtacgaacttgttagtaaaggtgtgtgtgcacatgtgcatgtacgtgtatgctgatgtgtggaccccagatgtctcccttccgtgtctgccctctgcctttattttatttttttatcttttggaggcgagggtctcatactgaacttgaagttcatccttggctaggctgggtggccggcgagcttccggagactgcctgctctcccatgacagtattggagttacaggtacatgacgccatgcctagattttcagtctgtgaatccaaatccgggtcctcatgcttacatcacgtgccgctaatctgctgagctatttccccagctctgacattatcgcctctttttctttttcttttcttttacttttcctttgtctctttgtggtgtgtgtgtgtgtgtgttatctatgtgtgtgtgtatggtgtgtggatatgactgtgtacatgcatggtgtgtgtttgtatgatgtggtgtgtgtgtgtgtgtgtgtatgtgtctgtgtgtgtgcatggtgcgtacatatgattgtgtgagtatacaggcacatgcagacattgctccctctatcaccctcttattgccttgagacagggtctctcaggaaagctagagttcactgggttgggctggattgtcagcagcctccctggatcggtctgtccctgccctgaccaatgtgggtgttgcaggcaccacaggcaaaggaagctttggctatgggtgctagggattcgaactcgtatcctcatgcttacataacaagaactctcacccactccttttcatcttatctcctcatttccccttatcagcttttgaaaatgttttgtcagctgaacatgcaaaggtcggtgcttgtgtttgcttggccctgagttgtaacgtgacagaagtttctgcatgttgtttgtgatactctgtactggtagacttttcaatgtaattccaaacactaatagggcaattccagaagcacctctccttcagggctgatgtttgccacagcatactttcatttgttggggttggtagttatagacacccaccctgtagatgaaatcccacagcccaaggcttcctctggcccccttgtcaattccaagtctcagtacctctatcccatcccctgcctctgtggcctggctcacagacctcccctgaacagccattgaaggccaatatagcactacagaggacttggaagaccctgctctaaaacaagcccagcctccatctagatagcttggcatcttgatgtccttcattttcaaatttcccacaatcctctcttccctccccatcaggtactcaatgcacatctctcctgatagttctaagatgttcaccgaagcctctcctcattggttgcttgaacggctttctctttgctcatgatggctggtgttctaggattgtacttatataatttccttctgatcttaggtgctacactgtaattcaagaaggcatagatactgaggtgaccctcatgtcacttgttatgtaagagtctagaaagccactttggagttggtagagtttttgaggaagtctgtgcatttccttgaactgatttttatgttgtttcttggtcagtgactgttcaaggaacatccccttaattcagagatggctttggggccagagaagagaaaaaatgatggtgttgatggatggctattgtgcagcacacacttactaactaatagcctaccctcctcaacggactccctccacacttagagtggataaggaaacaagctcttgggggttagagtgatttactaagaactatatagctatcgagtggtaaaacaatctcataaggttgtgtgtgtgtgaagttggtgtgcatggtatatgtatgcatgtgtacagttgtgtatgaggtatttgtgtgtggatggtatgtgtataggcatgtgtgtgtgtttatatgtgtttgcatgcatacctcctctgtgtgtgtgtgtgtgtgtgtgtgtgtgtgtgtgtgtgcgcgcgcgcgcatgtgcacaggcatgtgtatgtatgtaggatgggagagtggtgcccagttggaccagtcatctgtttcacgtcccattctcttgaagtccaaactttgtccactgacttcagcaaatcggacatggacaaggctcaggcctttctaaggacatcatgtacacccagaggccagactgaggccagaactttgatctctgtgccaaggatgctctgcgttggacctgctgtgctgtgatgatcagaggtggggtcttggtggctggacttttggactctcttaagtcatttttttctcatttgctgcagctttgcactgagctaggatatttttcccaaagagcaggtcatatgtaacatgtgcctggcgtgagctgggtcctgtgactccttctctctgcttagggaatgatatgtaaacagaaagtgtgcatcaactattgagcatccacaatagtgggtatcaccaaacatgaaaggcacaaaaggacacctacccagataatctgaggcaatgtattctggttatgtaacattctggaccatcgagagtgagagtgatggctaacccccaaaaaaggtatgccattaaacatacgtgtgataacgtcctctaaaattttaatcataacactgcaacataataaacttagatggtaaaatagtagaagcatgtgaaagtgtaggtagtgaccggtgagaccctctcctcacatgcaatggccctggagttctcccggagagccaactatcatatgttccactgtcctggaaagaatgattgtaatctttgtggatgtacaataaatgtacccattatttatttcttttgaatccagttatccatccattcctcataagcctaattctttgggagaaaaaaaataatgcaagaaatgcttaaatttaataatctcttgtttggggctgtgtgagaaccagtacactccgaatagagggtcttgggttcctgggtccttgggtcctgagacccaggcttcattataaagtccctcagctatggaagaagtaacatggacccctacgccaaagatgtccttgatggcttttgtttacataaactacactattcatctcctgggtcctatcttgttgaaagtagcatataagaagttatcctttgtcagtgatagttccagttaggtgcgagtccatggaacctgggcttcaggaagtcttccctagctcattcgttaccatagaagaatgtcaacttataatgttggtctccataggaatacagcctgattgcatatgataacttgctggataaccaaacactctaccaacaaggtaatcagttttgtctgcagcaatgttttccccagttaagtggcaagagcaaagggccagggctgaaagatatctcaccccattcttcataatttactccaaattgcccacaggagaagccaataagctgctgagcatgatccccaaagaatgttctctagagagtaattcagtgtttctgaaaggcatgaaacgaacctgttttatctgttcctatccagctattctggagagctctggactgacccctttagtaggttctagcttctatgactcgctgtgatttttaacagttaagtcttaatggggacataattaaataattatgtttctctcgaatgattgttttactttagttgtggcagatgcctaaccttacctggtttaaatgaaggagattaccttaggttactagctgaatattcaggctccattatgtacagaggctaaatcttatcgtcagaatgctttctcttccatgtctctctagcttcaaaaaagaagcagatgtctcccatgtgggctatagatgttctgaacaatctggttttaatttataacagttcagaaacctcaccaaaataatgtttttatcccccactacttatataaaaaagttttaggactgaatctcacaggatcagcttaattccagtactcaccttacacatcaagttttatgtcaacttgacacaagctagattcatcagagagaatggagtctcagttgaggaaatgtctttataagatccgtctgggaggcattttcttagttagtgatcaatggatgagggcccagcccattgcaggtgatgccattcctgggctggtggtttggattttataagaaagcaggctgagcaagtcatgatgagcaagccagtaagcagcactcctccatggcctctgcatcagctcctgcctctaggttcctgtcatgcttgagtttctgccctcactgttttcatgatgaactattacatggaaatgtgggtgaaataaaccattgcctcccccatgttaattttggtcagagtgtttcagcaataatattcctaactgagacactagcttttcatccttgtggttgtgggtggagcatcctgatattccagggctgagatggacagggcctcagctcctcccaaaccacaagaacaggagtgaaagaaggagaatcaagaagctagaaacaaaaagtagcatcaggccccaggcaggttcaagcaataggtttgtaatgtgaagtccaagtatttttttccataaagggccagttagcatttatattaatatttctgtttaaactacacagtttctgctcatggggaaaaatcctcgtgcagtagctaaactttgaactaagatgtgttttcatgaaaccttgtttatgggaacaatcggtgggctgggcattgtctgtgactgtagtttattgagcctggcctgtcaagtgtataaaatctttttcttctatataatctagaaagttcaacaaatcctacacaatatgtagaaagtattcaatggatattggttaccaacattatacagaagtaagggtaacaacaatgatagcattggtggtaattccgacagcactaacttagcaacaagatatgataaagtgtgagtcatatgtcagtaatgtacgctaggatgctttctttctgctggttgagcttcccctccatgaacacatagaactgagaggcagtgcccaggtaggttacacaaatactgtaatttatagttgagccctaaaatctggggaggtggctcagtgtggtaagagcacttgctgtgcaaacatgaggatccaagttcagattccaaatagccagctgtccatctgtaatcacagcacagagcacgaggggagacagaaaaatcactagagatcactaaccagccagcttggttgaacaaaaatgatgaaattcaagttcaatgagagaccttgtctcatgagactcagatgaagaatggtagatcagtatgctccgattcctcccctggccggcacataagcacatacaggcacatgcccccaacttcacccctaaaaatagatgagcccaaggctcagataaaaaaatgtcacatgcacaagttcacataacaagtttgggtggctgtggaatttgtgtgtttcctccagcccctcttgcagtcttgaagaactctgtcttccaggtatttggtatgcatagtgtatcagaacacaaatatacacaaatggatattctttaatgtctggatccaagcagggaaatgtggaagtattgttaagattcttgccgtgaccttgagctagtagaaagaactgatttgggtttggcggttgttgcatgagtctgggaaactccttgctgctaacatgactcagatgttcatctcacacaaagcttatgaaatgtcccttagcacatttgaaagcaaagaactgatagatgcttggtcactcgctgcattactgtccatccactttgctattgtttgaattggcttagcaggcaggaattgcttaagccactagtcctcaggttggctggtgtaaggattcccctcaaattccccatggctagagagaggcctgtgggaacttcttcgtgccctgaaatttactcatcaaattctctacaactctggaaatctctccctggcttttggttaagcaggcactctgcagtgatcacaggaagtggctaactctccagcccctgtttcccaccttttaggtttatccttactctcatcacccagatccacttacaaaacccattacaaaaatgattttcatgaatcaagaaacaaaccctagaacctttggccctcgagtgctttagagaactaggcagggttgggaatttggtttaccatttctctaagccaggggccagcaaacatttccatgatgagccatggtctgcaacttccactgaggtgatggtaggaccagaggacagaggagtatttgactaggctacccagttacttgagtatagtagcaaaacctgagcttttgatgttggagtgacatgagtttctcctgtggttgtgttgtttggtacatgatttcaggcaagctaaatgttctcaatatcttcatttaaatgtgagagttataataacatgacacagtcctgcccttctagcccttagagcggctcttaggaggatgaagcagaaaatagtcactgtcccccaaagctcttagatgttaatggtatcaccaggaccacttaacctgctgagtgagtgtatgagtgtagaggtaatctgctaaatcttgccacccacaagagttctctggattagcaaatgaaaacacacacacacacacacacacacacacacacacacacacannnnnnnnnnnnnnnnnnnncacacacacacacacacacacacacacacacggataattgagatcagttctgtgacccattaaggaaacaacatatgtggacattattctcatcttaaagatctaggctcttctagtcaccatgcacagtgaagagaactgggctttgatggagacagacaagagctgtgattcccaggcctaccctttctcagctacttgacaacaagcaagttagtcaacattgtccaaacactgactaaaggcattcctcacagtgtacaaaacatctcccgtaaaagatgctgtaaagccctgctgtcaagccagctcttataggctgtgagcacagcacacagtctatagcacctacccccacggtagacttgtaaagaaaaggctgaagtcatagctgggtgtctgagcacacactgagtcattactcttgagagatctacttttagaccattgataataaggagacagcagagaagaacacgaaggcccctccagcccctataacttgccagtcacatgttggtctttctttctgcattgcctcagaagtgagatcaatattgttttcacatttgtccctagggaatctactcagagttataaattatgtgacatccttggtaaaataaaagagattcactgttaaactacccgatgcttacgtttgaggatggtttcatctgtacagagagggaatccaattttagaggagccaggcaagagaaaatttatattccactagaaaagcatcacagagttcttgatgaagaatgttaattgatacttggtgtttttatcaggaaggcaatagagactggtggagactgttgtagtggagtcttgttgaaagtttttttttttctcatttctaactgacagctaccactcagaggtgaattacttaatggttatgtttttcatattttaagagatgtaaaatatggattttgaaatgaaaccaatctgcctttatgtgtggttagttcaaacataaaagcaacagccttgagccaaccaggtaagccactgattcaagacaaaaccttgccaaacttcaaattgaagggtttgtaagttgagcaggaacaaagctttcttcagagactcttggaaagaaaggcctttaacctgggtactcaggagtaaatgttaatgatgcagtggccagcacggtgcccttacctcttccagatagagagttatgatttgttagcatcttggactaagggaagaacaaaagttctttaaacaaaaatgtaccacataatttttctgggtaggttatgatgtaaacctcttctctttctctccataaagtacagtatctgtctcttactaatgaactgcagagttgggtctggtctcaagtaaggtacaaaaggctcagtgtatgctgaacgtagcctcagaaaaactgggagatcgtgggtggaggaagaaggcaagactgtgcaggacacaaaaagcctgacatttctgtcttcactcaaagcccctctctgtatgtgagtccagaggtctttttcaggaaacactgtagacctcatctaaccccattactgcattttgtcctaatgtttaattcaatcttccagttttactcaatacccaataaatggctgccactgtgcatgccatattatagaggatccaacaaagacagatgtgatctttgtttgcgtgtcataattctgagttgaccatgtaagtattgatgcaggaaaaacatttgccacgccccaaattgaagtttttacaaattgagtgtgagtgaaactttttttccagtacacttggaataagagccttttaactgagatgctcaggagtcaagcgttgatgatccagtggccaatatggtgactttttaccacttccaggctgatctgttagaatgactccatgatgttcataaaaagtggtaccacgacttcctgctacatgtaaaagacctagatgcctttggcagcagcatccttaggtgctacctgggaatcctgttgacttgtaggccaagagacttaagacatcctttctcatgattcctttatgcatcattctgaaggcttgtatatccataggataaactacttactccatgtttgactgcagaaggctccttcccttgcttctataggtgtctcgtagattccgtagacgtggatcactctaagaccctcaaatcattcctccctcgcccctttgtaccttacttgagaccagacccaactctgcagtccattagtaagagacagatactgtactttatggggagaaagagaagaggtttacatcataacctacccagaaaaattatgtggtacattttcgtttgaagaacttttgttcttcccttagtccaaggtgctaacaaatcataaaccataaatccctcaccctaactctgcacctcatatgcaatactgattcaatatctgtcaattcagccagtcaaaaatatgttaaacaaacaaagttatgcctgcagtgaatatatatggacctcactggtgtccttgtcaatatttctcaacctcagagattaacaattcacaggacagtcacgttacatgattcaggagtttcgtgtaaaaactaggccattttctctaagggacttttttgagtcctgaaattttggcatcgtcaggagttccaacacccatccacagatatctggttcggaataacaagtatgttctttccatcaagtctagtggaacctgcactgaggcatgaagcaagacatgtgactgggacaaattgtgtaatataagattggagagacataaaaagcagattaggggctctggaaggaactactccaagcacaacttcaaagagttgatgagaactctggtctaaatagggactaactcctaaaactccatgaactgcctatgtagattaaaaagtggggattgaagccttcgagacagttccacagctaaaaggttcttgctgccatgcctgacaacttgagtttgatccctggactcaacatggtgggaagagggaactgatttccacaagccactccttgcacgggtgctgtgacgcgcacatgcgcactgacatctccaccccacccaagcccgagtgtgtgtgtacacacaaacactttaagaatattagtggagatggttgaagaaggaagttgtattcttcctcattaatattgagcaccatgaaccaagctctccccacaagctctgggtatgagaaatgaccttttcctctgtagaaagaaatgtcttggtataacttcattcactgaaaccttacatatcaaattagttgagacttgaacactcaggcagtaagctggtggaatcaggagggactgaacttttagcaaccaatcaaaagctgctgctgtaatggcttgtaagaaagaaacaaagtaaggaatggtacaaatcctgtgggaggagtgaaatgcttgcttggatgatgggaggtatttagaggcagcctattacccagcatacagaggaagctgtacttttagtctgtattcatccaggtgatcaaagggggaagtaagttacagatctaagtttctgctggcatctcagtaagggatgctggcacgtcacagtttggcggacacactacctctgaacagggttctagaagttgcagatgagtagggattgacaggggactctcaaaggagaggaatgtgtgctgacctggccttgtccgctctctgctggttttccgaatgcagatggttctggcttcttgtaggataggactttactgtttgccattttcgttccctcttctctaattgtgttgttccattctcagacttctggattagtctatttctcaaaacagagtattgcacagaacttgtgacaagattatatactttatctatccatctgtccaacataaagttatcaaacatataatttccacataaatcatgctaactgtggggagaaaatatgagcgtcttattccagcatttgccttctgatgggggaaaacaagccataaactgcgagtgaggccttgaaaacagaagatatggtaacctgggtagggaggatctaactcttgaacttgagactcggtggatgcctttggatgaaagcatgcctgagttttgaaggtgatgtagatatcagttaagaaggctgggctggatagagggatgaaaagggtactttggccagaggagacaatttgccggaagtcacatggcctttactcatctggaaatgggtccatgttccctgtggctcaggacatactgcagggtctccctattttgttggagctgtgtgaggacttcagataacagtcccatgttccatgaacgagaggtgggtagcaatgatgctggaagtgtaccttcaagaactgggctggccagcatgctagtccatgtctaggccatgtgtcatctttatttttagaagcgactcccaatttggaatggacaaacatttaacccagccctaccctgaccctaggaactaactataccttggtgtgtaggtcgttatggaagtgtcaggtgtgtgaggtcaagacaacctgaagtgtctctcttcaggagggtttccctaaagtacagaggggtcatgattgtgctggctagttttatgccacttgacacaaggtaggatcatttgggaaaaaggactctgagttgaaaaaatatatttagagaattgacctgtatgcaaatctgtaaggcagtttctcttgatggttgataaaggaagatctagattactatgggtggtaccacccccaggcaggtggtcctttgtggtataggaaagcaggctgagcatcatagggagcaagtcagtaagcagtgttcctcactggtctctgcatcagcttctgcctccaggttcctgcctgagttcctgccctgacttctctcagtggtggagtgtggcctgcaagtgtaaatgaaataaaccctttccttcccatgttcccttaagttgaagttttcacagtaacagaaagctaactaagacactgaataatggttcgcctgatgttccatatgagactgtctggttattctaccttaaagagggccaaaggctgtgggaatttcttgggtccatcttacttggttaaagtattgtaaggtcactttgtagctaagtgggcttactaagacttaaacgtggctggctagcctgtcatcacagttgtcgcgccccattggaagcatttgagtgaaagggaagaaatcaaatccagtgccaactgtgtatcaaatactctattggtgcctttgcaaatattatctcccagaaggtctcagcctcctgacttgggacagcttaggccgtgctctaggtatcccctcaccattcagatacaaagcctggaggagctagtggaatgtgtagcaaccgtggtcattaggaccttgccagaaagcatttctgtggcttaatgactaggcactaggtctgaaaacggatcagataaaggaacccggggagactttggagtctgtaatgatgtgtgtaggatttgtgaagacatggtgactgtcagagagaggcttcatggcttagccaagccttacgggatacagcaagcagagggactttttgcatgctgtctaaatttcagtctgtcttagagtgccaagccctttacagcaataatgaagggtctcttgggggagctggggaaatctttgttgagggataatgttagccattctcaccaccacgtgatgtatgtgctcagaaggagtaccacaagcagaaacacaaagggggaagccagcaatcgtaatttttgttcttaagggtcggcctcccaggaaggtgatctggtgatatctgtgccccattgtgttttccagacccataggactggggctggactggggcaatggagggacagagaaaaaaatgtgttgtagacttcacaaactcagggcaaaatatgcaggcttcctggggaatgttctcttgccacctcactgagagagtgagggaggaaaaagaaggattggtgccacatgaggcgacatgcaagtgtgccgcaggacatcggaacccagcaccacatctaatgagcctgttattagaggctcttggcagagcgaggagaatcgagtgctaatgaaaagcagatacggcacaaacttagcatctctccaccacgagctctctttgagtcctggagcataatttacacaataagctggatttgccattgaaacaggacttgcgtgcatgtttgtgagagggggctgggtaacagttgcaacattagcagctgtttaactaatgcagtggagaagctaaggttaaaagaacttgtacgttcatggtaaaggtttagttatcccccacccctgggtgtcttgtcattacccttactttgttgggcaatggagaccaagagagagggtctggctgagccagcttccagtgttaagaatttagtgcctgctccttgatccaggatgtacccaagtaggaacagaggtgactagcattctctggggtgcagctcgggagttgcggtaagagtggggaagaacacggcgctgtggggttgctgtaccccaattccctgccttggtgttggaactccttttcaccctgttctatgtgcacagtgagtggacattaactaaaggatgcacacacacacttgaagtgaccgtgttgatgcaagggaactccgtagatcaggttctgccctttctgttcattaatcaggatgcaaacgattacagtattgagaacttaggccctccatctgtccatcttccttccttccagtagcaggcaggatctgggacaatcatcaaaactctgccacattcatgatggcactaggccccagcattacttatttgtcagccatctcaatcagaacacatgctaaaatccaacatttagatgtaaggggttatatctggtgggagtttttggttctaggatagctgtacaggtggccatatcatatttagtttactgacttgctaagctaagaacagatttcagaactcaaagaggctctgcattttctacaggctgatgctcacctatgccctagtcacgaaagctgccctgaccacttgatatagaagcatatacccacactgtctttacttctgtccagtgccgtcaccactgcagtaagcctatccacttgctctttctcccaactacacgagagcaagagcttttgttctgggtttattttgtttactgtactgctttcagtagctcttagagagtgggaactgcactgtgatcccagatgaaatccgaggcctggaggccaaatggtgcaggagtgctcaaacagtatgttgccaacatctggagaaaggagggcatcctggagaaagccgggtatctctcaggaatgcatttcaattcccagtttgtgcttatgtggaaggtcacaggcttgctctctcagggctcatagactggtaaaggatgcaggggtttaagctaagaaagagctttgagatccaggtcaggaatgtatccctccaagagacctttcctaaacacccgctatgccttccctaacctgaattagcataattcttgagattcctagtagcaacccattcaggactttatcacagcccagatgtgaagcagataattacagttcaccacactttctccccttttctaagcagaggctcttattacagagtataatgtctgaccagtggagaatagtcaataaatctatacatgttgttcatcattgctgctgtttgtttagtaaccagcacatgtgtatgttctaaagcgatgtaggctcagaagcagctctacactgtgctatgtaatcatctttggtattaatgtttcacattaatattctggaatcttctccttaggctccccttgtggcccaagagatgcagcaaatggccagacttatacatttttgcgtatagattggtgagctccttgcatccctggctgaaactgagtctctgatttagtttaaaatgtactcactgtgttgtcaagatggctcactgggtaaaagagtcgttgtttaagcccagcaacctgaaattaatccccaaagcctgtggtggaagacaagaactgactcctgactggtgtcctctcctttccacaggagtacggtggagccccccaataatgataataaataaagttagatgttcaagcttacttttcacacgtatatttcaggaactcagaagccgtgaacatctgcttagttctaagcaagcaagtgggagaccttctaagtaagcgctgtggatgcaggacatcttgatgctgccactttgatgtggctgttttgactcagggtttccgggacatttttgacacagcctaaaaagcaaatgattaagcaagctgcaattttgtatagcaaaagaaatgtgtgcaacaggcacgcaaacccttctggggttgggtgcagatgtgagcctaatgtctctgtgtttccactttaccatgactgttttgatgtctaacactttcatgacatcatgtgggacttgccagaatgtttgctgtcaatacttgctagactcaatttaatggcaagagtagacaggattctgatgtcaatggcagcagggtacaaatgaaactgaaggcaagagggatgatgatctgggtgggagagaggggaggaggtgccagagtttggggaggggctggctaagaaagtatgctcactgtttcagcacatggactgcctctgttcctcatgggccattttctagttttgagcttaattttactgcacagttctgtctggagaattgtttaaagatggaaaaagatcccagtgcaaaactagaaatgggatctgtctgtgctctagagatggttctggtcattgcctcctgcttgctgcacggaacactttgtgtgtgtttcatttggcagtgaaggaggtggcccgggctgctcgctgatccctgtgaacatgcagccacactgctttctttttataggtggtctgagagatcctcagtacccgcctgtggcttgaagtcagaggttgtctgcaacggcaatttagtaaggagaacataggggacactaagagcttttaagttttgactacttactttcaccttagtttcctggcagaccatgaagtactagtcctaagttttagggaattttgatagtaaacacattaaaacagcttgctatgaataagtaagccattgtgtttaggtccagaaatttagctctgagttaaattctcaatgtcttgttggaatgctggggccactagataggtcctttaacttattgtcatctctgcaaggaccttgataagcctgtcctcttcttcctgttctctagagaaagatactgcctgtggcaggcaccacaccactgtatttttttgagcattttgtctacgtgtatatgtgtgttgtgcaggcagatgggtgcacatgtgtgtgtgcagctgtgtgtgtacatgtctgcatgtgcacgtggaggtgaaaggtcattcttcaagtgccatcaaactttcttttcggaagcaaggcctttcatttagtctctcactagtagactaggctagccaacaagccccagggatctacgtgtctgtgcctccccattgctggcattataaatgtctgtcaccacaaccagatttgtgatgtaatttctaagaaccttgctcatggctccctgctggcagggcaagcatcttccttattgagccatttttcgtctccacctttactaaattttcatgaaggagtagcagacccttcccttccccatattataatctggggattataatataatctggctcctccaagatgagatgtctttagagccctgttctatgactctggcttccagttaaaaaggaagacacacattaaacactgtgtcacacagctagcaagcaaagagtgaggacttagatgcttgaagcccacactcctcccattatcattagtgatgctgccaggccattgctttgcaggaagatgttacttctgtgaaggtttgtctagtctggtcagaatacctgagcaagtgtgccaccctccttccttggaaggcactgtcatgctatctatcaatgacgtgtccctccaggtgttgctgtcttcccatctgtttttgttttttttcatccatcaaatgattatattggtaaataaatactaccaaaatatcctcattttatcaaagtgaagatgtataagcttcgttctaaaaaccttactggcctggaggtgatatggtgggggaggggaaaacacggtcctctcttccccaacaggggttctactgggcagactcccaagacagcttgcatttatttgggacctgtcatctggaaaatggctgggtgacattcaaacatgatagtgatccaaaggctgcctgcagccacactcctttgattgagtggcttttacctgtgggcagtttaccagagttctggttatacaagtgacattttaaaaccacaattgactgacctttcttttagctgtatacagtggctttttcagaacagagggaaagtttgagttaccagcagatgtgagtgactttcacctgtgtgggatgtggaagatttgaacttgggggcatcctaattttggtgcaattcaggccatgactttcctgaaaaatattacacaccccagccccttgttattaagagaatgaaagagcgcaaaattcggaacttgatatatctagatttgaaaccttaatgtcctgttgattttaaagcctaccccagtaaaatggaatagagacagttttctttcagagtcagcaagggaatgactcctgggaagcccgactatttttagtggtgctctttttcttaccgtgggaatcaagggtaatgggggtaaatgtatgcatctgccctatggtcaactgaaatgcagtgtgacctcagcattccactttcatcttcctactttgcttaaaggagaccccgattatctcagctcagggagtcgctaaccaggagcttcatttctgttgcagtgccaacaatatgcccaagcaggtagaagtgcgcatgcatgacagccacctcagctccgatgagccaaagcaccgaaacctgggcatgcgcatgtgcgacaagctggggaaaaatctcctgctctcactgactgtgtttggtaagtgcccgaggtctctatactcccttctccaagatcacgccacctttttttccattgctctcttgatttgtatgggagctagcctctcagagtggacttcctgaagaaaggaagacaggtgactgcctcaatggcaaaaatctacccctaaaccaactctagccatctcttctcctctgcagtctgtgagttccctctaatgtccatagacagttgctgtgagggtgaacatgcagcttcccagccatacttgtgaagactgtgttgagctgttgggagacaggccagggaatccgcaatgcagccaaccttctgaacgaccccagaagcaggcaatcagtatacctcattcggagatatccttgcatcaagataaggacaacagggccagaaaaccccactaagaagattaggcctttgccagaagcatcgttaacgttgattgattgatcgagttgtggaggggaccatggaagaggcccactctgatgctcagatatgttccaagtcatcttggaggagtgccccctgcttcaagccactctggggatgtttcctttgtctgagctgtcattgcagtcttggtgttgggttttctatggggtgtattgagagcagaggaaatggcagtttcttgtaatgacagctgcacagtttctcttcccaattctctccttgttcttcagctctcacttagactacacagagaaacagctaaagttcatctccgtcccccaccccaccccacacacctcctcaccatcatcggcacactctcaatctcccccataccctggaccacctgtagcatctcagctgccagtggaccacaatcaaaactgaggattgcctcagttcacttagaaactgggaaccacagccatggctgggtttttaagaatcatacactatgtaatcaaatctcatccaccctaggacttcaagaagattgacagtagaggtgggaaaaggatctgcccttcagctgcagccttctcttcatgtccctaaaattaactccataacccacatgcctagcacctcctacccccatttccagggggtctataacctagaatgtaggttatacttttgggggttatgttggccagccattttcaacagtctaaagttgttctggtggaatgtaggagtctgtaaagcaaacagcatccctgccagtgtctttgcttgacttgactcttctcagatgatatagagccttagagccctgtcctatatgtctgccttccacttaaaaaggaaagcatacaacataccaaataccagatcccattggcagatctggctgagagaaaacaaaaaacaaaacacaaaacaaaaatgatactgcctcctgggaattggttcttctgagaatttgtgatgctatgtgcaatcaatacctcgaaagattttggagtcaagtcttcgtttttcccatgaagtgttaaaaaatgttcttctggactcctctggtattagagtaattggagctgttacagaaaggtgtcttgctggttgtcaaaaatcaatgtcccttatgtaaggtcttcattttgaggtatttgtagtccattagccagacacatgaaaaagatcacaaccactggaaggaatctttagagctgtttgtttcactagggaaaaaaaaaaccctgaattcaggttgcctctttcccttcaacaggtgtcatcctgggagcagtgtgtggcgggctgcttcgcttggcatcgcccatccaccctgatgtggtcatgttgatagccttcccgggggacatactcatgaggatgctgaagatgctcatcctccctcttatcatctccagtttaatcacaggtgagagctccttcccagtgcctgcccacctatggcgaagcccagtgctggcttccggggatcaaagtagactttctttatggctgagtcagtggactccactctatatcattgcatctctgatggctttcctgtctctgaaataggaatcattgatcctaaaaagaaagacaatagatctgtcactcactttacctttccttctaacagtcaaggattcaaaggaacagccatgtattgaaagtgatactatcttgctatttcatttttaatattctcagcatattggaagatgatagagattgtaaatgaaaaaatacactgcttttattatttacttgggcatttaggaagatatgaattgaaaagagattaaatgctagacatgaaagctgaaggtgttttaatagaaagatatacttaatatgtgataacattctttcttatattttttggctaaaataattcattgatttgattttttttcctatgtttgaactcatgctgataatttttttcatataagacaatgttattggaacagggcatgatgtattgcttagtgtccagtttggagttgatagtggggggctccaagctggtcatagctagttgccaatgagtttggtggccttcagagctatcctctgcactgatagacttggaggttcagtgactccagctgactcccacactgggccaattgtcccatccttacaccagaaacactagctttcaggtttaagtgttcaggaacctgaatttcttatcattaagctttggggttgaatggatccgtgcttctctccagaccagagaagatgttttcaggcctattcaatatattatatgcaagccagcctggtagaaagacccggcttcctttgcccagatttagcctttgggttctagagagaaattggtcatacatgggtcacattaattcagagaaatccacaccaacatcctccctagcatgaaaaaaaggacagatccccagaaatgggttctatctctccatttagtaaaggtaggaactgaaaccaggaagtaggcacactgaagaaacagctggagaaaaagccccagcggaggctgaggtctgtatgacttgacttggagtttcctctgactgccctcagtacagatgctgcacatagtgctggcagctgcttctcatatgtgctctccaatagccacatgaggttagacatgagaaccaccatgcttcaacacaggggtgtgggaggatcatgctgggtctccatttcagtctcttgtagtatattctaaagacatttgaccatgaccttgatgtcccagcttttgattctcctaaatgaggacaatgaatagtaataataacatatgatcgaaatgctatccttggcttaaccattgcttcagagaagaccattgaaggtcatgaaaatggaaaagacatcattatcttagacttaaaaatggaaaactcttcaatattattttcacatatatactagtgattgacatttaggttgaaatcagcgatatgtaaactatgagtcaccgactccccaggttctcaagaatctcaaaaataaccccagaaaatagaaatgtaaagtgtggaatttggtcacatatttagtcagaggagtgctagttaaccactaatagatctgaatgataggaagccaggggggttgtagatgtgtagagatggggacatgaatagaaaagaacagaactgatctttgtggatttcttttaaacccagggttgtcaggcctggatgctaaagccagcggccgcctaggcacgagagctatggtgtattacatgtccacgaccatcattgccgccgtgctgggggtcatcctggtgttggccatccacccaggcaatcccaaactcaagaagcagctagggcccgggaagaagaacgacgaggtgtctagcctggatgccttcctggatctcattagaaatctcttcccggagaacctggtgcaagcctgtttccagcaggtaacccaaatccccggggttatccctgtccaatctctcacctcatccgtgatgattcagagaccgtttcaactctgatagcagttttctaaacgtgctctgatctctgtcaggcttgagtgtttcgtgatatgctctggagtattctaaggctagaatcagatcacctcatttctggaatatttgttgcctataaccttaatatcattctgagattcaccttttcctttcttctttttgctcctgtctctcagttgcacacagacactcttttaccggtcttgttcacaaccctctaaattgcccagtgcttctcaacactattctaaagctctgtgtcgccctgaaaggaaaaagtgcctgacgtaatctgtcctacaaattgagaatctgtaactcatcctcaagataagacaggggagtgagtgtaattttttagttgtgaaaacatcacacatctatgatcctagcagtgggaaggcagacaggagaattcctggaacagtgaagctaagtctacaagttctaaattcactgggagatgctgtccaaaacataataaggagaaagaccaaggcagatgctgatatcagccattgattggccttcacatacacttgcacacacatgcaagcacaaccccacaagcttataaccttaaaaaaaaaaccatataatcctgctaaattaaactacctaattactagcccaaaacacactcactgttcggttttctgactacagagccaggtaagattgtcacacacctcagatcccattagctcatgaaaagactaaactggagcctaaactggaacgaagagttcttcagtcattctcaggcaagcactgaagaatgaagttataagacagacagcttagaagaaaaatctgatttcccacccttaaaatgcagtgccaaataccactgagcccacattatatcaagctgggatggggtttttttttctaatttttaaaagaaattgtgaatatataaaatgagaaatttgctcatcatcttgatttttttgatcagtgacagtatgtttggaaatatcccatatgtatgtattcacgtatggaaacatcccactattatatactataaatacgtataattaagtcaatgaggacttaggttaaagaaccccattccagactggaagagtaggaggaggagtgactagaagctagagaaaggaatcttactgaggtcccctgttcatgtgcttgctagcctcgcctcggaggatggtgtttcttgctttggagtggtagatacaagtagctgcttttgaattttgaaatttttgaaatgtgtgctttggagctatggatcctaggaaatttgctaagagaaaagaggtggggaggcacgagagctcccaggaaggacagctatggatcttcttcctgcaccatcacatctgctcagattctttcatttcagcctggggaataaggccagaaagccccaggcactcggagccattgctctgctgttgttggatggagcttctataatgctagccatattcacacttgggtggtcccgaggctgatggtgggctttgccccatggcaaagcatactgtctggactctaggggatagaaaactacatcaggatgtgctccgtccctgccaggatcttataccttcctatggcaacctagttttgtttcctcagctagggctagggtcaagagctctttgagttggggcagcttgaggaatagcagtgtactgtcctttacctgacattgtgaatgcaagtagatatttaccctgactttaagggccttgaccagagaagaccattcttacagagtaacaaaacagagatagagaactgggtcacttagcatcctttctggatccccatggcctggcgaggagtgtttttaaatgacctatcttgagtgaagggagattcctgactagagttagaaaccggggcaaaaagaggaaggataattgttcccattagaggcagtcttccgtggtcttggcttgctcaagttagaccctccatgtttaaaaccaaaacagcctcccatctggttttaggaagacagagctcagctcaagtagtcactagtcaggtcaaattcaggtccttattctaagaaagcttgagttagggaaataattggttttctattgaaaaacaaccagtgtgacagctattgatgtaaacaaagctacaagtagctgatggcaggaggctggtaagaaggaaggcatgtaagtcaactaggagatacttgtgagttttctggcaagttgggctcaggtgccacagcaggtatgcagatggagtggtccaaacccaacgtgtttgtattcatgtatggaaatatgaactgagacctggacaactgaaacaccccttcagttgggaagctagattttgaagtctagcatgattcatgttgtgtctggcttcatcgacttactagaaatcaggtcttgggttatttgtaggacatgaaagatgtgagacccttagcaaccagcctcctaccagaccctgcttgttatccatgatgatcactatagagtagtctacactttggcttcttcatccctctcaagataagtctccatctttgttgcctagagtctggcagctacatccagaagtttcccttctggtcacttctgtggtttctcttcatgtttctattgcccagagcttggatcattctctgcttatgtagccaagtttgggtctcctctgaccctgctcaagtgtatacagccaggctaacacgggaggcacctgcctcctcctagagaagtttgcctgtccttcttttctgttcttgttatctcagtccagcattgctaactgtcaaactcagccacagaaggatcaagtctgtataacttaacatatggtgcagggggtggaaagaattcaatggtggtcgggccatttaagttcaagtgtcagttctgccaataactatgacgtctgaaaagccagttcttcctgcatcgtcttctgtatctattcagggttcagccatctgtcacctctcacgtgccagcacagacattctaggattttgaatgatttctattttaatgccctggaaagtggtaaattttgaggttgagatgtgaatttttacatgcaggatgcctgacacctttaaaattagacccacttccacgaatgtcgaggaatagcataggagatacttggggagtattaggcaagagtgagttggcttcatagcctgaagtatatatttcccaccttgcatatgaattatatagtcccagaaaggtggctattgggtagctgtcaccctgctgtccagatggagattcccagcagagcctggtattggaaggacccagaacctaggacaggcttctgatgattctgtccagcagaaagaacatttacctgggcctcacagtttgcaagagcagctactaagttggacttgtgataccatcccccaatcacagaggtgtcatcatggggaggaaaaaatggacacatatcccccagctatagcaactgtgctgcttagggtacttaggggacaaatgaatatcataaactttgtaataatcttgttagtaggatagctgcaccatactgcatatgctacacttgatcttagccaaaaggccgagaagcaacaacatactgcatatgcaatgagttaatgctctattaagaatataatcataaaatattccccagttttattagccttgttttggcatttcatagttgtagttaacatcttgggaaggttcaagtgtatgactggctggctgggttgttgttgaccttttagactgaccttcacctttattctttttccttcctgctccattagattcagacagtgacaaagaaagttctggtggcacctccatctgaggaggccaataccaccaaggcggtcatctccatgttgaatgaaaccatgaacgaggcccctgaagaaactaagatcgttatcaagaagggcctggagttcaaggacgggatgaacgtcttaggtaggcatagtggttgttgccatccatcacctttgacttctggacagtggcccgcctttctcaacagccttcttccctcagttctcagtatcccaacgtttcttctcaaaaaacccagtaaagtgtcctctaggtggcgcagaaggttctctctggggaacaatatgagtgtcactgagacagggctgagccatgaaggaagacaggaagatcagcagaaggaggaaccccaaagggacatggcagccagagatcaggggtagaaaaagagaaaagagctgacatttgtcaggcacattatttaactagccatttaatgaactgggctatgcttctcttttatttattaagttttgttttagctgtctctttgcagaagcaccatgcttgttgttgcatcctagcttcaagtctataacaaaggcagagttgccagtattggacagtgttagattaggaaacaaagggctattacagaatgtatatgacctgtctccttgagcctgatgccttctctccattccgtccagagttcctctttagctgcacagatgtgggtttaggaggcactcattggttgtctgctcctgggcaagtctttctacttctctagcctccacagtaaattggaaatgggattggcccagggtttgtgaaccgaccgttgtaaaaatgaaccggagctgtgcctataaagcaccctagcacatgcagtgagctctgctcagacaagctctggtcattatgaaaagtagatggagagccaagaagctcaaccagaacacattccatgaagtgcagggggtgaggtggtttccttcacaggatcagctccaaatttgcccagacttactgatcacccagccaccttagggctttagggtgggcccattctctcccatttccatcattgttcagtttaatggtgttaggaaaatgggtcgtttgcctgcaaaatggaaaaaaaaagagaaataagaatctgtaagcaagatcttgcaaagaagtttctaaggactcgggtgagaactgtttagagatgggtcagctcagtggtcctgtccctttgtcatctaagagatcaaatgtgcttgtctccttggattgtcattagataaacttgaatttttagatcaatacaaataacaataatttagtctaagtatgtcccacgtgctagtctaaaaataaataaataataataatattttttaaaaaaggttcctatgtaggatgtgatcagcagcgctgtgtgattgctttgtgcactgtggttgttttccgaggacatcagtgctgaacagagaaggcggcagaggagctgggcaacccagtgcctgcagggctgaagtagatgctctttgtcctggaagaaagcccgttgggtgagagggagggaggagataagctgagtgggttgccaggcaacaaaggatcagtaaacacagttgataatcagtaacaagccagaggtagttgggggggaggaggaagtgagagagtcccgctgagaaggaggcatttctgataacccagaagccgctttctccactgcaaagatatctacaatcctttcagggccttctcaattcccgggaggcccttctggtgggtcataactttagatcccatcctccttgacaaagtaacccctgatactttggactgaataattcagaggactagtctttccagagtcttaatggattctagaaagtcacatgacctgtggctgtgcctgggagtttcaaaatactggcaaccccaaccaagtctaagagggctttgttcaagtgaagtacccctgttccagtgagcagtttcaattaggcaatgtttacccagggcaatggcaggctgaatcccgcatccattcaagtacacagcgaggcactgcgaagccaagggaagtcagattgttgagaaacttcccttttgccaatcccagctgaaataaggttcttttcatggccttggaagggcagcagcagtggctctggttttttgttttatttttctgtatttctggtcttcggtttttggaaagccccaaggactgagaactgcaatacaggaaggtgcaatcttggctcagccttctgcttctccaaggacgtgctctgctcctaagaaacctggagagctagcttgtggtacagcatacctatgattccagccctcagaaaactgagacaggaggatgattaatcaaagaccaatttgagctataagtcaagactgccctcaaaaaccagccaaatagatgaacccccaaaccaattcttgatccccaccttaactccaatagcttaaattggtgccaactactctctatatatatataaaatttaataaatattatgatttgattcccttagacacaaattccttctctctgaacctctgactttatttcccctttggtaaatatatatatatatatgtatatatatatatactcatagatacaccagtgtctgttgtttccaaggagagtctttattctaattctttgggactctaagacattgtgctttattcaatagcaccaactaagtaattcttgggcttctcagtctttggttctcactccccaaagccacccttcttttctacatcaagcattaatcaacctacttaactagtagtcctcacagatggattcggtgtcaccacgcccaacaaactgccctccacggtctcagagaagggtggaggaagagctgagaccagattttctctggtactgtaacactggttcattctgccctgtaccctgtctccactaagtcccattcttttctgggggtggggggcaatcactcaattgtgatgtcacttatcaatccctcttgtcaagagctgaagaggggaggtgttaaatggcaaacattagcaatctgagtacaagggatgtattattttcactaaagagagatgggatcccaccaagtgtagttaagtaggttgatgaatgcttgatgtagaaaagaagggtggctttggggagtgagacccaaaggactaaataaagtcagaggttcagagagaaggaatatatgtctaagagaatcaaattccaatgctgtaatttatctgataaaagacaaaaaccctggatagagtaaggaaagactggaaagtagccctactaaatggagtagggtagggtagggaagagtatggagagagagagagagagagagagagagagagagagagagacagagacagagacagagacagagacagagacagagacagagacagagacagacagagagacagagaaattagaagatgcccaatacttcaggatcagagaacaagctaaatggacaagcaatgccctgtagctggaagaataactgtgacttatactccagtatgtagtcaaagtcaggtcaccaagatggcgggggggggggggtccaggaacacacatgattataactgaaagtctagacagttcccagggagtattgagaatactgttagccacatagtgtaccccagtcctgatgtgttagcatgaggtactgaggttggaggtggttgagagtgaatcttctggaaagagaaacgaggcttgaggatctaaagtccaagggcagatcaccaggtccttagccacaggtgagaagtcttgagtattagatttgcctcaggatgtggtcaaaagaagctgccactgagagagagggtagggagtgaacgcctcagatccttcctgccttggattaggattggcactggcggctgatgtgcagttgaagtaggatgtcaagaaaagagagaagatgggtgacagggcaggtattggcaaaaatctaacaatgaacccaacattctggctttatcatcctgaaaagggttaataaacggaaggaagcataataagttgacttctgaaagggcagttaactggggcttcctagttaactaggatttcttctaagttccggttctgtcactcttcttcctccctcatttgctttgtagctggagggaattccccaggtgaggtatacctcagaatagtacctaaaaggtctagaaatttctccagcaagggctagttgtttctgttcttccaatcatggttccaaagtttgcatgacaatccccaagtcccgacagccccttccttttaatctgtgtggtaataggagctgtgcacacatgatttgccaaagtgaggaggaagagaagatagcaccttgcatttgggaatgaaaatgaattcattttcttcaaggaaatcacacctcaactacttagagtttagtttgttcaagtgaaaaatgtcaaaagaagcaataattatagaatggaggcggggcaggtgttcagtgtgaaatgtaatgctttttttcccttctaattcctaatttatccaagggtgactgacatgtagaattggccctgtacatcaatcatgctaaagtgtgaggggaaaggaagccaatattttatcatttgtccttctgagtaatgttaattgcccataggtctgatcggattctttattgctttcggcattgccatggggaagatgggtgaacaggccaagctgatggtggagttcttcaacattctgaatgagatcgtgatgaagttagtgatcatgatcatgtggtaagtctgtccattcatcctgacttcattgtaatggcgctgtggtacgggagaaagccttggagtccccagagaacagtggagccctcccagtatgaagaatgggtacagaccaaaaagatatggagaaaggggtgtaaaactcttctcccttctcccttccctcttctgcttccctttcatcccacaatagtgctcattgggccaaatctgacatatcacctaatcctgtgtatccttcggcttgaaaatggattttagtgtctcacacatccatcccagccgaagctggtgaaacaaagtgctgagtgctaaatgacttgcacaccccagatatttctcccagttcaggagactgcaagtctaagatcaaggtgtctgtataatcaatgcatagcacattcatctatctgagttctgagagaaacaactcagagtaggaaaaggagggaaacaacctcctgggttctcttctagagcattagtatagtctatgtccattaccatatcaaaatactacaagctaggtaaaattataaataaagaaattattattatttttttaaactataggttgggaggctgggaagtcattagcagatttactatctggtgaggggatggtccttgtagattactctttctgtgtgctcccccacacagaaagagtaatctacaaggtggatagaaccaacaggcttcagtaaggctctcctattgaaacgctaatcacattgaggagggctcactgccaagtagcccatcttccaagtcactggactgaggctatgactcttccaaaggaatctgaggggacaaaaccattcaaacttagtagacaccagtctcattcatcagggtgttatctaatcacctccaaagcccccactgctgcacatccagtagtagaatataaacatttaaataagggaagggacatactttcagttcatcgaaatggcgaaggaaagaaaaggaaatgaagaaaaagaaaaccaacagattaataacatcccatagtacaaaaattaaaagttcacattatctccaccaaactgaatgtggcgatgcatttgtggttgattctcatcaaaacttcaggaatgagaagctgactgggggctttgatgcacaataagataactgaaatattagtgctggcatgttcaccacctcattgaacttttaaaataagaagggagaaagggatgctggtaaaaaaaaaatgctgcattctctgcttttatggttctggaatctcagttcctgagcagtgctaatatttaaatgtttcttttgtgtgcagacctcagctagcgtgggaatgccatgtcctttaggtccatctgagtctctggggacctgaggacctggtagacagtgacatacaatgcagcaccagcttcttgcttgaccagtacttcatgcccatgttgcctagagtctccagcagcctgcacatcccctctgcagtaaatatgcagttcctctttctaaaggtttagcaccttgtgcccccatcggtggggtgggtaaagagggctgtgagtcagacctgaagaaggaatcttcacagatttctactacctcatctaggaaggcagatggggcttttatgactgaggcccatttttttatgaggcccattcccattgttcttcagatgtctccccagcatcaccactggataactccaagcccgtggaaaggacctgggtaaaatcactaagcactcttagctgacccctggaggctaaaatcgccatagtctttgtgtagtggtaagaggggtaaaaatagcaaaccctagcattgtgaagataaggcagtctgtattattagtttcattttttaaaaattgttttgagataggctctcatgtcgtctgagctaggatagccaagaatgacctagtggaccgtctctctgagcactggtatgcaactccatgtctggactaaaaattatggtcactaaaatgcaaattagaaagatttcatcttgccacgtgttcaacttcaattactatattattgaactatctcatctattaaagaaatcataatacttaactaatttttttcagtatgcttagtattaacctggtagctttccatgtttgcatttatgcattccaataatacctggcaaactagatgctttcagcatcccattttccagataataacactgagtacaaaggttaagttgcccagtgctgcagagctgcattgtccagcagtcgctaactcagtttcttcctgagtttgaagtagataaaatctaggaagatctggtgacaagctatgtgatcttacacatgctagacacatttgaaccccagtattctgattagtaaaacaaaataactgtaaaacccatgtcatggagttgctcagagaattaggtgagatgggaacccagtcactaaacctgttctgtgtccacagagggaccacagcacttctgtaagtgggcctgtggttattccattgcgatcattatcaccatcaacacgatccatatccccagcagctctgtgcatggtagttctttaagaagtctgaaaaaacccataattttgttgtaagtttcatatcctcattttttgaaaattccttaaaactgtttttttttcaaactgtgaaaaacttaaaacttcccacagtcttcctctatcaggaaaagaagtctctgcccttcctttgtttctacccttgactactgcctctccaccatccatactgtttaaggaaagaacattcaatgatgcttgcaaggaagaaatgctttctgcagggctgtctccaagtgtataaggaccatagcaacgtgactttacagtgatggagagggactaggctcagacccagatgtcctgggaaggtaggaatttataaccaacggagtgggggagtatccagagtcagaggactctgttgagaccctatcagaattcttgttgaagtcaggccagggaagccagataccacttggggatggtcaactatgaggaacatgatctgaaatgaagagccacacacggaaggtggggattcttgctaagctgactcagtggggttctctgctgaactagtatttcttaaaaaaggaggcaaacagatcctacagaaggaaggatctaactgaagtttcataaaagcaaagaacttttcccccaacccatttgctctttcactcagtaaataatcccttctaaatggactatgatgtgctataatgatgaataccacagaggatttctgcctacatgggcctcccattctagtggaagaagggacaggaagtcagactaaaggaaccaaatatgaattcagctagtaatgcaaacaacaaaagtagggctgtggggtagagagtaagggaagtagacccaagtgaccaggatgggctgtgtgggaatgagacatggtaaagaccctgcagaaagggagaagtccgaggaaaggaagcaggaagtgaaaggctattgagggtcacaacaaagatctggagccagtacagtgaggaaggttaaaaatggtggaaggagtgggggtggaaaggcaggtgggggtcagagcccccagggctctctgggtccctgagggattagatttcattgaattgtggtaggaatcctctgagggggcagcagacctggaggctgtgtgaagtgcttgtcacttctccctattcgttgtaattctcaacagtagctgaaataacagttgcatttctagagcttggacagtgagagtggctctagaaacatgtgagaccaagccagtgtgactacaggacagccctgtgagaaggtctctgcttagctacacttcacacatctgtctaaccatctgtaccaagcctgaaagcgccaagttagagccttgggatttcattggtctgacataaatgagagccgaggggaatggtttccaaagactaaccaaggaatatctgcatttcatcacttgcaaatgagaattttgctcatgaaatatcaactctctgttgaatcagaattatctgggggaatgcatttaaaacatagaagtcctagtactagtctttggtggaagaccagggcacacaccctgatatcaggcagttgagggcatggtgatgcagatgggtatgggtaccaggaccttgactgggttctggatagcttaaatgctgtgggtgaggttgtatgcgtgaagtggaaagcatccctgcaaaggtcaccttggtggaacccttccacaaaggagggccaagattcacagagggtggaggctggaatgacacatgcactgtatgtgaatagtggccttgtaaacagggcccaaagcagagaatacagcccacctgtgggtaacatggagatattccctacttctatcccaatgaagatgtctttctgaattggaaagggacccaataattattgaatgtcatgtggttttagaactcttggctggagccttaagcctctatctctactaacctgtggtcttttttttgtttcatctcaaaagttttgagtggtaactttgactttgggcattttccccattcttttccatagagtctcatctccagtgagctcatttattggtacagaagcccaggaatagagctcaagtcaggtgtagggaagtaatggcccaaagtcaaagggcaaaggctcttttatgccccattaacactcatcctattagggatggaccgtacattattatttaattttattttagatgtttgagtgctactaggagtagcattccatattccctagctcttatgcctcaccttgtggccttggctaatactatctacagtgggagctgatgcccacccccactgcccaaaccctgctcactgggtgctccctaaggtaggcccttgctgttgccttagtccatctggctctggctccaatgtgctccccctgggggactttagagctgatcttccttggcaaagtaccttgaaaacatgttttgttcattctataaatttacctgacttggaaagaggaggaggggaaatgaaagaaaattgaatagcatcctaaacagctcataactgtttctgcagacagcctggaaggctgactggtgctggggaaagaattgatctcttggtttatgaagatgagtccttcagggctttataggaaggtgcattctcttcagttattttacagttcaaagacaaagtgctggcctctggaactccatagctgatttatgagatgttgtgactatgggcataccagaagaatatcaaacagccagaaggagggtttgatgtcatgacagaaagcttgtttcacagtcttattaatgtctagagaagcagttttcaagcctggccagcttgcaccccaggagagagacaagcaagggtcaggctggaaggtccacaagaaagagcagagccacactaaagttctgctttgtcgctgtcagtcacgagtcagctctttctgaagggggtttgctcacaaagccatctgccattgggtagccagtgagaggttttagagagtctcactaactcaggcttggataagaaagcatggaccaggagaggacttgagcccaggtacgtgcaaacagacactcctgaagagtaaggactacagctgagaaggatgggagggagactcagcagggtacacagatgcatatgcaaaaggttgagccttgcagttgcctggtgatgttggactcagcttctttcagccttgatgcacatctgaaaaacgaaaatatgttaccaaatgaggtcccatagccagggaaaggctgggcaaagtctgtcttttctgcatttataaggactcttgtctgttctctgtagcctttgtttaacttgggaaaggcctggtgctaggggctgattgccaaaagaaagaagggaaggaaggaaagaaggaaggaaggggaggaggaagggagggagggagggatgggaaatgaagggagaaggaaggagggagggaggaagaaacaaagagagaaagggtctgcttagatggacctttctttcctaaccccactgttgggggccatgtctggggactttatttcctccttagttattctcaaaaatacatctataattgttaatgaggtgttagtcttcctacaaatatcttatttcagtcagaaaccataacagtgtgagtaaattcatgcttagcaacacctccactagctgcagctgctgatggtgatggtggtggtggtggtggtggtggtggtggtggtggtgatataattataataaagaatgaccccagtacaaggaaaaataaagttgggatgagagagttttcccaccagtgggaacaggacagtttccaagcccctctataagataacaccagcatacaaatgtcagtattggataacctgctgtatggtgattgtctgcttgcgataaagggaagaagtttggcttgggaaggaaaacccccaactttcgggctttcacaaaatgccatggttctccttctggctccgtgggcttgggctagtgactgaactttaccaagtgatggcttccttaattactgagtaataaccctgatgttcagcttgaaggactacaggaaggctaagtgaggctctgagtgcctggaatacaatgaacaggagccagtgttcctgctgttacggcaggagaaagactcaggttcacaaaaccacatttctctaaatgtactcccgggcacagatgctttaatgctggcagccacctctctcttattccttccctctcttttacccgatccctccatcattttaaatacactcctcaacctccaggattaaaaacaatgaacatttacaagtctcagttatttcccaaattctaggaaggagttaaagaacaagggcatcaaaccagattccagaaacacaatctgtatctcttggcctttaactcagtgtttgcagaaagataaactaaaggatgtcaaggcatgccccctttattcctaaaactcaccttagcaataaagtttgcctttggacttaatcgccagaacatgcgtcagtagatccataaaacagttaaagtcggtcaattcaaagtattggatcttgtgttctttctcagcaaaacagagtgtgtgtgtgtgtgtgtgtgtgtgtgtgtgtgtgtgtgtgtgtgtgtgtgtgtgtatagaaataaatgaataaataaaaagaggaagggttttctccaggtgcaggttcccaggtagggtttaggtccctaacctcttaaggatatcttcaaagctcctgttgtctttgtgtttttcaggtactcccctctgggtatcgcctgcttgatttgtgggaagatcatcgccatcaaggacttagaagtggttgctaggcagctggggatgtacatgatcaccgtgatcgtgggcctcatcattcacgggggcatctttctccccttgatttactttgtagtgaccagaaaaaatccattctccttttttgctggcatattccaagcctggatcactgctctgggaactgcttccaggtagaggacaggagaaaatacctttctccacgtttggtgctttttgttccatttgctgcttcctgtttctctcccaaatctctaaatttacaccttttcacaacatatgggaatattttctacaaggtgaacatgttggacctttggcttctcctgcacactgctgaagctcctggttagcttgtgggtggtctgctatcggcctagaaacacaacctcatattaagtgtttagatgttgcatgctatgaattcacatgtccaacattacacgttacatgaagcactaaggtagcataggcataaatattatccagaggatgtagcatgatgttgttcacttaacaactcacctacgatttagaattctttttttcttttcttaaagaaaaaaccttttgaggttttagctaataatttttcaaaagtaagacaacttatgttttaaaagatatgtctatttttgtattgtgtgtgagagggagtgactgcacatgtatgggctctgtgtgcatggctggtgtccccaaaaagccagaagagggagttataagcaagtgtgtactgtgtgatctgggtgctgagaactgaacccacgtcttccgtgtagctgctgagttctcatcaacgccaggagaaccaactttcatggggtaaatggtgattccccaccccaccccaacaattagaaaccggccaattctttgacgttaacaaaccccattaagaacaattctactctaatcctgcccatcctgcccgcctcagatccagtttaaatgacttgaccctgatagacccttcctgcttctttatatattttcagggcctagggaatcaataaggtcctcaaatataggaatcaaaaataatctttaatataatcttgggcaaatattcggcaaaacacaacaaaacggagggaaaagtgcatctggaatcttagaatttcaaagactgaggagttttacccttgcagactgaagtcggtgttttacttctgaatatgtgtcttagtgtcatgaaactgagctgtgagcataaaacactaggcaactcagagcccagcaaatgctgaaacccacagtgggagagcaccaggttcagctgctgagcctgcgactgcttcctgctggtgacatctccactcagtggcacagcatgactggaccttccaaggccctgtgcaggctgtcagagtcttctcagtgatctgaaagccaagtgggaagccaaattgtatttgcatattgcaagcgagtaagaattcaatatgactagaatgtgagctttgggcaaaaggctgaaatgtgttcagtgctggcgaccagatttagtatcctgtttccagaggttaggggaaacacttcaaaatttccctcttacttcctgatgttttaaattctctgtagataaatgcccatatccttgaaaatgcttttctgaagagaagcagttaaccatccccctacaaataaaagccaaacttattttgttatctgatcgtaaatgtgctatgtcacaatagtgacaaggttcagacaatgaatgaaattttgaggaagaccgtgaacctcaccagatgagtatttctctggctaatatcagtaggccttgtagttaatcttcatatttataaatcttccatttcttactgtgctactctagaaacttctatttgttttcctggctcaagagaccatgaaaatcatatccattaatacagatctttgctactactttgtgaacttcattataatatacaggacatgaaagtctggagaaatggcttagcagttaagagcacttgctgctcttgcaaaggacttgagttcggttcccagtacttgaatggcagctcacaaccacctgtacctccaacccacgaagatccaacaccctcttttggcttccatgggtatcaggcatacacatacatacatgtagaccaaacattcaaacatgtaaataaaatgaaataataattatgctgtacatgcccagaggtgtaaatctaaaacatgttggttaaacaggactctcacaaatatctctgccagggtctctgatgatcacctcaggatgcattctagacctggactttctgagtcaagaagtgctcactggctcttttgacgtgcactgccgattaacacttcagcaagtccagaatgtaattttcccaccaactgtgtttgagtgtccttccccatccactcaccagagctgggtattccacatctgtgttgctttgatgcattccaatcttattggtgggaaaactactcagcaaatttgcatgtatttgattacagatgggggaaaacatctttttatttcttactgccttttcctccccattccttgcctcttgagtcatgtgtgagctagctcgattttctttgtgggtactcatcctttcctgggtggttttcaagctcacattatgcatatgaattattaactcttacatcacatgctacagataagaaacctccctcctagacatctgccttggaaataaatactaacttttggcactgaaagtattttatttgtattatattaaaagctgtgaatactttttttttaaatttagaaactcagttctgctcaaatattttttctatccacaattataacataatgctttcatgaatttgtccttaaattatttcaaaaattattattgtttttcttttgaatagccagttatcctggtaattttaaaagacaagacaacttcctctctactcttcctgtggagagaaagagagaaaacatgaacaagtctttccacagcagtgggagctcatgatctttgcttctcatggtgacaatcaaggagcagaggtgggactagaaacagagtcaaggcttaagagccccaaggatggccaaatagccggtatccacttaaactttacatcacaaaggttccaaacagggccgtcataacaatagcaacactgagggtgactgactggctctttgatgaatatggagacaggcatcagagaggagtgtgttccaaatttctggcttcagagcatgctggggggtgtatcatgtcataggaagaatctcaatattggacattattattagcaacatcattgggcctctcagatgggagccaaaaagcaatgccagagtgtcatcctgtcagcacaggaaagccctaatgtgctcaaggactagtctgggccagttgagtctatgtggatttggaggacataaccataaaacccgctcagtagaagaatggggactgtctccatgcttcacaaatcatttctccagtctctgtggccaaagaccctttgatgatattttggaaaagtagacgcaacaagaaaaattaatacattttagtgatccagggagtaagcgttgaacaatatgcttgaggatcccagccaccaacattgactaggtaaccatcttagatcagttgtggtatctaggaaaccctctgaaacagtcccaggaagtggggagaggaattgaggggaacacaaggacaccggtttctaatagaaacagcggaggcagcaagccagaaccacggtatctcctgcatgcaaatgagaacaaatcctcactttttacttgggttaataaggcttttgtaaacaaccccccccccaacccaacacacataccacctattcaattgacttctcctaccataagaccaacagtaggtattacagagccctgactgtaatcacaaaagatgttctttctgtctggtaagttgactccttggtcagtttaagatgtggacttgggtgtctcttattttttagcttccagatttattggtcctgagtaggccttggaatcagcacagttctaagctcatctttttctcccactctgagaaactgagacccttcagaatgtgaccagtcttgttgacaccccatgtataactagtgtgagggagtaactatgaccagggcttgaaaatacctccaaatgctgtctgaactggataaaaataatgaaagcaagacaaactataaagcaaccagtgctgtttggttcctttgcttgatttaaacattctttaaactctaatctcttctgcactattgtctaaaaggatgcaatggtctggacatgaggaagccttgttctcttaggtgtcctattttagatgtaggaacatgtcaaatgttccagcctctaagggcgggccatgtgggtggatcaccatctgatgcctgggacgcctgagagtgaagtcactccacaccacctttagctacagatcacatgatttcctgccctgtcatggcagagacttgggggttggctggtggccatgtgtctgggagtttgactgtatgtcaggctccccagtggactgttcaaagcttgtgttcatgctaaagagtgtccaacatgtttgtccagcattctcccagttagtgagcccaactcaagatgagtcccaggggctggatgcggtccatgcagtcattttgttggaatagcatttctggcatggaactatgggtcattcaaaagttcctcattatgttttgctgttgacagctgacataattttttctcagcccaattcatgtgcacaatcagaagtgcttcaagatttaccctaagatggaaacagggactgaaggacagaggacttggcaggcactgagtagctctgagaatcctgaaccaactaaatattgtgttgcctatcagcagctaaattagaattgttcctagttactgctaattttttttttgctgtgtcattctggttagttctttgtcctgcctctaaaactaactctctctctctctctctctctctctctctctctctctctctctcctcttctctcgcccctagtgctggaactttgcctgttaccttccgttgcttggaagataatctagggattgacaagcgtgtgaccagattcgtcctcccagtcggagcaaccattaacatggatggcacagccctttacgaggctgtggcagccatcttcatagcccaaatgaatggggtcatcttggatggaggtcagattgtgactgtaaggtgagtgacgtgcatgcagaggacacagagacatccggctcccccagtcccactccataccaccctcacttgacagaagctccttgagtttcagctctagtgagaacacagtgaaggaattactgacagacttcaaagggaggaggttgtagcaggaaggaaagggagtctgtcccatctgtatgtattgcacatgcccactggcgcccagatcccgtttgactgttaacagtcctataaatttggccgtacagttatttctatgcttatccaacacacaaggttggaagtattgtggtttatccaaggctactcatgagctggcatggcatggctgtagctgtggtgacttttacttattctgggcccaattagtctgttattaaaatattgtaggtgagagagttcagtggatgaaaggtgcttgccaccagacgttaaccctgaggccctacataatggaaaaagacaactacctcttaagttgtcctctggtccctatacatgtactgtataaacacctagacatgccaaattaatatttaaaacatgctgctttcactattccaaggtacatggtgaactacaaagattcctcagtacagcatagattagttgagtgaatacttttttgtaaataagtggtacacggctctgctttcactgaagcttttatttactctctggctttatttttttttttaattgagaacattgtccggagagctcatctaaaacgagctgtttcaccacagactcagatcttatttgtagtcattgaacgcttcagtctccaaaccgctcagtgttgcactgacactgtaccataaggtcattttagtatcgccatatctactccaattaggagcttctggtaaatcagaagacagtttctgcctctaattaaagtagaagaaaaacaaagcaaaacaaacaaacaaacaaacaaaacagttaactacctcctggtcccacttacatctcacccccactcccagagtatcaaagtcctcatctacaaatgaggaaggtctttagcactggggactgtgaagtggcagttggtggggctgaagcaagccagagccttactgtttgctctgtaatatgctgtaaaatcattagaacgttaatgtcttctaagacaggtgttctccatttactgactacccctgctccttatcacccagacttagcctggtcacctactatcaactgcctgtcgctttaaaacataaagttatagctttgggatgctgtgaactacgtttcctttctctctcacattctatgagatcagtaaatacaaaggataggtggatcacagtctgtgtaatcaatgtacttgctggcaaaagaaaattccaaagaactataataatcccggccccactgatttactcagagaacagattaggttgacagggaaataactttcagtttctcaaatgagaacagttccagtcctctggcgcccctgagctggcattcttcatggctcccttcagacattcccagcagtctgaaaaggaaggatggccattgtcctcatttcaaggaacactaatacaagcctacgggtgtttgtgtgcaagacctagttttcagggttgtcgatgccatagaccggagtcacatgatgattccttaggcaacatctttccattttgtactctttccttcctgactttaactcaacggaagctcttagaataacagctttattggtcttatctgcattgtacatgaggaagaggccatgtgtccagattcatatagaggccttttcctcccatcaaaccctgaacagcacggtcctcctctgctttagacattctgctgacagccggtgtgtgtctgtctggcccacaactgatgtaccagttcattctcagggaggtctttagtgatcttagggtcaccttaggtgctgctcataagagatgccgttcatttctttctgatttctctacatgttgaggttattggcactgggaactgaaattctcagtgttttatgagttaataccctagagcatctgccctgtcagagctgtgcctcctttatctatctgggagccttttagccagcttggagctatttttgctgggttaccagttccttcctgatagccattccagaagatttttaatgagcattccatacacatcagagcttggccgtacaactaagtaagaaaacaaagaaaatgaaacctcgccagatttaacacatgatctggaaatacaaataatgccctgtgaagccacctcacctggcaaatgaggacaccaagactcagagagtccagccatttagaagctggctaaaattcaggtccccgaattctgatatattcttctgcttactgaggatcttaatgtgtggcctttggggtgtctttagaaaaatgggtactgtgttctgtctatcttagctggtgataaaaaaataaaaccataaaggaagaaaaagcttgcccaagatcatgtctattagtggtgcagtaggattcaaacccaggctacctaaatgtgggccacactgcctctggtataatgcgattgggctgcctttgtatgttgattgatctgaccttcacaaacacctcgtattgtatatgctagagtagaacctccatctcctcatgtgtaccatggcaacagcaatcacagaattggggtggttaggagcatcatacatgacacatatcacatatcagtagatgggagctattggaattgttcctacccagtgacgttcagtaaaatataaccgtggtcctgtaatacgaaatgagaaagcagctgtgacacagggagtgccacaagttactcaggatggaaaacttgcttcagattccagtatgaagcatgaatcttgtccaaacacatatcacatgagacttccaacttcccactcatcaaaactcttgacttaatgaagctgttggcaaagtaatgatagctttatgtcctttcattcttggccctgacagcaatcaggcttaccctccagtgcacaatgggattagaatcagagcagtgactgcaagaccggtatttcactgatattacagaattccatttacttgtaatttatttcatattaacaatgctactgttgtgaaatttcatgagcaaaggataaggttgactacatatgtttaagtctttgcttctgaataaacttagccaaaatctccttaatttttagaaatatgaaagtttggcttacataggcacctgcatggcatatgcacagttctctgcctgcaatgtatttggggaaaaatagccaagtctagctttatgctgtgctattgtgtgaatcctaattctctcttctccctcatgtaggagtacaatgaccaagaactttctgtatatttattaagttatagagcttccagggtcatcaagagccagcatgtagcagaagcaaacagaggggtgttcaaatcccagaagaccacattgaatttgtgtgaccctaagttacctgatccatggaatcgctggttgtctcatggtgaaagaagctgtttatgtgccttgcgtggttactgtgaggttctgctttgatgttgtgtacacagagcttggcacaacctccagcaaccagcctcgagagaagccagccaggggagtggactcccagacaaagcagaatgggtcaagggaccaggagaaggctgagaattttctagataatactgtccataagggggggggggttactaatatttgactcctaacaagatttttcacagtgcttgtaagagtgactcatgaccagagcaacccagattgtaaacaaaacagccaaggctaaggatgactggaacctgggaatccccacttcctttctgtcctgtcaatactggggacgggctgaagagtctttgctgtctgggactttagggaagtttcactcccacagctgtctcaccttgtcctcaagtgcccgataagaatgatagattacttggcttgagggttgtaatgtgccctacctctcttaagtgcccatgtacttattggttcctaaatgccgccggccactacatgaaagagaaaccctcatttatcctttcaaccggtgaggaagtcaggatacagttgcccaaattttgtatgttgttgacaagtggtagagctaggatttgaatttagattgtttaagttcaaaaagctgctacacactgtatctgctgtctcatatggagttctatgaaatataccagctccatactggtgtgacaggcacagacatgatcactggtgtgacaggaaagggcacagacatgttctgtattgtatgtatgtagacatgcaataaacccgaaaggggtagcaaaatacaccaaacatcccagtcccttggagctccagggacctccaaattgttctcagttacaagtcttgggattctaggctgggccacactgatggcctgacttggccaaaccctcccatgagcctggagtgcttgctctagaaatattttaatgttttaactacaaagcaggcaaccctcattgtttcagcacatacaaagtcacatgagagacctattttcagaagactgttctattcagaagcgacagctctggatatcaggatatggcttacttgtcaatcacaagctagattccaaaacccacataaaaatactaggtatggaaacaagtgtgtttagtgctaacatggagagtgaagaaacaggcagatgcctagcagacagctgccagctggtgagctctaacccaatgagaaattctgcctcaaagagggtggattgtatctaaaggtagcatcagagattgtcctctgacctctacagcatatatactcatatgttcatgtgcaccccaacatacatactcacaaacagttaacaaataaaaagaagaaatgattgcttctgtaaaataacctacgaagatgagaaaagtcactgccagttggtgatcctcagaaaccctttggtatgtagacaggacacctgaacccaagattaaactttaaactctggggaaagagttcaaaatggtcccaggtatgctcctaatattgcttgaaaagttgatgaaaagaaaagttgagaaatttttctttattccattaccattttatggcaccctctttctgaataatgcattttccagccttgggagaaatggccaggcaagtgaaaccgaatgtatcttggaatatgttgtttgcctcccctggtgagttggttctggatattttctattccaagttcccatgctaagcattggcaatgacctactcagactccggccacatagtctgaagaactgtgtggtacccacagactcatggaggcataaccagaattgaatgcagttgtgttcccataggaggggtgaggttgatttatttcttcatttttaatacttccgtatctgcttttagaactttacctgctttagtcctgtgtacattagactaactaggtatcatgccaaggatatgactccaatctgtgaatttataagtgcccctcattgttgaactcagttcctgggtattagtatttcatatttcttcattccctggagaaaaaaaggaagggatttttaatgtctggaggaaaattggaaggtgttgttgttgctgctgttttttaaaatatctctaagattgccaagactctttctcttcctgtaacctgggcttctctgtctttgcagccttacagccaccctggcgagcattggtgcagccagtattcccagcgccgggctggtcaccatgctcctcattctcacagctgtgggcctgccaacggaggatatcagtctgctggtggcggtggactggctgctgtaagtgcccgtgggttgggttcttctagggattgtgagtagggatccccaatattggggattccggggtgtacagttgacaagattgcaataagacagccaattctccacgttcccctcctctcccttctacaaaggttactatgtctacccaggaaagaactcaaaagtaatttgaggaccttgtaggctagtggaggaatcagacaaatcacaatacaacaataaaatgcagcaaagagaaggggcttgggatacagctcagttggtagagtgtttgcatagcactgtgtaaaccaggcagcatgattcacgtgtgtattcccagcactggggaggtgtagtgaagaatcaagatcatccttggcctcacagtgagttctgaggctaccctgggctatgtgaggccctgtctcaaaaaaaaaaaaaaagtagctgtaatgatccaactaatggtacatgcaaagaatctcaaaacatcctcctgagtgaatggagccaggcacaaaagaatgtgaatgtaagtaactgtgtctgcatgaagctctaggggaaaacactatagccacagcagtagaaagtgatcaggggtgcctggcatcgtggtacaaggaacactgaagaatggtggaaatgtcccacattcacaagtgtttatatttgttaaaacttgttacactgtgtttaaataaatgggcacattttaacatccataaatttcaattaagtaaagtgtattttaaggcaacatacagttaggagcacagggatggagagagttatctatgctagtctaagatggaagggtaaacagactatcagaaaacagtaaaagtggttgctgaattagagtgcacagtgtgtgaccgctcctataacaagctatactagtctgaaagtctgaaaatccccgtatcgtaggtcaggacattgagctttgactcaggaatgggcagagatttgaccctaggtcaacttggttctggattccatcacattcttgttcatggtcagattcaactttcagaagggaacaagaactgtgctcagacataagtgatgagaagcccagagccactgaggtggaagagaaacagtgcttccctgtcaagccagctgtgccaaggccctgggacagcaaacactgtggtgtctcttaagtaaaggaaggtgaggttagatggacaatacctttggaggccatgtcagggagcttgaatctgactgcatgcatttagtctgactgcatttcccagtgaagaacattttgtagtgtagaagattcatagcccgttcacaactgtgggaaagcctgcccagatcatccccaagcaacgagactaaaatagagctcctctaagggcccctgtgaggacactgctgtgccttgagactcgtgccaatgggtcatgcccactcttggagttaagtgacagagtgctggacagtgtcatggatcttaacatcagaggtacactgtgacaagtgtggacagagatagaatctctgtccacaatgcctgcacttcctttacaaagagccagtgttttgattagcataaattctaggaggaagaagccacattttatggatttatagttttaactcctccatacccctactcttccaaaaaaaaaatgcaactgaagggacataggacatgaggaatggctagaaggaagcctggcctctttatcttctgtgcctggtgttggtgcacgcagtggggaccaggtttggagcaaaaagaggctctgtggacaccatgtgttcaatcccccagggcatctggaaagctagggcacttcctggcttccttgttcatcatctgagctgtgttgtggagatgacttgattgatcatgttgtctctgccagcctctcacatcctggtggaaggtccttctctgataacttgcggttttgttttgttttgctttgtttttctgtgccctgagttggtaccaaaagaccatgccatctgctcagatgaggcagctatgagttagtggtgcaggtgggaaggacaaggagggagcaaaataaagaaaacaaaggtgtggctaaagatgaatgtgaaaagggatcaaggagaaagaaaagcatcaccagtgtctagggacaaaggatgtagagccagtctgctgaccgaccttaacctcagaagaaaggtgacaaaggaagttgtttaagttcacccccttcccctattacttgttgcttccattctctcccagttctgtgtctcttaaacctcctcaggtcctgctgtaaatctactgcctcatctcttcttggacttgtttctgaagcttgcaatccaccattagacctcatcttttcagggctgggtgggggcggggcgggaggatagctcacttagtaattgccttgcaagcctaaggacctgagttcagtctccaaaaaatagcaggagtgggccagcaagagggcttagtgagagaacccccttcacaaggttgtcctctgacttcagcatatgtgtggtggcacccacattcacacagactacacccacacacacacctgcacacacaggaacatatacacttgtgcttgtatgtgtgcacacaaatgcacacatgagaaatttaatctattaaatgtgcactggtgtagcattcctctcattataatcccagcatttctgagtggcaagaatgcagtcacttgatccagaactagggaaagacatggatatttggtaggcactgcagcatcttagcgtctgcttttcatttacccctgaagagctctgtggtatgtgggttagatgaggaaactgttaatcagaaaagtcagtatcttgcatggcgtggtggtgcccacctttaattccagcacttgggaggcagaggcaggtaatctctgtgagttcaaggtcagcctggtctacagatggaggtccaggatagccagggctacatagagaaactctatctcaataaaacaaacaaacaaacaaacaaagcaaccaaaccaaacaaaaagaatagcccgtgtgttgctttcattttaacagaattaacagaggtaggactttaagaactgcttgctccaggaagagtggtgctagtgccgtcacacctaccccctttcctcttgctttgtcctgttaccttctgccctatgatggcacagattggccaccccaggttctggtgcttttcacctatgacttctcagcctctataaatctaagacaatcaatttctgttctttatacattccagtctcgagtattttgttacagtacctcaaatggacaaagacatccctgattctatgtaataataaccagagacccttttatttgtgcttagtttatttttttttcctctaagattaaaatataaccagtaacctaaatagggaacaatgaagtaggatcaaagccttagggactcttaaaattcaagttctctagccccagcaagtctgccactgcagccctggatttcttggcagtctcctgctctcaagcctgttggaagaggattgcttcatgaaatattgaagaccttgcctacatctgacctaaatgttagcaaatgaaaaaggagggttgagtcctctcagatcacaccatgcagatgctcgcctgctcacagttgtgtagagaatggtgtcctttaagtctgtagtgtgccagcaggaaggagcagggtgagcaccactgatcactcccccccaccccaatgatccatcagaattaatttccctaacaaaaccacacaaggaaacaaaccaaaacaacaaaaacaaacaaacaaacaaccagtcctgagctggaatgggaaagaagaggaccaatgaaaagctttttctaattctaagacttagaggggctgaggccatgtgatcaagaagggaaggagggctgggtgttggtggcgcactcctttaatcccagcactcaggaggcagaggcaggcagatttctgagtttgagcccagcctggtctacagagtgagttccaggacagagaaaccctgtttcgaaaacaaccaaaaaaaaaaaaaaaaaaaaaaaagaagggaggaagcatgggggatcttgggtagatggacatcgggtgtggattaggtctgctttgaatcagtaccgatcccaccttcttccataccagtgagagttctagaaacaagcgcttgagcttgctaaactccatggctttgatgtccactggtgtgtaagtgggaatggggctaggttgagatatgagtgaaagacaaggctggctgttcttcagaaaagtagttgatgacagaagagtagaaagaaagagagtagggtaagttttttcctctttaggcaaagtctgtaagcttttcataacactagcaatttttccatttaaaaccaaacagaggccacagtgacatttagtgtgtcacaatgtttgccaactgctagagtctagtcttattacagcccactcagccctagattccttgtctgtaaatgtcatggtgaaaaacctagattctagagcatttcacatgcccaagtcctgaagtatgggaaaggcagccatggttaatacttagcccggctcctgaaaccctttgtatcaaaactcagatctttataagaaactgtaggaagataatgaggggagtccaaaggaaaactgaaataaaactgatgccagagacagataatgaatccctgggcccatcaagatccaaaaaggaaaagccacacacagtgatagcatcgtggatgtgtggtccacttctcatatgacactcttagggagatctttcctggactcgtgtttgccaagtaagggtaggtataactgtgttagtgctcctctctggagggagcacagctctgatcctcaaactgagtctgcagtcattctgatgtggacccaggaggtctacagaacagacatttgtaccaggttcccaggtggtgctggtggtagagtccaggaatcttaattctgggagactgagctggatggagtatggaaggagtgtctggtcagcccgaatctggtgatctaagcatctgtattgagtgactattgccagtttatacagccattcaatgaaattgcattgtaagggagttgagtgctagatattattctgatcacttagcactgattcatttaaaagttacagcaaattataagaaatctaatagtacatgccctatgtagttgtaacggagaggtgtgatttatcatttttaataactattaaatgagcaatatataattcaaatagtaacaacttggatatttcttaagtattgtaggagtgagaagataggttctctgatccttatttaatccatgtgcaaatgtcttaaatacacccacataaatacatgtgctcacgcatactcgcacaccacaccactgccgcctccacactacatccaaaacttacttagcttccactctattcctgatggaaaaggaaaccaactcccacatccactgtctctctgaagactctagaagctttgtgtttatgtcattctttggattttattcttaatgcatacagatttctcctttttatcttatctccgatgtatatcagtcactgtggaatgcgatccacacttcaccaagccttccccttccaacccgtgggcctctggcccaaggcaaggcaatcatagatccagagggtaggtggatgcctcagtctgaccagcaacgctatctttaatctgtcacaaaaagctaaagggagtcagagaatgaaatggaaagtctcttacctgcagttgagtcttagtgttctctgaaccctaaatttatagttaggatatatcagcatagaaatttttttttaaaaagcacttttgttttatttttatttatgtccatgggtctctgtgtagggatgtgcatgtgagtgtggtttcctggtccagaagagggttttagttgtgagctacctcctgtggatgctgagaatcaaactcaggtcctttgcaaagaacaatacaggcctgtaactgcggagcctgccccagcaatggaaactgtaatcctggggatctcttcctctaaaactcaactttgtaatgtttgaagatcacctcttaaaaccttccctccctcaacttgaccatttcgagtctttttgtcttgccaagtcctcttgctcttcttgttgagtctcttcccagatcttggttcacctctttcagtctggattctatgactctctcctcttggagatgatgcttgcatctttgcttttcactgtgcaaagcctgccatatgttttgctaaacaaacaaccctttctttctctttagtttatctgcttctaatccaaatgaaggatccattctgttcttgctcctgctcctatctatctcccaagtcttccagcctgctccaggctgcaccgaatgctcacaactctctctggtttctgtgttctcagacttaaccaagtgtgatagaaaccatcttttaataatgcatctgatccattcatgtacagatacttttgtcttatgagtctacccaaaacaatacagcacaggtgcttacatagtgtccccactgtaatggggactgagagtgatctagaggcgatttaagagatgcctgaagggtagaagcaaatgttaggacatttggtgcatggggcttgagcatctgtggctttggatatctgtgggaggtcctgaagccaatcttccatagaaactataaaacatgatttctgtattcaaagagcatgcacaggagtaaagaactttcaaaacaacaaccagatgttgtgtgctcaagaaatcccagcagtgctagttgaaaagtgaggagtgtgcatctggtgagggaaatgaagaagtgaactccccacttggctaataatagcaatcccttgagcagttaaagaaatggagcttgttttgtgcctcaccagcctttcatatgcaaagggttttgtgtggagcctctgggcagttattatcttcccctcaggtgagtgttgttctgattctgacaaatgagaactctgcgtaggaagagctaactaacctgcctgttaaagccatgagcgtatcccaggctggaatccaatctcatcataaccaacagtcaggtgattttagcactccaatgccagccgtccccagggtaggaaccctaggtgaccagttgctgccacacagggctcgtaaagagagtacctcactctggcaccctgtcctctgagaatgtgcattatgctttgactctacttggttaagttctgacactcggagcatttggttcttttacatctgcaacaatgatcatcattaggatttagcacatgacaaagacccagatgaactgtgagtgacccagactttctgtgagaactcagacctacagacagtctctcacctccctgccagaggactcagaccaagagaagaaaagagccagactaccttggcagttcgttcttcaaggaagccagacccagtgactggtgtgaagggttgttcagctccctcttggttttggttcctgccagcccagaaagaagagctgagccatttatagtggattcattagatgcaagcttctgcttccaactccttgactttcctgccatcctggcagacagaatcccagaggcagcatcaacaaatctattcctttttctttttatcatttcttctttcactctctttccttccttctcttctcctcctctttttcttccttttcgtctcaatctcccccacccctgcaaccccctgtttctctctctactactgaggtcatcatgaaagttagactttccccagagatctggagtaacaatgatagaaagtgaaagttatttgcttatggaaaagtttccacatatgaaatagaaattctcatattcttcttggggtcaaagttgtactttcctcgagccagtaagacgtttccctggtagtttagaagtttcttgtctttgcagtattttcggggggggggatataactagaatatccatgattgatcttctgactggacaacttgggaattttcccaggatgcataatgacagaggagggtggcaggatggggcttgatctcagttggattcttgctgtttgacatacatgtcatcttttgatgtatgccaactcctgaggaaccctcttccataaactttccctctgccccttctcttctatagtgataaaattgagtcccctgccaaattatgactgtcactgcacttcagatgccatcctctcaaatctgtccaggaggcattgccagagatcatcattgtttctctgaccctttagtcctgtcttttcaatgggcttcctttcatatttagtcaccgtcacaaatttcaaaataaacacagcacagaaatccctttccatattctctgcctctgtcgtcagctgttctttcctttcctttcctttcctttcctttcctttcctttcctttcctttcctttcctttcctttcctttccttcttggaagaggtgatttatatagacatccatagtgtttctatgactcctcacaactgttacccaacttgcaagagccaggttctgtccttacaaactgctctctgtggatcaacaacagtctctttgttactaaaacttacgcatacttctatttttttctaaggactcaaggggataattggtattgtctgccacactctgcctattatagcagttggagtgaaaatagggttaatgttttcagagggagacagtagctgaactagtcatgtttggatgtgttgcctagaaactgccaaaatacatttgaattggctggataaaacttatagtaatactatatgtacctcataatcagtgtaaatagctttcttaagtgggttttagcaagtgcttgaaactgtggtaagcattttgtttatattgttttcctgccataacaaccctgtgcgctggccatgtttgttgtttcatttttgagaaggtcccttgtctgctcagaccttctagcaggtaagggacaaaactcaaacttgcatctgagccaggcagcctcgggagtccatcccttgactctttcccactgtggtgctatgggtaaaacccgagtccttgcacatactagataactcctttttctctgagctacatcccaaccatttatttctgctgatatacataaaattatgtgtataattttatgttttaaaacacaaaactcacaattatatatattagaggtaccccataatatcttgatgcgtgtgtagtgctttaattgtgttaaatatgtatgtcttctcaggagcaatttctatacgatgaaaactccccacattcttcttttatctttgaggtgtacagaacatttctggtgtccttgtgaccgtgatgtgcactagcaccctgggctttcttactcccatctgagtgtgtaacaccttgtcttaatgcctgccctttttgtacacttatgctgggggtggggtggggggttcttaaccatcagctccaagtgatatagatgtcctcaggcctaattcttcattcaggtgaagactccaccacccctcacctcagccannnnnnnnnnnnnnnnnnnnatcccaaccatttatttctgctgatatacataaaattatgtgtataattttatgttttaaaacacaaaactcacaattatatatattagaggtaccccataatatcttgatgcgtgtgtagtgctttaattgtgttaaatatgtatgtcttctcaggagcaatttctatacgatgaaaactccccacattcttcttttatctttgaggtgtacagaacatttctggtgtccttgtgaccgtgatgtgcactagcaccctgggctttcttactcccatctgagtgtgtaacaccttgtcttaatgcctgccctttttgtacacttatgctgggggtggggtggggggattaaacatgcaaacgacattctcgatcaatgcaaaaaaagtagatgaataagaaaagagtaggtggggtgagcggctccgtgtcccgcggccgaggagtaaaccattttggcctggtttcagggggaatggcccttgttgcccccgcgctcacttctccgccgcctcgggaccgcaggcgaaaaatagcacgcgggttgccccaccctgcacccgcggcgggtcggggctggcttgtcccagctgaccccgccgcgaagccctccgagctatgcgcagctcgtccctcgtgcctcggcggccgctggcccgcgcggcccctgcggagaagccccacacttccctactgcgactactccgcagcgacgctcttgcctctctcccgtctcggtaacctttggtatgtgctcagtcaatcaccggatacggcgtttgctcgggcacacaccagcccccgccctataggcttgcaagtccgggcgggtgctcagcacacacgccgcgcccagagccccgccgagcagccacgcggccgtacgccgacgcctatcgctcactcgggcggcccgagatccgacgcccgagtagcatgctaccgcgtttgcgtacgttaattgtatccgccgtgctggctactctcatatgcatgcgtaccacgtaaccccggccccgctcaatgcataccacccaacgtcctccgtgcctcccgaccgcccgacagacggcacccctatcagcgnnnnnnnnnnnnnnnnnnnnctcccgtgggggtgggggggttcttaaccatcagctccaagtgatatagatgtcctcaggcctaattcttcattcaggtgaagactccaccacccctcacctcagccagattctcgagtgcagaagagggactcagtgcattcaaaggcagaggcacacccaagagttcaagttcagctctgatcacttgacacccaccccaccaccagcaccatgggcatacttgcctggttgaaatcaggacctctggacttataagggagccacaccaagctcctcctagtgcagcttcattattcccacttcctaatgacaggtagatttcatcacaacaactaggctttattttaggtcattgtcttaattttaaaatcaacatttccactctgtgacttaatcttagtcatagaatttgaatgaaaggggagtgtcctcactaatgctctcctagtaatagcattaccccatctcctgtctcttctctgcacatttacttacttgtttactgacttacctctctagtggctttccagctcatttatgggtagaactttggaggtgtaggaaatgtcatcagaggctccttcaacaaaccagcttatgctccccaatgggaaagcgcagctacctttaagaatgtagtgagctttcctggtgatgattttctaagatgagtttttgttttgttttgttttgttttgtattgtattttattaacaaccactttttttttccaatacagaatttgtaacctaagtcacgaggaggagggaaaatactctggatacttgctggttctagcagcactctgaaatattcttcttaggttcatagaaagggcaatttctaacgcaacctttgtttttcatctttagggatagaatgagaacttcagtcaatgtggtgggcgattcttttggggctgggattgtctatcacctttccaagtctgagctggacaccattgactcccaacaccgaatgcaggaagacatcgaaatgaccaagacgcagtccatttacgacgacaagaaccacagggaaagcaactctaatcagtgtgtctatgccgcacacaactctgtcgtaatagatgagtgcaaggtacctttcccattcctggatatcgagacctgcatatgaatagtgcatgctggactccttaaaaaaaaatcacaaccccttgcatccattcttaccatgctttgtaaggaatcatgtcacccaagctcctgtggggcccagaccatctcactctgcatccagcatggtgggacatcagcaagtctgacaccaaaaggaccaatcagttgcttacttcaacagattcccacatccacctcacccctctaatttggtcaatattcttcactctttgggccaagaattggtggttgtcagaactttaatggccttcagatattctcttcctcaaaggaagggtcagaaaaatgtagaccaaatattattgactttatatagcatgagtattcctccctactctgtattacaaattgcttttttaaaagctcatataaaagtttaattggctgtcttccttttattttttatttttaaattataattatttatttttttcttaggaggataagttgtagttcagcttttattttgcatcccaaatgggtatgcagtttcaagaataattgtcctccaaaacagttatccagaaagttttttttttttttttttttttttaatgctaagtatcacacactccagttctcctgcagtgtgggtgttctgggttttccttcaagctgttgggtgccaagtcttcaaggttgatcggctctagctggccttcactgtaactaacttgacattgacaaagacagtgtcatgaccagagtgatgcaaacttggagaaaccctggcagatgggagaagggttagcttgctaaatgactgagtgtattagctgaggccagtttgaatctgtagcaatcccgtctacctttttttatggctgaggatacaatcacatttaatctttcttccttaagtcttgagtccaagtagcaccgttgtttctgccagagagttacagctaactgtcccatcttcttgactgtataccataggtccagagtactaatggaccagagagtcttgcttgcgctcactatatcaagtacatgtgcaggagagccagagcttggctacaaactggggcattagactatttttaattaattaattggcaagacaaaaatgatttccttttaaaaaatttcagatatgcgtttggggctattgtccatcttctagaaacattactgcttttcacattcaagtaaatgggttaagttcctttccacagaaatgttagtttggattaataagggtcaccattctcatggaatgacttttatcttatatttatcaagtatttattgtgtgccttgtatgatttactggtgtgtcctcacccttccccgtggcatccgtgttttgatcattctccaggtatttagtgcttatagctatagaaccctgacttatatactggagttatacaaacaagaatatgcagcataatacaagaaagaaggtcctacctcagatcgttgtcatgtaaggaagcataggatgtgacaaagtagagtcaccataattattttttttgttgtttcacagttatgtgtaaaaagaatcctaatcaatgctgggagcttcttggggcagggggagcttctcaaatggcttcttaagactttggagagagtttttaaaaagtacagtatagagggaaggagatggttttggacttcagacttactacttttcatttcttaaggattgcaagagtatttactatgtgtttaaagcaaaattttgcaagctatagatggagaaatgtaggctctgtcagtataaatcaagccagtcaacagtgctcttggtcttggctcatcatcatgtccaactcctcaaacagtgtctaggctgttgtaggcactcaataaatatttgttgaataaaacccactagcattgtgattccatgccgtgcttatatagccttcttttgattggactatagagctagtagttcagtttctccatacaactgactacccaatcaacctcctgcatccttgtagagtaattagcacttagatggtcaatattcaatctgagcatgctgttaggataacggatctgggtatactggttctataaatatcttagaggtttgtgttgttagttaggtgattgcctttagctctttgaaggggaccctagccccaggcttctcactcttgagtcagctacctgtgtggtcactgatgtagaaggcagggagagctatgtgcttaaatgacccttttcctaagtatctggctcacatgtgttcatttctttggacttctttctagttaactctcaccaccaccactttttcggtccagtttttagagcccagcaagaagagcatcaatgctccttgccaaggccctacccttgactgaacaagacagggatagaatgggttagaaggtggcttccagcttttttggttcagcaaaggttcaactacctttgaaatataggtcccaatatttacaaacaaaaagcaaacatctcccacatgctgtctggttcttccaggataccacattatgattgatagctgtgcactgccattgatgagattaatcattaagagccaaataggcacattcaaggccacaaggaataggcagatttctccagtccgtccctggtagtttttcttgacattttattgaaggggaaaccagtttgctgcagctctggtcaaaactactttcaagcattgttatgtcatgctggtgtcttcataaccgtagtttggagttttgcaatagccttttaattctcctttaagtaacagcatgtgagccatcactgctaattgcatggactttctaagtgtttgggcagggtggggagcatgtactaatgtgaattggatgaatgaatagtgtttttattttcattgcatggttcgtgaagggcacctggttctctgttcccagcatgctgcatgctcttgatgcatgcatttcattcccacttgggtaaaaaggaggtccgatttctttcaaactttgctgcatttgtcatgtctccatatcctaatgcttccataaatccagtctcttcattatgtggaatatcagtcgtgggtttaagtttgcacatgaccttgaggacagacagacagaaggtaagctaggaaacctgcttagaagtggatgggagaacttccctcctgcataaaggttcagtttgctctgggccagagaaacagaatgtaattataggttcccaaatatctacatcaaaatgatgtggaatgcattgctactgatccctccacttccaaacatttcccgttttaatttctaaagccaagaagacttattcagtaaagccaaaacatcataaagtcagtaatcaagactgaacatgtatgaaattcccctagcctcactgtgactgaaccttttacatgcatgagtagaagtagctgcctaattctggattgctttctgtatggttgtatggagtagcacatggcactcactgtattttaaggactacagtggtatgtgatgggtctttgggtagtgatatattctacaatcctaaaaatgttgttgaagatgtccctaaactgctgagaatccgtgatctttcaggcaaatatggataattcaactctccattcagtaatgaaaatcaagatgggttcaaaactaattttgaaggaataccatttaaaactatggtttccccatacactgtaagcttggatctggtgcttctccacatgacccatgggaggtgtttcttgtggttcgtggcctgtaagttggatgttgatggtaattgttttcaggtaactctggcggccaatggaaagtcagctgactgcagtgttgaggaagaaccttggaaacgtgaaaaataatgacccgattctcagccaattcttgaataaactccccagcgtatcttatggtaaaagatgctctctaaacaggcttcctttacaaaaggaaaagatgcatatgtttctatgtttacttaatctgttagctgaggcatagaggagctgtgtacacccgtgatgataggcaccgtgctgtgtctttgccaaataatgctttataactgtctaattttcttacttgtgttattgtttgaatggacgctgctggagaaactactttgaatggaagacgtgttcttgccagcttccttttgtctcagtgcaacactgtggatgctattttttttccaaggggacaggatgaaagcagtgtggtaccctccagggacttaagacaacgagcacacatgtgctgtcttccttaaagtgttcatggctcaccttgttctacacaaaagattctgcttgaagcttctagaattacctcccctccagcctgtagagagttggcacctacattgattgaaagcatctgcctgggggaactctgacaacttacctttttgtgcactgtctaagtagaatgtttcagagtttcatgggtgcccatactctgaaatgcaggtgaccataaaggccacagctctgcctttctgtgtgtgtgtgtgtgtgtgtgtgtgtgtgtgtgtgtgtgtgtgtgagagagagagagagagagagagagagagagagagagagagagatgtgtgtgtgtgaaaaatgtgaaatttcaaatttgaaaatgatctaggaatcatttgcatattaccactgtataccttgaggaaagtgaaggagcatagtcaacttgaattttagtcagaattaaatattccaattctcttgtttgacttgcattcgtagagcatattgaactcaagtgtgatgatctgatctggttttttgttccacccatagattctcacttgagttcctcaccgaaagatatttctaacacccaagtcacttccatcacatccttgtctgcttatatggctgagcacttcagcttcctcacattaagagacacacgttggctatgactcttttcctatcatcctggtatatatctaatatgtagaaagtgtttgttatattaaagcacatgaaaaatatcacaaaacacaaaagttctttggtgagaagggaacagaaaccacacatgtatataaaatcctataaaggttcctatgacagaggccaggcagcctcaaaccatcagatggggaccaagaacggctctacacaactttccagatagaatcctttccggggactgtgaaagtctgaaggaataaataatataattggcacagcatgagggtttgcctgtggtaggcagccaacgaatccttaatgatgggttgtgcaagctaaaattgtggatgtctctattattatcttctgttgaagaatgcacagtattttcctaagatcctgggtttaacggttagcggggaactggaaccactgaaaaacaaaacaaattcaacttgaaggagtgtcggaacccaagccatcagtcagggcatgtgtgtcctctgaagcaggcagagctgaggagacgttcataagcagtaataggacccattgcctctgaagaagggcacggggccatcgtttctcctcttagcccctcttgtgacttctctccttcaaatcagacagctcagacacatacaaaagacaagagattcctgttgctttatctcatgaaccctaactgtttttaaacaaggatcactattgagcagtattaaatgaattagtttgttctgtttcaggttttgacttttgaaacaaggtctttttatgtagcccagaatggcttcaaactctcacacctactgctcagcctcggttctaagatcacaggtgggcaccactgcatcggctggcagaactcttgtttatacttttctgagagacagtgaacagggtagcagtgaccagctgtgaaaccctgaaggaagacaagaagggccaaagggattctgctcagctgtggaactattctagatagcctgtaagtggtaccccagggctctcctatgctgagtagatgtatctaggcaaggcatcaggagcatgctgggttttgctgtgttggggagggaaaggccattccatacaatgagtctccccatacaagaagaaacaaggccacgtgggtacttgaacattgctcttttcttaaaagcactcacaggatgacagtgtttgtcatctcagattctgcctgaaaatctttctaatttgttttatcttcaccaccccccccccagcagtcctgttagcttatgtaaagaagacagagctttcaggagaacaaaggcacattatttctcaagtcaggttttgctgactacatatgctgtctcaagagaatatgctagggaaatcacatttactgaaaatttaataatttttatttaaaataaataatttatcaaattggagacttccctaagaaatctagaatgtgatggaattgacatagtactgtgtcttgcttttgtaagccttgttaaccctttccatgcccattggagattcccttgcctagaaaaggtgcaggaagctgaagaaaaaaaaaaacagatacagagtgtgttctagtagccttagtctaaatagggtacctgtcaccgtgtgtgtattaatagagccatcgtagatctgaatgtccataatgatgattaatcttttatgtgtagttctctctctgcctctgtctctgtctctccctttcatatgcacacacacacacacacacacacacacacacacacacagaacatgtgtgtcacatacactaactccaggaaccagggaggtttgtgtattggggctttggcagtgctattcctgtaacggattcagttaatacttacaaagaatcaaaatcatttcagaaaaaacaaacaagtgagcagacgttcatcttccctgtctcgtcctttccctataagaagtaagacaaatcatcattttattaactgctgagtaaaactcaacaaagtcaattcagccagtgaacagcatggttgtttcgaaggtaaaatttcactgtgggcttctgagggtggcgggacaccagagaatccaggcagccatcaggacctaagcacacaaaacctcagtaaaggcctgtaggtgattttaggaccatgagatcactactgatttggtttttgagcttttttttggggggggggtggtaataaaagcctgtgtggcctcattgcctgtggaaagttttatgttctataaaagacagctagccttttctcctcactagtcactagttagttcggacatttacagagcaaaggaaggactccagaatgtctccagatgaaaacgaagaaagcacggaactgtgtatgaggaattcagtttatggatcagtccctgctgggggatgctgggatctcagtggttcgctgattagggtcaactatggctagaaaatcatggcacatagaagtgcacgtagtcagacacccttcagagagttgaaaggcctcagaagaaaacccaaccctgccttgctgctgtgagtaatcttccctttgttctccgaagtaaaatcttattataatgttcacttttgtcagggtctaggctcttgcctatgcattattttcctcatgcaacaaagcaataaacccaagtaggtattcgcatgctcaggctccgataaacaagccggagcagctcaggcctcctttgatgactaaaatggcagtggttacaaccccggggcaacctgcccggtttgctgctctctttaaggaccaatctgtctgccctgcttttttttttttttcttttctgcttattctgcagctgaactcatgatctatcaggcaggacgaaggaccagatgggattttctagtactgggatactttcagggcttcagggtccaagggtcttaaggagataaggttagcgtctgaagcaagggtttcctaaaccaagttgtcacttgaagattcatggtcaccgcatctacagtagtctctggttaaacccaaaagaaggattactgagtgccaacccagccaggtggcaactgtgacagctaattttccgtgggtggagtgagataaagtctcatcaagaacaccaaccagcttaggattttccctaaaactctcttcccagttcactgccctcgcccttccctttcctttcgtttcattgcttaagagactgcttagtaagtggccaaatagttaagagggggttggcttggaagcagataacaggagatcttaactatcagtaatagccagtctcaccgcctcacaccataatcaggcaatgacacagagatgtttaaaaacaacgtggcttgggagaggaaacatttgattaagacactccccatctgtagctgtaaggctcacacagccactgtgtgcccaggtttcttgcacttccttctgaaatgagaaggaactggaccaactgcagttttctaatctccttccatcttactgttctcaaacatgacttatttatattgtaagtttgaaagacacacaaaatgaatattcaatttaggtgtttccttgtccatgatgagaaaactccaactcaagcttccattcattccatactttacaagcttggagagtggccacagtaacccagtttccagcattcagacatcagtaaatatcctttggttaaaatccctattccccaaactcactgttctcacggaagtggtgattttgctcagggaaatgttctgcaacatcaccgtgagggaccagacacctggagtctgaattttgagttcttgcatcatacctgctgtagcaacagagcccactccaaattctcagcccacatcattttccccaaacagtcctaattgccaaccctgtgtgggaatttgggagcctctggcaaacaagcttgaacactcctgacatttggtgcaagatttacacaacagcaactgtctccacacacctttcccgccaagtacatgcagacgtatacatccattctgcgccttcccccacccccgcccccacccccgccccctggagagaggatttgattgatttcattagaaagttctcctcttgatttacatgcataacagacagcacatcattgggagagatgctgtcacttataagaacggagttttcccatttgccccatgtccgtccatgttcacagagtgtctaagtcattacagcagagagggtggctgcacctaaccttccctggttctgtataaaaggtcatagcttgcattttttgctctctgaccaaatttcaaccagagttaaatggatgtatttagtgtggtgaacatcttcattgccagaaaagatttcagctcttcaaatttgagggagtatagccagttgggaaagggctaattattgttagtggtgatggtggttgggtttttttctcctctcaaggtgacagaagatctatggtgagagcagaaagatgtttcttaattgacctacttaaggtcactgcagaaaagggggagaagtccagaaggtcctgggagattgggttcacactaacactctgaatcatttctgatcagtttttttttttttttctatgctgaatcttgtcttatcctatgatccagttaccagttttggtatttttaagtctttctcattgtattttggggaatttttaggctgagaataaaatctactattggaacagacctgtgctctgcagaggcatcacgtgacccagacaacgggtggcagaatatctgggttcccctggagacacccccaacccctgggtgagctttagaacctaacaacagactgttatccttatcaccatcctctgggacatgggggatgatgcagtcagagccttgctacttctgggctttgtttctctctatggcaaccattttatcctgcctggaaatggcttcctgccctacgtggagagcaggcacacttacagccaaggaagtggtcaaacagatccctaagttctctccatgctacaacaaattccctaatacacacaaccagaaactcagctcctgggtggcttagtacccacaaggtcactttcctgttctaagagccttcggtatccagattcttctacaaaccacctcaactctttcctctttcttccctcctccataaaatctcagcatcccacccccacattgcacaacagtgatcagatcagctggtcactatagagatttgtatatattaaaacaaacctactttttggagaattttttgtatattcttttctatttgttttctacaaattgaggacagagctggcaaactgtgaatctaattttatcttgatgccagcagatatattttagcttcctggtatgaatctatgttactagggacaccatatcaccctctgatcagtattgcacctccaatctacaaagttagtttggcccaatcttacattctctcttccacaaatccccaaatttctttgctattatttatacagagaatatttatagtcctggatattacaagttttaa

SEQ ID NO: 110 - DNA, 2127 bp, Mus musculus
cagaacttggaagccagtgcacttctacagctgagagaatggtcagtgccaacaatatgcccaagcaggtagaagtgcgcatgcatgacagccacctcagctccgatgagccaaagcaccgaaacctgggcatgcgcatgtgcgacaagctggggaaaaatctcctgctctcactgactgtgtttggtgtcatcctgggagcagtgtgtggcgggctgcttcgcttggcatcgcccatccaccctgatgtggtcatgttgatagccttcccgggggacatactcatgaggatgctgaagatgctcatcctccctcttatcatctccagtttaatcacagggttgtcaggcctggatgctaaagccagcggccgcctaggcacgagagctatggtgtattacatgtccacgaccatcattgccgccgtgctgggggtcatcctggtgttggccatccacccaggcaatcccaaactcaagaagcagctagggcccgggaagaagaacgacgaggtgtctagcctggatgccttcctggatctcattagaaatctcttcccggagaacctggtgcaagcctgtttccagcagattcagacagtgacaaagaaagttctggtggcacctccatctgaggaggccaataccaccaaggcggtcatctccatgttgaatgaaaccatgaacgaggcccctgaagaaactaagatcgttatcaagaagggcctggagttcaaggacgggatgaacgtcttaggtctgatcggattctttattgctttcggcattgccatggggaagatgggtgaacaggccaagctgatggtggagttcttcaacattctgaatgagatcgtgatgaagttagtgatcatgatcatgtggtactcccctctgggtatcgcctgcttgatttgtgggaagatcatcgccatcaaggacttagaagtggttgctaggcagctggggatgtacatgatcaccgtgatcgtgggcctcatcattcacgggggcatctttctccccttgatttactttgtagtgaccagaaaaaatccattctccttttttgctggcatattccaagcctggatcactgctctgggaactgcttccagtgctggaactttgcctgttaccttccgttgcttggaagataatctagggattgacaagcgtgtgaccagattcgtcctcccagtcggagcaaccattaacatggatggcacagccctttacgaggctgtggcagccatcttcatagcccaaatgaatggggtcatcttggatggaggtcagattgtgactgtaagccttacagccaccctggcgagcattggtgcagccagtattcccagcgccgggctggtcaccatgctcctcattctcacagctgtgggcctgccaacggaggatatcagtctgctggtggcggtggactggctgctggatagaatgagaacttcagtcaatgtggtgggcgattcttttggggctgggattgtctatcacctttccaagtctgagctggacaccattgactcccaacaccgaatgcaggaagacatcgaaatgaccaagacgcagtccatttacgacgacaagaaccacagggaaagcaactctaatcagtgtgtctatgccgcacacaactctgtcgtaatagatgagtgcaaggtacctttcccattcctggatatcgagacctgcatatgaatagtgcatgctggactccttaaaaaaaaatcacaaccccttgcatccattcttaccatgctttgtaaggaatcatgtcacccaagctcctgtggggcccagaccatctcactctgcatccagcatggtgggacatcagcaagtctgacaccaaaaggaccaatcagttgcttacttcaacagattcccacatccacctcacccctctaatttggtcaatattcttcactctttgggccaagaattggtggttgtcagaactttaatggccttcagatattctcttcctcaaaggaagggtcagaaaaatgtagaccaaatattattgactttatatagcatgagtattcctccctactctgtattacaaattgcttttttaaaagctcatataaaagtttaattggctgtc

SEQ ID NO: 111 - protein, 570 aa, Mus musculus
ELGSQCTSTAERMVSANNMPKQVEVRMHDSHLSSDEPKHRNLGMRMCDKLGKNLLLSLTVFGVILGAVCGGLLRLASPIHPDVVMLIAFPGDILMRMLKMLILPLIISSLITGLSGLDAKASGRLGTRAMVYYMSTTIIAAVLGVILVLAIHPGNPKLKKQLGPGKKNDEVSSLDAFLDLIRNLFPENLVQACFQQIQTVTKKVLVAPPSEEANTTKAVISMLNETMNEAPEETKIVIKKGLEFKDGMNVLGLIGFFIAFGIAMGKMGEQAKLMVEFFNILNEIVMKLVIMIMWYSPLGIACLICGKIIAIKDLEVVARQLGMYMITVIVGLIIHGGIFLPLIYFVVTRKNPFSFFAGIFQAWITALGTASSAGTLPVTFRCLEDNLGIDKRVTRFVLPVGATINMDGTALYEAVAAIFIAQMNGVILDGGQIVTVSLTATLASIGAASIPSAGLVTMLLILTAVGLPTEDISLLVAVDWLLDRMRTSVNVVGDSFGAGIVYHLSKSELDTIDSQHRMQEDIEMTKTQSIYDDKNHRESNSNQCVYAAHNSVVIDECKVPFPFLDIETCI

SEQ ID NO: 112 - DNA, 188794 bp, Homo sapiens
ttgttcttgcgatagtttacagagaatgatggtttaacttcttttctaaagtgattttgggcaagtactaagcttctctacctcagcttcattatctggtaaattggcataataaaatcttgagattttactgtggtagctgtgacaattaagtgagatgttgtgtaaggcaacgaacataatacatggtatacctggcagggtcagggctcttcagctaggcacagctccacaactgcctcggtaggcactccacacatacgtgcccacagcctccatctcctgactgtgtcctgaccctctgcctggaatatcatgttctctacttctttttaacgctctctttactacttgtgttattttctcttcttgccttcctactcagatttggttcacatgtacatcatcttagctatgactctggccccttcagaagctgaatctggcctgaaattttggtaatgacatcccaggctgcttggttaatagctccgtggccatttgccaccacccctggatcttcctaccttagcactgctcttgtgggctatgaacactcgatcacactcacctaagactttgaggcaggcaaagaggatcacacacaagcttgtcccttggccatatctggctgctatcggaatgttgtccatctctttttgtaacatagcccttgcctcccagcatagaactccaaagctagaaatcttgagcatatataagtcaggggcttttcagagaatcagaacttttaacagtcctatggaataagggattacgataaacacacaaaattgtggccactgatggagaagtctgtgcaagactgttgcctttgtttctggtgttggacctaaaatcaatcaggccagtggtcaggaaggaaagctggatgtgaagtcagcaaagcaaggacaaatggaaaactgtgtttgtctcttgctgcctccagcctccatgatgtgagtgacttgtagtagaatcaggtgccctttgctcatagctgcacactcacccagtccgaactcagggaagccagaggaggatttccagcaggcattggaggagctgtgggcctgggtgctttctcaccccaacaagatgagctgacagatagtgacattacgtgtgagctgccacagtgtctgacgtgctcaaacaaatctcaaagcatgaaagtaggcattgcttccctctcctttccaaatctcatgtcaatttctcttgtgttcactctaacctggaaccatacagggaagggaattctgcaacctagtttcagtttccctaagttgacacagaacaaagcagtcacaaattatggaatactaatgctggaaaagtggctgtcaactgaggacaccttcagggagtgccagagaaggctcctgtttcatccagagtactttggttctgatttctttcgtgatgattgcttgtttttttaggtatccatgtagcccctgacatctgacattataccagctgggctttggtgcccaggagttgatctggcactcccaatgagactgcgatgctctcttgttgaagataaatactttcacagaatgccaatatctgtcagaattattctgtgactttgatggatcaagacccaaacaagaccacttcatatcttctgtaataacagacaaaagcaaggtgactatgcaaactacaaaggtgccaaatatccccttctcctcgttaatatgagtgactgctgcttcttcatcaattacagcggtaggctctttatagtcttttttccttttagataagatttattacatggccaattatagaattactcccacttcctgacagcatccaatccagaacaaagccccactttgaaacctaagatcacttaacagaaactcaaatcctgtaagtcctttctaacacactcttgatgaggcaccccttggttcaccatgatgtgcatcctacctcattgcaaggagcaaaaaaatcccacttgttcaattacaggtatgtttctagtggtctttggctggaaggcattgactatatatataatatatacgtatatataatatatatgtatattacaattacaatggcttgacttatgactttttgactttatgatagtatgaaataataaacaccggggactccaaaaggggctgggagtgagggttgaataattacctatttggtctcaaactcccgaactcaggcaatctgcctgccttggcctcccaaagtgctaggattacaggcgtgagccaccatgcctggcctgaatttgggtttttatgttgtcctaacctggacatgaatgaagaccttgagtctcattgcattgacacaactgcatgttgttctaacagagaattatcttaaatgatatcagatgagttaaaagaagaaagctgacagctaatggatgagccaaaggagtaagacacatatctttactcctgccttattttttctccttctttagtatgctatgaaaattttgagtgaaatactttggatccctagggcttggggaagtttatcttttcagggctattggaaagaacattttggagtagcttggtagcaatttgtggtctctccttgcttttcttggcagcaggacttgctttccctggcagagctctgcccggatgtgctgttgaggcccagcattttaagaagactgtctcaatggctgagttttttagggctcacttcacgtttgtattccaattcactgagtgtttatccagaggcttggaagaggtttgatggagagctttgtcaacaaagaaaaaaaagtcagtagataaaattagagaatagctttctcaggtgaggaatacattcaagactgaattcttggagaaaaacgaaccactgttatgttcctgaacttatggtttctaggaaaaagtaattccacacaagagagaaggaaagaatgatctttcttagtgcttaaatatgtgcaattcaggaaaagttgtttattttccattgaaaggggaacagggtgttacaaatgaagctgtgtccaggtgctaataaaatgaaacctcagagtgaactgggataacttccaattcactgcagttatgcaaaggcataatttagtcgtttagtctttgattaaaaaaaaccaacaactctgaatctgtaatctcaatttaaaactaaattacctggttgctatctctctctttctcttattaaggaaaatcactttataagaaaaatacttttgggatgtgatacacagcctttttcagaatgaccaaggaatttcataaagaagcgaacagagaaaatagaacaagaataacattgctggattttctgaggtcatcagattctggcttgggtccttgattcagtcctttatccaaatcacttagcatttaatcacagtgagctgctgttcagcaaagaaatccccccaaagatacaaaaaatctctccattcttttgctcctcatgaggctgtcactactgaatattgtaatgtcccagcagaacaaagggaaggggaagatggaggcattactggcaatcattgccaaggttaagagaaactaggggtagaaattaaaatagcagtaatcactctcaaagagtatttccacttcatacaggatcaagcagctaaaaaaagagacagttgctctaattcaaaatgttatggtttttatggtgggcataaagaatttgcactacccctgacatttagcctcaagtcatcttgtagaagaaatgctgacggagggaatgatatactgagaactcacaattcatctttttccattgtctcctttcttcatctatactaaacaaacgggatgaattcacactctttccgttagaattcatcaggcagtaagcatggctatccactgtttcagccttcccgagccctctacctaatgagacgatttctgcctgcagaatggattatatttagaccaagctctcagtctgaattgagatttctgtgaagtaatatcttttttctcatcagctaagagagtgaggtaaaaatagaactccctgacttctcttttgctaatgtgtgttaacaagaagagtgaatgaactcagcttgtatcttacagctccaaacacccttaagatggatgattcccttgagtctctattcagtgaccaccaccagactgacagggctacaggctggctcatctgtagctgtactgtgttgttgaaaccaaagcattaccactgatcttttgggtgatgagagtgccagcagctaggaagctgacatcataaagatgataacagctcagtgtgccaggaactgtgctaagtgctttatgtgacatagcctcattcagttctcatatgagcccagtggatggggtcactactatacccactgatgctcagagggttaagtaacttactcaaggtcactcaaaatggaaagaaagaatgatgaactcaatttgaatctcactgctccaaacatggtcaagatggatggttcccaggtcggtctaattcggaagactgttataacttttgtggccacattagcattcttagttcaaagtcctggtggtgccactgtgaacattctcctcctgctacttattgctgtaagcccacttatctttctgaaatcttttcatttccaatttagtttcaggattctcccgtttctctctttcatgctcttggcttcagaaccaacactgtcagagaatagtatctttcctctgaaattggaacactatataataattttcattcatgtttttcattcatcctaaaatagctcatatttttgaaaactagcaaactcgtattagttgtcatatgaaggagcccttactgtgtcctctgttttacttaattaaaaaaaacattaaggtatctagtcttatagttaatgattgggtcaaagtgttaaagacagatccagacacacagcttataattccttggttatttagggaggcagaggacattgtattcacacagtgtattcacgctacatgccaggacctgtgatatctgctttatatatataatttttgaagctacaagaattatttccattttgcagaggagggagtttaggctcaaagagatcaggtgacccactcaatgtcacttgcggagaaactgggatttgaatacaggcctgctcaactccaaagcctagatttactttaccaagaacagctgtgtggaaagtctgtaaggacaaatctgttcccagagtggttctgactttgcaaagaaccacaaatatgaatgccccacctaacgagctgatggtggatagttttctcattactaagttttggaaagcatcaataatcttaaaaagcaaagcagatgaaacagtaattgcacttggggggaaaagtcaaattcatatttctgggacattactaaatgacagcgacttttgagtggctaacccttgggtcacttggctgttatttctctctctaggttactttcttctgataaactttgaacattgaaacatttctcctttattgtcatcatgagggggaatggtttattcagcagcctttcatgggaaagcaatgtaggacttttttttttcttttctatattaggagttccctcccacccaacctcccttatgtggagctgcaatgaccaatctgaagcattctgcaggagagccaagacaggggatgaatcccttacaagagcccaatataagggaatctttttctcttctttggtccaactaagctcctacaataattgccaaagaatgttgagaattgtagcatttaggactgaaaaatttgaggccatattgtgacttctcccatagtataaatataccttcttctgatttctagtaaatagtctgaccaagtctatttatctgctggaaaaccccacagtagagaggtcccacatgttatgggggctacctgttccaacaagtataacatcctcactccaagttgcatagcagagaggttaaaaagcgagattctgcaggaagactgcttaaactcaaaccctggcttcatccattagccctgtacagccattcttcacccttctccatcctctgtttctcagggaggttggactgcaaggactgcatgtgaattgtttcagtggactctcctgccctccagcttccatctggctttggccagtatagagccctggaaggaaaagaaggactggaggaaagtgtgcattggggtatttattcccagacccccttccagcagactgctatggccacagtctcagcttctgtcaagtggccttctgcatgcagaactctcctctgggtcctggtactctccttttggcttaggatgggcaattgttccctactgttagtagcccagggagtctgccctatcccttagagttttcctaccccctcccacacccttctaaatgactcctttattaaacttatcacaatttacttaatttaaatatgccatctttttttttttttaagctgggactccgacaaatacaaccactgactgtataaccttgggcaaattccttaattcctcttggtctcagttttctcctctgtaaaatggtggtttaataatattttctgcagaaggtcatcttaagaatcaaagtacaatatataaggtgcagtacattatgcatataggaattactaaggaaatgctaagctcatataactaccacaaagttctagctcacacactaccttaactcaactatagtaactcacttctgggaacttgggttaagttttcagtcaagaatcaataaggcaaaaaagaaaaaaacccttataatcaaaattcattttaaaaaatcccttacatcacctatcagaatatggtacagttgattttcttgtatccagtcctgcagagtagttcttattgacattgaagtttgagaacccatcagctagacttaagaaaggtaaatctatatgtaaatgtcagtcttctgcttttgccatgactatggggtccctagaggagactgagagatgccagcaaattccaaagtgttcatgcagcttgtggggtcggccttgttctgttcttcttccaaggttctgtcaacttattgccggctaagagacttgtagtttgccgtgcagattaaaaggagaccctggggtcacacggtaggtagggaggctaggttctcaagacagctcagctgtaaattacactgggtgaatgctgctgttcccatgtgtctaggatggttctctattgagcatgaaaaagatgtaagcatttcccacatattctatttaatcatcacaacaaccctgatgatgatcattattatcttctccagtttggggatgaggaagctaagatcctgtgcccagaataaggtaacacagagtctaatacttggcggggatagtatttaaggcaggattgtctgacccagagctgagtttttattcggcatggtcacgtggttgtacagtagctaacccctaatgctctgtgagtgcacaacataagaagaaaactctatgtttttgtagctgctcacattggttacctagaataacatacaagtgtttgtttgcctggaaagttttttattccctgtatttaaaggcaagaggatcagccctgtattctagcaatttctttctgaaggctaaatgtaccatgctccaactacttcttggggccctgtttccagacccttctctatgttgttgaaccacttctagtccagcacttcccaactctggctgcgcagtggactcaatcacctggggaagtcctttaaaaatgcccaagtcagcccccgcctaaccccaaagatgcatggaccagaaatctctgaaaggtggcctgagtattactattttctaaaaggctctctcagaccattttaatgggcacccagtgttgaaaataactgctccagtttgttaaaaaataattggtgtgaatattggcaaaagccctctggcacaaagaaagagaaccagtttcttctagctaatgtttgttagccagaattatctgtggcatagtccatgtgacttaatagacctggtcttccagggcagctgaatgcaaatgtttctcacgtgtagaacgggatgtcagggcttacagagaaagtgggaaactggaatgatgactccatctaattcggccatgctggatgattcacctggattctctcatgtcctgagcattgaaaacataatgaagagtttttaaattgaatgtttaaaagagtgaaaacaactccatccctttttctgtttccttttaccttgtatttatgtaccaccaggtaccttgctcttggcagtgagcgtgaatgaatggcacagctcagcccctgaagcctgtgtgcagagattgagggattgtgatggagtagttcattcatgctcatgttaaggggggtgctaatagcagactagtgctcctgcgattattaatatctaggtctgggacagattgtgatggcttcttttccagttgccacctcagcagaaagggaaatagaaaaccctaacttgtaaagttagacaattagactgtaaagtttgtatatgtgacaacttcagatacaaagacacacacttacccttgacggggcttaagaggagagtgtcaaacataataccaaagtgaaagaagatagctcttcatctacaaattatttttaaacacatttaccaggttaaacaataactaatttttcggaagagaagagtacccaaagtcaaatgccctaagacgaagagatgcttatggcatttttttttaaataaagaaaatgcaaagttagagtggttctgaaggaacctaggatgaataaggtacagacatgattattctaatggtgcagacaggattgagagagaaggggggaggggagagatggagaaaggcatggatggaagatgacgtttggattcagattttggaaaggagagtaaaggaaggaggtaagcagagatttattttttaaattttattaatgtgttttcccctctttttcttgttatttttctcatctgtctgttcatacttggatattttgtccaataaactatcttctaaggactctgaaaatgcactgaatatttttggagggtttactgggtgccagacgccactttaggagttttacatatcctctccatttcatttagttctcttagcacagagaagtgggagaagatagtcccattttacaggtgggatgaagagagagatggaggaatttgccccaggttactcagctagaaggtggtgaagaactcaagccttcggatatcagcgcctggcatttaactaccaatcggtcctgctgggactccggctcctctggcaccatccccgggacctactcagagagtttgcacgtggccggtcgcgttccatcgtctaacaaggtccagcacagcgcaaatccgaagatcgtctaccccggggaaaaagagagtctgtttaattctcctgtggccctccaagtgagttcttttgggttccattgcctagacgaggaaagtgaggctttgcctgctctgcgctcacagggtcggcaagtagtgggaccctaggttcctgcagtattccagagataatcaaagctgcacaggtctcgtcatttttatgcaaaggcgtccggaaggctcgaactctcccttgcacaagcccatctgtctctgtgcgccgcccccgggacacggaagcaggcggcgagcagcgccgagtgggtggagaaccgtcccccgccactcacccctcggccaactctccgcgccttctcagccggcacccacgaggccgacctctctcggcctaaaaaaaaaaaaaaaaaatcccggcctcccctgcaccccgcccgccgcccccagggagctgcattaatattaatctcgctgaataattgaaggccagagatttattcgagcttcggcgggggagggagcgcagctgggccgcgtttaggctgcaccacccgcgtgtttcagccgctcgactccgctggacctgggacccccagacgtgggaggatggggtgggtgtgcctgcctgtgagtttgggggtgagtgtgagctgaagcgggtgctccggggagtgaggagggagcgccaggggctgctccagggaggcggagacggaggggcatcccgggtctccgcgcggtcgcctgcgcttcaccccgcacggggtgacctggggccacgcgggcttcaggggaaacaatagctactccttagatcctgggctcctgccaccggctgcccaagccttcccggacgagcggcggggcctcttttcttatttggctaatttatggcgagaggctggggggagggatggcagaggagggaccgcgactggcagatgggggcggggggcggcggttaaaggagttgcccgaggcggcggcgcgggtgatgtcagctctcgacgaaaatagagagggatcgcctgcaaatccccagctccggcggggctaaaccttgcaatccctccctggccggcgccgagccagagcgcagcggcctccaccgcctccccaggcgcgcacacacccgcacacgcgcacgcacgctcaccgtcctctgccaccactctctgctcccgccactcgccgcgcccgcgagccccgcagcaaagcacaggtggcagcggctgcaggggcgcatcgccggcgtgcgccctcctgcagccctgggcgcatcgctctctcggggaagccaccctcggagcccccggagctccccgccaagcgccatccccgcgggcggaggggagcgcgggtcgcgcgccgtggagagccgggacgcggattagcgcccgcaggagcctcctgcgcccgttgaggcgctaaagggcttaccccggaggcgggtggaagggcgggcagaggctcctcttaaataccgctcccggccgcacttcgcgctcaccccggcgtccgctttctccctcgcccacagctgccggatagtgctgaagaggagggggcgttccccagaccatggcatctacggaagggtgaggggatttttatctgtacccgcgggaaagcggggtcacgcgcggggtggtggcgcccctatccgggatgcggatagagaggcggcggcggcgggcctcggaggtggtggcggagccgtagcttggctggggatgggatggtggggaggggattgattttctttcctggagattgctgcttaatcctttgaaaatgcgagaggtggagggttgttttattttgataaaaagggtaaggtgcgctgggggcctgagagtgtgaggaagaaatcctcttgaggttacttttgggatttcaaaacaataggggattgggcatagtgtgagcagacaccggggtagcagcgcctggagcgcggcgccccaggcccgaggcgggcttgcaggtggtgccggctcggaaggaatgagccaagacagggccctggggcggggcaaggaccagcgcgcgcggccttgaacgccaggtttgcagagtcgccatggagatgctgggcccgctccgatcggtccttgtccctggaaggcggaatctccctggctagctctaaggaagggtggaagagatttgggtgcttcccgggaggcgggaaaacgtgtggtttgggacaagggcaggagtcgccagactccagcgggcagggatagcattggcttccctattcagcccgaggatctggagtcgtgtcctgcctcccaagattccagctggcatggggaaagctccctcgcagtgataactaaagacaattgtctttagcaagagacagaaggggctgcagggggcaaaaggattctttgaatactcacacatcaaaggaaaggtccacagagtccttggaccagtatctcccagaaaactttttgggcttcgtagaacctgagtggcaatgaaaagactgggcagctcagccctttggttaattcccaaaattgcagttactcacttgcaagcgatcacaaaatccatgttatgtgaaaagcaaatatcaggggcttctctgggctcaagtggtggtgttggcattttccagtttctcctaagaaattttaccaactccgcaggcttgttttaggggaatggatctctaaacaggctgaagagctggtatccaaagccagatctctagactgcaatctccaatagaaggaaaatatttctagaactgtctctctgtccaggagaaggaattcattcattttctgtcccccagagtccttccaaaggcatctggcatcttgtcattgcatgaaattttgtctctccctttgccctattttgcagtttagacttttttgattattatttctccaaaaagatgtttcaggaagacacctgtgtacaaggagggtggtaccttgtgctaaaacagatctctagaaatagatactaggagcccatatggatcaagatcagtgtcttaccatgtttagttaaaaaggcttttatattagaaaagatatgaaagaatttctggttgccttcatggaccttctagacttatccttgcttgtaaaggctagggtggaaaacatctgtgaaaaagatggatgatattagtcttccaaatcctgcatccagctcactccctattttgatggccagatagagaaggagaggttacaacaacaaccccaaactaagtaagtttatttcacctttgtcctaaatgaaagctgtcaaatgatgtgacattcaatgtagagccaaagtgattttcggcattttagaaagattcccatccaattaatcccatctttctgcactgtttatggttaagaaaagattcatcagaggaacttatatttaagagaagaaagaattgaaaaaagttgaacggctgggaaacaaatataggatctatgacccattattatttaacagcagtaactgatgagcaggtgacattctcagaagccctggtctttcctttcttcttctcttcttttcttgcaggagcatttactgagcacttgttgagtggaactcacatgtgaggaactccgagttggggggatacagaaatagtctgggatttgccttttagaagtctagctccatccagtcaaggatttttattagtaaattgttcacgtggactcatgagatctcttgcaacttctaacatctttggttaatgtgccttgtaaagaaaaatttactaagactcctcaggctgtctcctttgttagcttttgccctctaacaatattgaaattgtttccttgaaacatacattactgagaaggaagcaaaaatagcaatatagttatatgctttcaatttatatattttcagttcaactttgtttgatccagaatgtttggggaataggataatatgggaaactgaccattctggttcacatttatttggtgatgtaattatcagccgcagaacatgttaattaccaatttctaaagaattattagaagcaataatgacatcttatgtttgtttaacacttcactttcaaagctcattcgtgtacctcatcacatttgattcttccagtaactctgtgaagtaggcagtccaacaaaaatagactttaaggataaaattatatatagggaataccatcttttcagaaagattccaagacttggcaaagctttggggttatcatctgaaaatgatgtgtgctgggcatggctggtgcagattactggctttctctcaaacttttggcatacctatcctgcaaattgccttttaggatattctctttgtaacctgtgcattgatctttgcctgtacagagcatatgccaccacagtctggttttttgagggctttgattatttggaattgagattattagcatccagtttctataaaaatcaatagtggactctttggtagttcccaggctctgagaggtattttcctgcaaagcaaggtctaatttaatagttgagcattcttttttctgagtcccctgtcatggctagaattacggagatggcttttaggtccctgacccaaattggaaagagattataagtagttggtggcagccaggctagtgtccattactgactgggtcacagtggagtgtccagatgctgaagaggcaggcattttagaaatatcttcttggaggtggggggtggctaggtcactctgtatgtcagagacccacggcaatctgtcttctgatcagctcccaggagccaagggtcaggggaaagccagccatgagggcttgggcttcagtttgacttaaagagcaagggaaacagaaaactgctgacagtggaaaaaccctggcaagggagaccccttgaatttattatttcaagcaaataaaagcaaaccataaccattgtcctcttgcttctccccttgggaatgaatttgaggtcagcaggaggaagaccctacagcgtggacttattggaaagtgagtgaaggatgtggggcttatggtctagaggggtttgcaggttgcatgcctcaggcttggctggaattttcatttctcattttcaataatatagaaatcagcctccttggggaaaatagatattagtagagctatgagaaaaccatttcatgtttactaagacagtcgcttgtgagtaattgaaagcttaattctcaggaaataatttctaaatccagatgaaacttgtgaggcagaaactccatgttattaaaaaccaaaagacaaatctgttcatcagtatcaatggccacttcttttcctcttccatgcaacacaattaggtgttttgtgtctcctttggctttggctttaaaggatgtgtcagacaaggaaaagtccttaagtgatgatgcttcagctgcaaaaaacgagcaatatatttaacagctaagtgtgagatttctgggtcagtgtgccataaatcctacagttccagaattgcaaagctttttcatgatttgaagctcaacacagagtgatttcaatgtaaatcctcccctccctgccctcctccatggctgtgtcacacaatgccctgatgtctggtttccccccttttaaaggcaaactgaattgtttctcatattgaatttttctcccattggactggcttgcctcttggcatgagctgaaactattcttcatttcagtcgcctgctacaattattttaatctactaaaacactgatagtattaaatcttctaggaatagtaggcagaagcattattctgaagataaaattttagttttgcttgcatttaaagaacttgtcttcgcagtctgaagaaacatctaacaaacaccagacactgccttgcttgcagcttttgatttcatgcccttaacagcttgttgggggccaggcaggatgcttcatagaaagggttttagaatccagattatggcaaatctctttatttaccacgatcatgagcttgctctctcctccctctgcccgcccctcaccccgcaactctccaagtgccaactccttggaacgaattaattaaaggaatgtttaaaaatatctctttgctccatcttcaagtgctccatcattgactggaggcagatgggccacatatttgtcggtagaatagaaaaggactagcatctcattataaatctgtctggttggctttaaatgatgtcagaaaagacaatgggcccgcagtattaaaggagaatgaaaggaagatctttaaaattttaaaaagaagacccattttcttagtgctctggtttttcttttaaaaagtattgtttctcaatggtgttgatatttatttatttttcattcatgtatttaatgtctcacttagataaacagatatgaccactgttggctgaactgctgtttggtgtttttggcaatctcgacagttgctttagaatatggactcactgagcaagaattgtcctttgaaaatggaatgaagggaatgaactcgatttgatggctagacttgatctgtgtcaatcctggtctctaggatagatgatggcaatgttaaagaccttgaatgatgtttggggtcaaggagggagatgctgtccccatgcccccctctattttagaggcttcacttaaatcactgagagtactttcttctcttacgtttggtcaggagggccatctgtcacttgctgtttgtaatctggcacaggactttctgtcatgtggttctgccatcccaagttcccagccactgtgctgtcaggatcacagagctggtgacgaagttggaagtgaatctgagacctgtctgcctcccgctttgcctttttcccagcactggacatgaggtactgggtgcctgtggactgtatgtggcccatgggtatattcttataggctcacagaggattttgaacatgttttaattgttcacctatacttacttttaccttaaaaaaaatcctgattctggcttctcttaaaaattgggagatctgatgacaaagaaccttcccttttatcttggtaccatttattgagtgattatatcccagttggctttaaacagtttaatgtgtatcaatttatttaatccccacaacaatatgatgcagcaggagtgactcttagcctcattttacaggtatagaaactgaggcacagaaagagtaggtgaattgcccaagattttacagccagtgagtggcaaagctaggctttcaaaccaagcatcctggctctgggatccatgcctgtagttactaggccatacctcttagtccagcagggcaggggttaactggggctgaggaatggccatctcctgagatagggcatatgcctttcaggttgggcacagtctgttctgagactacttttctcatgttacctgcctgaccccttacctttccaaggaagttattgagagattgaaagcgtgcgtaccattctcttggtatacaccattgcctagtggttttggatttgaagaattattcaaaatctcatttctatgtaaaaaaaaagatctttcaagctacctttccccccaccccccaaagcacttcttgttattttctttaactttggtctgggttgtacataatggagaggtcttttgtaattattggtttggtagtcaggaagccaatagcgttgtctggtctagaggcagtgctttgaaagagcccagggcatgaccacatgggtcccaacctttgggatattgaattgagccttgggtatgtgctttgtagtggcaaatgtagctgagcttatagcaggccctggaatttatgttttcttttgcagccttcaggtgtggctgtttagggttgcgacttaacttacgctctttactgaaacagcgactggtcttgtccctctaggagtggggctgatatttatttcatagcagatgcaaacagtgatgagctaaggatgccttttgaattgaggaagaaatctttcagaggcgtatttctgtgttttaaagagtgggacagtttgctcatcacccaacagatggcagtaaatgtcagcactttgtccacactggtggtctgactccctttggaagcccttcaatccttagggaatcccaattcccatggcatttcattctcttttgattataaaagctttctccaccaagtatagaatttggtaagagtgaggcaattgacatatatctacagtgttccatatcaccataaacaaatataaataggatcagccaagcttatgtggctatatatatatgacttcatttcatccttgaaaatcccctagggaatattatctcattttagagatgaaaaaactggaacttagagaagttttgattttatgctgttactgagtttttaggttttttttgtcatctaattgtactgtgttttgtattatccatattttgcaattaatccacatttccttaaaatttcatggatccttcctttgctttttatttttgttttgttttttttttttgctccagtaagtgtcttcaataatttcattcaaagaaagcaagataacctagtgtctctgaagaaaaaataatgtaagaatcttaaattcttaaagaatcttaaagaatttaagaggcaatgccttaagaaggacagcaactattacagaaagaagttattctttgagtggagatgtgccattcaaaagaaaatgtcaccataaaaaagtgagaataagtttagttaattgaaaatgattgtcaaacctatttgtagatgtcaaacaagataatttcaaatggaagaagtagtagtacatgaagggagataggtaaaagaaaacagagaaaagaagaaaatcattcttctctcttagatatcatggaaagctaactgctgcagattgtgtttaatctcaatctttacttaaaaggacagttgggctgggcatagtggtgtgcacctgtagtcctagctattcgggaggctgaggcgagaggatctcttgagcgtgggagttgggggctgcagtgagctagctataacaatgcctgtgaataaccactacacttcaacctgggcaacatagcaagatcctgtctctaaaaaaattaattaagaaagaacagttggaatctgatagatttcttaggaaagtggatggacatcaacatgaacaaaacccaattaaacaaacttgttcaagagtgaaatggatggttatcaaccaacaacacacatctcagacattctaaagtggctgatggtacctggggaattggttcagctatcattttttctatttatatgcaacatatggtctagaaaaggtgtgaagaataaatattgggctaatttctaagaatagattagagagtaatggaattatagactgaatctattttcccaggatttttctggaactcaatcccatcaatcagcagatatttataaaatcatcatagaatcttagcatttgaaggattattgatttttaggtcataattaattgctaacatttcaaatgtagaactcattatctattagtctgagagcattgaactttagattcttttcacaggtattgatacactggggttgaggtgtcattggttggtcccaggaagcagattctgagatggagacttgtgtgcatggaatttattgggaggagctttcagcgtaaatccttatgaaggaatgagggaagccagggtaggcagagggagaggttgaaacagtcgcaccaaagcctgcccacccacaaggagctctggaacagggatggcccttcagaatgatcctgaattgaggaaagagatttggcctttctactcctgcattaaccagccattgaatggggctgtgctggaacgggacatggccctcggtacagggcaaggcttggggttggggggaatatagttaagagctgtcacttatcaacatgcccagcagctgggcaaatgaatcattcagtcctgaatgtggggggaaagggatctgggtagcatgtcacagcatccaccactgtttccaaattcaaatgttagaaagataataaaataatgagtctggttgcttgtgatcagaatatccaggcgtccacaaagctatcatctgtaataaaatgctataccttgctggtcaagtgatacaaaatttcaggtagtcaggaggaataacattaagtgatctattgttcagcatggtgactatagttgacagcaattgactgtgtacttgaaaattgggagaacagtagattttaagtattctcaccaccaaaaaatgataagtatgtaaaataatggatacattaattagcttgatttattttattccacagtgtatgtgtatatcaaagcatcatgttgtataccacaaatacatactattttttttgttagaaataaataaggaactaaataaagctctatcttaaaaaataaaaacctcaaatattacaaaatggcatacagtaaaaaagtaaaagactatctccggccccaatcctgttctccagaaatagtcatttttttttgtctgccctttaagacagggaaagtggattctgatgggcaggctggggagaattcaaggtcatcatcttccttaggtttatttatttgtttatttatttatttgtttttgagacagagccttgctctgtcacttaggctggagtgcagtggcatgatctcggctcactgcagcttccacctcctgggttccagtgattctcctgcctcagcctcttgagtagctgggtttacaggtacgcaccacgatgcctggctaatttttgtatttttagtagagataggatttcaccatattggccaggctggtcttgaactcctgacctcaggtaatccatccgcctaggcctcccaaagtgctgagattataggcgtgaaccaccatgcctagccatcttcctcagctttagctgtgtctcacatagtcaccaagtacataagagagaagcccttctcttcattccagtccttccaagggtgccatgtccaatggaaagatggttatctgaaagtcctgctatagagagagaaattagttacattaatctaatttctatctagagtggtgagtataatggaaggggtcagaaggaataataaataaatatattgggaacaagagtatagctattattgacattttcagtgttgacagcagccattttcacactcctgcaagtgttatttcccatggagtccttacctggggaaaagtgaacaatgaattaggtaaatcctttctggaatatccactgcattgttctgttgattcaagaagtcaggtagtctgtcaacttcaagccaaaggtacgtatatgttgacatttctctgttctattccactggcaaatattaagatatgttcagaggtgaaagaacacttttgtacacacaacccaaggtcttgcaaattatatcttcgtgagtgttttcccttattttcttgcatcagttgactctgctttctgagaccaagacattgattatcattgtgtttgtgtttttatcagcacaacaaattaattccagtgactcaattgtagagcaacagaaggtagagcaagccaaccaaatctcattggaaattgccttgcttttctttccttacctgtttttaatagttacaaatctgttatttaccatggcagatcgatattatgcatatttccagtttatgggtaaagatgtcactgattacattcaatctacatttaggaaatacatttttgcacatagaatgtaacagccaaataaaagagtgtgaatgattcactattcactgtcagataaattatttttaacaaaaacttttacccttttgtcctctggaccagtggctccttccccatcacacaaaaacatggctttattaacaataaaagcaaaacccttaaatatacccggcatacctgaaactgggaataaaaagaggtttaattggacttacagttccacatggctgaggaggcctccgattcatggcgagaggtgaaaggcatttcttacatggcggcagcaagagaaaaatgatgaagaagcaaaagtggaaacccctgataaacccatcagatcttgtgagacttattcactaccacgagaataccatgggaaagactggccccatgattcaattacctccctctgggtccctcccacagcacatgggaattctgggagatacaattcaagttgagatttgggtggggacacagccaaaccatatcaagggggatgaggcactgagactagttagaagatggcagcaatagtttaggtgggagattatgacctgaattaaggtatagaaatgagcataggttaccagattccaaggatatttagaaggacttggtgaccaagtgcaagtaggtgtgagcaggtggaagggcttaaagccatctctcagccttctagattaagcaaatgggggcgaggtaagtgcagaaaaaggaattcaggagagaaattaaatttgaagaagacagtgaatttggttcagcatactggcttagcatttgtggcgagtggaatatcagtagagatgttcactgggcagttagagtcatgacaggccggggcctttatggagtgctatttgtattacagatgtaagggagctcacccgcacacagcatgaagctagagaaaagaactgggctaagagaagcatcctgggaagctctagtatctgaagatgggcagagggaggtgattcacggggtgcggggtgcagggtgctgagaagtaaggaagggagtcaagagtgagcaggtgacttgaagtggccgacagtgctgcatgctatggagaggtcaaatcgtggaaggactgaaaagtactcattggattagtcaatttcaaggccatcattggcctttgccagagctgggtcagcaaagtgatggcagctgttgccatgttggtgtgggttgagaatgggtggagagaaaatgaatgcaaattatttttttccataaatggtagtcaagaggtagatggtactaggaaagcagataaggcaagagcaggattatatgttgggttgttttagttttaggccaggtgtgctataagcctgttcatctgctaagggaagggcttgattaatgaagaggaggtcttgaattatccgtggaagatactgatgaaggaaagagttagaacctgaggctaattcattgctcactttgggggttcctgcaggaagagcagggtgcctctgtgagactgatcccacagtataggggagcactactcagaagggacagggaggaaatggctgcctgcctagatggtcaagtccacatgatcaaccctggtcatctgtagagtgacagatggggcagccagcttgtccttacttctatagcctcattagtcagcaagctagagttggatgtattttagtagtgcttgctgttttttttttttttaagatttaccttttaagtcctttctaagtctccctagttggaattcttctctttcttcccttaacccttcatcatttatgctcttgcatagtttgtgaaaattttattggacccagttttaatcccaatctcctcttgggctctgcattccctttaaatcacttcctggatatttgcatagcacatgtatcctgataactcccaaatgtatgtttctatttcaggccttttttctaggttctagattcatatatcctacaacctaactgatgtctccatttgtgcaatgcatagatgtctggaaattatcatagtacaatggaactcttgatttttttttccctacaaactcatctgtacccactcccaagtttccccatctcagtaaattctatctgtttagagattcaaagccagaaatgttggtattaaccctgccttttttttcttccttcagcctcaacctacaagcttactaatttctacctcagttcctcagatatcccacggtcttgcccacatttgcattctcttttccagaaccactttctaccctaccaccattccacagatgactggcaccctctgatcctggagcatgctttggtcctcagcttgaataatatttcccagagaggccttctcttcccattccacctaaaataggtctctctttcctagtcctacctcattccccttgtttgcttccttcactgcatcaattacaacttttacatattttatttatctgtctgtttgtatctacaaagtaagcactttgaagactagttcatcatcatgtcctcctagatcctaatgcagtgcactcagtaagcatttgttggctgaattctcatccttgtcagcctggagaaggagggaaggcttctcagaagaggtgatgtttgagttgtgcctcttccagggagtctgtccttattacactttgttcagacctctctcatagcaactcatcataacagagtgtgctaagtgttttcttgtctgtctgttcactatcctggtatctctctgaggatcagggttacattaatttctttgtgcctcatcttattatcattatcacgatgaatgttagtataattgaattgtctacctcgcaaaagagatatgcaagggcatagagacgacagaagggaacaggtgtgggaggcaacagatccaaggttgagaaaacatttccttttgcttgttgggtcatggtcatcttggtaaggttctggtggtcaattgaacatccccattcctgcctaccagtcaataattaccctttgctaggggttaatagggttcaaggaggttacaagaataatcagttgggaagcagctcatcttgtgaagccaaaaatgtatttgtcacagtcattcatgtccccatgcagctgtctgggaaaattacaaactcctgtatctgcagttcttttaaaatgcaatgaaatttcatcagaaaagaatctttgagcccatcctctgtctttcccaggatgcctgcctcctctcagaatcatgtctgtctattcctttccattgttctttgtaaaggaaaacaaggagaagctagaatgaatttgatattcagatacaaagaaggaatttcttaagtcaaagcagatttttcaattacattagttaaaaaaaaaaaaaaaatccagggcttgaaaactgatttagaaaaagaaaagttaccagaagcagacaacgttgttgttaaattgatcttttaactattaaagagacacttagtatgtttaatcagtctcaatagagttcccttactctggttttgtatgggtctagaaataataccttgtagttggtatgtgtgttttccagcaacctaaataaaaatgttagctattcttatatttcctgaaatggagttcttttctggagttttctggtgactggacatgttgggagatatttattgcatcctggtgggataagagaagaaaaaccatggctggcatcttctttcttgactctgcgagtcctcacagtgcgagtcctgtgattggatgaaagatcagtttataaaatccccttcctgagccttatgggaaagtcttcagctgaagctatcctcatcatccttatggaaaatgctagaatcctcctagattcagagccagggcactcaaactgctgtttttgaagtgaaagtagagtcaaagccgagatgctgggttttctcgtctgctctgacagggaagccattgttagttgcgagaaccaagcatatacagatttcatttttactttatttgctttctctctccctctgaagactgtcaatggggttcaaggcaagtaaactctagatctcaacacaaaattcacacgtgattgtccagtggtcagacagaccgggaacaatttgcccagcagggagcactgtggagccacacctctgaaccatggtgattttcctgctgctttgaaggaagagcgagagggcaaattacctctttcccaggccccgcaccagctgttgtcttggtttccaagaagggaagcccaaccactttgtttacattccaagtgacctggagtaacaaccggggaccagctctctggaggccaaggctacacctgggacaactggctgaggttgaaagtgagttgacagcagttgccattcaccagcgggtcctgggtcctcgtcctcatccttgtctttgtcctcttggcttcccctgggagtcatcagcggggttcgaacaagatttgctggttccggagcttgggtatgttcagcctggttttttctgggttattgaaaaatgttttaaggtgaatggggcaaccctgggttagaagggaggccttaaaagcaggaagcctagacactcaagggattgaaaaaacatttggaaagggttggaaaggccccaaaatcaacaacacaagaatggaggcatgaaaacaggtatttcttttcaaaatgacttaccagccacccccaaagtctagcttttaacccaatgggaagcaagcaacaaaattaaaataggtgtgaaaacgttgtgtttttggtaaagggcacactgccttaggaggcgcccgtggaggagcagagactgatccacgtgtccatatgtttgcttagagaggactttccctctttgcctttgagctaagctgctgagccaagccagcaagatgaagatgttcccttgcttttagggaacaggaaaatcaggattctgtccagctgtggctctagtttctggttagggggcattaaattaatccttgagtttctcatgtcataagatcacaggatatttgttgaataaataaatgcatgcagccgaagagctcactggatgagttctttacctcaagaatttctggtttctccttcaagacaatcttagattatttgggcataaacataggaaccctgggaagcaggacctgctttatggatatgcgacttaggcagtccacggtttaatgctctgctcttatcatcttgaaatgtttaatttgaacaaggggtctcaagatttcattttgcccaaattacgtgcagacccacacattatgtagccagtcctacagggcagccacacatgtgcaggcttgcatgaaatcctcttaccagtgacagtgaacatggtaaagatgacagatgaccttgagacaatctgccttctggcagtgcactagaatattctcataaggagatactttcataaaacagcttctgagccagtgttgcacagcagttaagaagacgtgttttatactcagaaagacctaggcaaaaattcctgttccaccactcagtagctgtgtgactttggggaagttaattagcctctctgagactcagattctttatcttttaaataaggacaatatcacccacctgatagggttttggaatggatgaaagcaggatgtgtgtgaagcgttcggcatagtgcctgggacctggaagatacctataatgttgattgtcattgttcttcttggaatagcagtactgtgttacttttagtctgttgagcttagatggggttatccatcagtctcttgactttgcaaattaggctgctaacacttggtgcatacccaaaggtatgtttgctaattcttttccatagagccacaggtgataagattagaaagtaggccctgggcttctttgatcatttgagtgctgtatttgctctagcgaagggttgtttgaagatttttctcttatgtgcttttaatccataactgtttttacttccaacacttctaactccaaatgcgtggtgtctttcccgacaccaggcaggtgtcctgcaagtcagttcagttctgatgctatccacctgggctatggctatcctacagattgagggctcagtcccatgaggttgccttcacttcaggtgtcagtcacaagtcccaggttgtctctggtacttctgactgacaggctgtaatttctaatttcagggggtttccacaacaccctcctcaagttcaataattccctagagcagcttacagaacacaaggaaacattttactgatatttaccagtttattataaaggatacaactcagaaacagccaagtgaaagagatgcatagggcaaggtatcagggaagggctcggagctttcatgcctctctgggtgggccaccctcccagcacctggatgtgttcaccaacctgaagtttttcagaccccattgttcagggatttttatggagggtacattattaggtatgattgattaaatcattgaccattggtgattaacacaatctccagcccctctcccctccctggaatttggtgggtggcactgaaagttctaatccttagtctttctggtgagcagtccccatcctgaagctatctaggggcccccagccactggtcatctcattcgcacaccaaagtcacccaaaggttttagctatgtgccagcaacttgggacaaagaccaaatatttattttttattgtatcacaaccctctaatatcaaagtctccccaagcaacgagtgcctgactttccactcattcattcattcattcattcacaaactttctaaaaatataactgattgtttcaggtgatgttgggtgggggcacaggaagtaaaagatatttcaagcctaggacaggcagccactaggcaggagcatcatagagggcccgagccttggaagtagggggtggactggatgactgttgtttcctttaacactgagggtctacccccaccaatatggcgctttaaggtttccaacactttaaagcatctggaaggccaagatgagtttgagaaacatgtgacagaatgttacaatcagcaggtgagtaggtacgtggataaagggaatccatgtggtgtagaaaaaaaatgctcatctctgaaataaaacattaaaaaaatagtatgcagctaggacgtgtaaaccaaaaataaaattctaagctccccaagcaacggagtggacccctcctctcacccaagggcattctaaagcaaacctgaaacgctggtttaggccatgatgaggatgggtggttgaacatttctcattataccctccttcctttggaattcaggtacagctgactagcattaacattaaaagagaccttaagactgacaaaaaagactctttgtagcaataagatatcaacatgacggataacaggccctgaaagaaatcaaagtgttttaccctcaaatatattttcaacatattttgaaatgccctgcaaaagctgtctcttgtggggaaaatctcccttctgtagaaaatcctgttccttttccaggtctttttttctgatccaggagagaactaagagtctgacacatttttaagtctgataagaaacacttacagtccattctctctgaagcctgctacctggagacttaatctgcataataaggaccttggtccccacaaccccttatcttaacccagacactcccttctattgattccaggtctttaaataaactttttcaaccaattaccaatcagaaaatccttgaacctacctatcacatagaagccccgcccacccacctccttgcttccagttgtcctgccttttggaaccaaaccgatgtgcatcttacatgtattgattgatgttttatgtctccccaaaatgtataaagtgtgtaaacaaacaaagccatagcccaacccccttgggcacatgttctcaggatctcctggggttatgtcacgggccatagtcactcgtatttggctcagaataaatcttttcaaatattttacagagtttgacacttttcaccagtaaacactaaaagacttctatttgattatttttcaggagaatcaagtagttagacttaaaaaaaagttatccctctagaaattttcatgggattgatttttcatggatatacctataatatatgtggctggagtaaaccatattaaggcagcattctgtaaggatggagagtttatccataacgaatttattcatcatagatgaaatctatactaattagacacaagcatgatcttcaaaaactccacaatacttatctcactaaccaggaataaatgcctttaacattggtatattttatttcagatgcatgtacacatgtcaatacattttttatagtgggagcataacctacagatttttgcaacctacaatttttacttagcaatgtgttgtgaatgtatgttaataagtgaatctataaacttgtttaacggctgtatatagttttcattttttggaggtaccatgacttttacaaactatctcctattgttggatatttagcttgtttctaatttttcactattataaacgttttgcatgtacacctatgctgacctgtctcactatttcttagggtaggttgctagaagggaaatcactgggtcaaatggcacacatactcattattttgacacatgctgccaattagccagtgtctgaaggggcaggagattctccaatgcagttgtctttttgagtcccccttaccgctatgtctcttacttgcagttgtgatatcaaatggctctggggttgactttgaattcctcattacatggcaaaatcttcagccaggtttaggctaaacaaaaatctttcttctgtatttggtgagctttttgttcctaggttggctgtttatagctccctaatctttgacatcccacatcaccctatgttgaaattgtcattttaaaaatgtaaactgtagcacattctctaatttctttctgtaattgtgcagagttcacattgtatttctaagaactttgctttcttctactgagtactttctctaaaatggtggctcccgactttattcagggctggtttcttctttttggccctgcagatggaaagagctgaatatcccctctattttgagtaggaatagatgattgaatactccgcatacaaatggaaaacgcatcatctatctgcaggcatcatgattaccaggtttgattctcatgttcgtaactatcttgtctcaagacccaccattgcctcctccttctcctagctctacctcctgctgtggctctccagattttgtatttacattctatgatggttcttcatttatataacaaagtgtgatggagaacaggaaatcttttagagaaatcaatcagggaaaatcatacaaaatggcttcattatctgggtaagtcaagctcaagctgtttataattagagtacttaactatgcttgctttagtgtcccatgagccttaggaggcagttgcaggaggctaagtgttggtgaagaccaactcttgacttccttagggataaagagggactaaattgggaggacagcagggtaggggcaagaggaagaggaaagaagagtaggaagtccatgtgaaaggcaaccgtgggtaggcttgctttttccagactggtaggaacagattccaaaccaaacatttttattttgtgagtaactggcaggctgatgcaaataaactctctcaaatgaagtgtctcctagaatccctaatgacccagccataggcagcttatgcagggtttagtgtattatccttccttcccattcaggaagctgctgaaacaccctctgcttattctcatgtatttcacagcaccagagctgagtaaatggagtggaggctaagcctcctcacattgcccctctgacgcagttgggcagcggtacgactttctattcctggataaactgtggaccccaaatatgtatttgagtagcctttacttaacacaatatgctgttgctgtaggctttgtatcctatgaatggaccatttcctagtagtgcttcaagtttgggctgtgtttccttgatcaaactcaggccatatatatttttttctttccaacttttattttaggtccaaggggtacatgtccaggtttgttacatggataaattgcatgtcacaggggtttggtatacaggttatttcatcatgcagttaataagcatagtacctgatacgtagttttgtgatattcaccctcctcccaccctccaccctcaagtagaccccagtgtctgttgttctcttctttgtgtccatatgtcctcaatgtttagctctctcttatgagtgagaacatgtggtgtttggttttcagttcctgcctaaagttgcttaggataatggcctccagatgtatccatgttgctgcaagggacatgatttcattcctttttatggctgcatggtattctgtggtgtatatgtaccacattttctttatccacttcaccattgatgggcatctaggtcaattccatgtcagatcatattttttttctatccccttcaaaagtgagaggggccagtgcatgtgaagtttggaaatgagagccaagtaggtttacatgtctcgtgaggcacaatatgattctctacttgtcatcactgtggatggactcaggatgttccagtccccttgttatcctgaggaccacagtcaaagcatgttgagaaacccaggttttagccctgcctgtgctgctggctgctggaccagcaatccttctgtcatatctcacaatatgctttgtgagttttaaagactgggagaaagaagaaaatggagttcactcatgtctttgtttgggttggtgtcacacaattccataaactgggtggcttaaaaataacagaagtttatttctcatagttgtggagcctgggaagtctaagatcggggtgctggcagatttggtgtctagtgagtgcccacttcctcatagatggtgccctctcactgtgtcctgacctggtggaaggggtgaggggtctctcttggggctcttttataagggctctaattccattcatgagggctccacctgcctgacctaatcacctcccaaaaactcacctccaaataccatcaccatgggggtgaggatttcaacataagaagtttggagggtaatgcctaggttttcttctagggtttttatggttttaggtctaacgtttaaatctttaatccatcttgaattgatttttgtataaggtgtaaggaagggatccagtttcagctttctacatatggctagccagttttcccagcaccatttattaaatagggaatcctttccccattgcttgtttttctcaggtttgtcaaagatcagatagttgtaggtatgcggcgttatttctgagggctctgttctgttccattgatctatatctctgttttggtaccagtaccatgctgttttggttactgtagccttgtagtatagtttgaagtcaggtagcgtgatgcctccggctttgttcttttggcttaggattgacttggcgatgtgggctgttttttggttccatatgaactttaaagtagttttttccaattctgtgaagaaagtcattggtagcttgatggggatggcattgaatctgtaaattaccttgggcagtatggccattttcacaatattgattcttcctacccatgagcatggaatgttcttccatttgtttgtatcctcttttatttctttgagcagtggtttgtagttctccttgaagaggtccttcacatcccttgtaagttggattcctaggtattttattctctttgaagcaattgtgaatgggagttcactcatgatttggctctctgtttgtgtgttgttggtgtataagaatgcttgtgatttttgcacattgattttgtatcctgagactttgctgaagttgcttatcagcttaaggagattttgggctgagacaatggggttttaccattcaggacataggcatgggcaaggacttcatgtccaaaacaccaaaagcaatggcaacaaaagaaaaaattgacaaatgggatctaattaaaataaagagcttctgcacagcaaaagaaactaccatcagagtgaacaggcaacctaaaaaatgggagaaaattttcccaacctactcatctgacaaagggctaatatccagaatctacaatgaactcaaacaaatttacaagaaaaaaacaaacaaccccatcaaaaagtgggcgaaggacatgaacagacacttctcaaaagaagacatttatgcagccaaaaaacacatgaaaaaatgctcatcatcactggccatcagagaaatgcaaatcaaaaccactatgagataccatctcacaccagttagaatggcaatcattaaaaagtcaggaaacaacaggtgctggagaggatgtggagaaacaggaacacttttacactgttggtgggactgtaaactagttcaaccattgtggaagtcagtgtggcgattcctcagggatctagaactagaaataccatttgacccagccatcccattactgggtatatacccaaatgactataaatcatgctgctataaagacacatgcacacgtatgtttattgcagcattattcacaatagcaaagacttggaaccaacccaaatgtccaacaatgatagactggattaagaaaatgtggcacatatacaacatggaatactatgcagccataaaaaatgatgagttcacgtcctttgtagggacatggatgaaattggaaatcatcattctcagtaatctatcgcaagaacaaaaaaccaaacaccgcatattctcactcataggtgggaattgaacaatgagatcacatggacacaggaaggggaatatcacactctggggactgttgtggggtggggggaggggggagggatagcattgggagatatacctaatgctagatgacgagttagtgggtgcagcgcaccagcacggcacatgtatacatatgtaactaacctgcacaatgtgcacatgtaccctaaaacttaaagtataattaaaaaaaaaaaaaaaagaagtttggagggacacaaacattcagtccgtagcagcccacctagcgtctaagactgtggctcaggtatattcggagctttgcttcttcccacccagtatggaagctttaggagacttgcctgctgcctgctttacctgtgtttgtcacctccccatgggcctctccttccgggtgctggctatgctggggtcttggggtctcttaccttcccttgactttgtgctgctcccttggacagtctttagtggaggggtgatgtgggaagagctacacttccctttgctctcctgtcccttaattccccagagcttcacacatacaatgactttatcaaagattaaaaagagagggagagagagaaccttaaaaatagctattctcagaagttaagagaaaaaaaaaaaacactcctaaacttttgacaggaagtcacctgagagattagctctgtgttggtgcatggcttgaggtctgtcctcctcagagtaagtgctcctctttcagtcctccacggggcaaactcccactcctgtccacagtggatccccactgccctccctactcagggagagcccattgttgttcattggggggtgttcctgaagtctgagttaatcactatggatagcatggccaggagcaccagtggggaagacgctctcctcgggggtctctgggatcctttgagcattgacccacgcttagcacacagggcatacagatctccgaggacacttgccttccagacctaccaaggagagaaatgcttttctagaaggcaacatacctgcagctgtattctctgtctgccacagaagaacagttgtctttattgtgccttgacctttcctcatctttcagcttccatgtcgtgcccaacggcttaacagtacaacagaaatgggactcagcacccagtactgtgcctctccaagcctccaggccatttggcactggccactcccactgactaggtcagacctacaggtttgcttacctggggttccatcccatccttaactggtgggatggtggccttgcagctgactaggagaaactgaaggtggtacaatggagtgaattctctaggaaacagaaggggtcagcctacttggcctgttttggctgggtcatttggtcgtttttctaaaggccaaagttcatgctcttttgaccaaagttagggatttttttttcatcaggggagttaaatgagctatttgcacttccatatttttgaaaagcggcctttcactccagcaggctcaggctgccaaattggtgtgtccccccatctgtggacaccaacatcacagccacccagagcaatggggcagatcccggtggtgactgagcagcaggttgaggctttggagacccgttttgatgtgtctttgatccctccacacgtggctgaaggcacgtgggagacagagtgtggacctcaggcctttgctgcaacatcatgagaaaaccaggactcccctgctgcctgtagctggtgggtgggtaggaggagtttacttaaaaaaaaagttagaccctagggttggggctggggtttgttcaagggctggggcaaaaggaggtgatagaaaggagggagcttgaaaattgccaagggaggaaggaagggctcagttgaacagatcagtctttttcctttaggaggggactggagaatgctccatcatggttacagaagagcttcaagggccgtgggaccttctttagccattctcaccagcagaaagccacagggaagaagaggaaaagggtgaaagaagcccagagtgataaaagggagtctctattctctcccattctttaaaaccagagcattttgagcaaaccaccattaagacacttgctttattgatttttataaatttttatttggctattttggggatggggggagacaaaaatcactgaaggaaatgttcaaagctgggaggaaaagtggttggtgacttttttcccacatttgtaaaacatcctttcacattttgtctgaatgcctattgcccgttgccaaatcctaattcaattaaaggtttagcaatgaacaccagtttagaattgttttgccatctctgctcaggacaataggcagtggaaagaagtgaagaggggggtgtcagatgccacacactgggggatatgggtgctatgggtcacctgcagccatctagctttaaaatgaccggggaagagcctcctgcattcactgtggggagaagtcaggagctgggctggcctgtgtcttcaaagtggcagctttagaaatcaggagagtctcctgggaccagctcaagctgcaataaaatgcggtgccattcatgcattaaacagatccttacagagaggctgctgctctgctaggcgttaaggacagccctctggaagacagatacagccacatctggcagctgcatggaggccagcagcccgagaccctgggtgatgatgcatcttgggcttctgccacctgctagcaccacactctgacccaaaccttcacatgggacacctggcaccaagaaggaggatagagatgtttgaatctaggaccagatacttactggattaatgacttggcctctcagagcttcaggttcctcatagactcccaccataaagtaggtatgatagcacctatcttggacggttgtaacgatagtcatctgtcatttgaccagtgctggaacatataggtatataggtgcttggaaaaaggtggctattttgaaatattctatgatttaagccctggtgtgcttaatacccccctgaaacacctaaagttgagacttcaagatgtataaaaccttccaaatagattcatgccacatttatccaccctccctctccaagcatacacatgcactgctgaatcttccagaaggggaggtcctaagggtgccaagcctgaacagatactgggaggaggactcggggcattccctccagacagttttcccaagaccctccactgccattgggaaaaagagtgtgggaaccccgggagtcttaatttaggcagccaaagggtgggccttgggagctccagctctctcagatttctggtctggcaagatggagtatgaataagaaactcagtaagcatttaactgctgattgactctgggaattcccaatagtattcgcaatagagaaggcaggtccccttcccccaaatgtcagaagccggcttcctccgcctactcctggtgacttccaccgccctggacacatgggggcgctgcagccctacttttgctggatgccctccccgtccgagtcctgaaagaccctgattttcctctgtatctgggtgagttcacattctctgtgtcttcctatgtagaaatcagcgaaagctcagcaatgtacttagaaaataaaaccaaaaatgtgcaccttaaaccaggaaacaaaaacttacgcaagcaatgcatttttttaattgtacaaacacttaaaagtatgtgtaagcaaaaagaattccaaataccctgtgagaataatattcaaaacacacacacacacgtgcacaaacacatggaatgggacgataagggtgatttttatttatttatcaagataaggtatcattctgcaaactattttgttattagctttttcacttaaaaatagccctgcttgcaagcaggctctgtggtgcaatggatagcgcattggacttctagcctaaatcaagagattcaaaaatagccctgctaaatatttgcaatctttcctacgctcctttttcccccaaagtgactttggatatccagagttaccaaatctagtatttgaagtccttaggtttgagggttgaaagtgaaaggcaagctgttttaatgaaaattcctaactgaagagagcggagacttaagatgcttaaattttggtcacacctgagcggtatttgtttgcatggcagttagaaggcaggtaatttgtcctaaaactaaaacagcagttaacaacctttaaattccctgaggagatcccttcttccccaaccaaacctgttcccatttccttctagactggttgacggtcaggtgggctgattggttctccctgctacagtggtagaattcagcgctgtacctaggtaagaagggttttggagggtgtatgggaaggtacacacagggtagagatgatagcacaggctttgtggtcagactggcaatggttcaaatcccagctctgtgacttcttgcccaggtgggtggcctcaggcaaattacttaatcgcccagagcctcattggtaaaacagggtcataaaactctcacagaattgtgactggcagattataagcacccaatgctcttttaggggttcacaaagtttttctgcaaagagccagatagtgcatattgtaggctttgtgagccatacagtctgtatcataatgagtcaactctgccattgcatcacaaaagcagccacggacagtatgtaaataagcgagcaaggctgtgttccaataaaagtttatttacaaaaatagatggcaagctggatttgacctgtggaccatggttgactgaccctgctcgtgatcatccccatccaacagaaatatagcagaggccacagatagaatactagattttcttgtagccacactataaaaggaaagagaaacaggtgaaattagttttaagaatagattttatgcccgggcgtggtggctcacacctgtaagctcagcaccatcggaggccgaggcgggcagatcacttgaggtcaggagttccagaccagcctggccaacatggagaaaccctttctctactaaaaatacaaaaattagctgggtgtgggggctgatgcctgtactcccagctactttggagactgaggcaggagaatcgcttgaaccagggaggcggaagttgcagtgagccaagattgtgccattgcactccagcctgggtgataagagtgaaactccatctcaagaaaaaaaaaaaaaaaaagaatagattttacttacctcaatatatccaagttatgattgcttcaacatgtaactaatatgaaaaattccttaatgagatggtacattttattttttggtaatattttcaaactctgctggtattttaaacttatgacacatctcattttgcactggtcacatttcgagtggtcagtaaaacgtaacctcaatattgcttctcaaactgcaggccaaaaccaatttagtgggtcaagaaagcaacttacttaaaaaaaatcaaattttaaaaatgaaatggaggagaatagaaactatcagggtacactacatgtaggaaggacatgggtcgtttcttgtactttggtgtgtgaatgcctgtgtgtgcacgtgcctgtgtgtgggtgtgcgctgagacatcatgagaaaaagaagacatctatttcttactgtagattgcacacagacatgtttgaaactcattactgtacgtgctaaagtcaagtgggttttttgtttgtgtttttgtcttttagagcaggctaactggggtgtttagctagtgcttcacacaggctgtgctgttgaccgaataaacatccaaaaccagctaaaccagttgctaaatgtcatagtgaccatttaaaaatacaaatcaaagtttcaaactttaaactttattatctctattcttagctttaaagcatgctcattttacagatagcaaacagaaatccggaaaagtgaaatacttaagaccccaaaaccttggctgggcccagtgtctcatgcttgtaatccaacactctgggaggctgaggtgggaggatcacttgaacccaggagtttgagaccagcctgggcaatatagcaagacctggtgtctacaagaaaatttaagaacaaaaaagaggctgggcatggtagctcatgcctgtaatctcagcactttgggaggctgagatgggtggatcacctgagttcaggagttcaagaccagcctggacaacatggtgaactctgtctctactaaaaatacaaaaattagccagacatagtggctcgtgcctgtaatcccagctactccggaggctgaggcaggagaatcgcttgaacccgggaggcagaggttgcagtgagccacgatcatgccattgcactccagccagggtgacaagagtgaagctctgtctcaccaaaagaaaaataataataagaagaagaagaaggagaaggagaagaagaagaaaatactaatagttaaaaacaaaacaaaaaaaagaccaaaaacctgagaagtagttttggaacgagaatgaggaactctgtgaactcagccttgagctccttcctcacctgctgggctctctacctgggcatgtgaatgggaaactgggccaattcacccagtgatttaagcattgagtcatttttttgcttggaatatttgaatatatgaaataaaagttaaagaggtattgctttaaagcacttcattctcttattgattcttttattgactcttccacaaatattttttttccctcagtttttggtcatctacatatttaggtttttaaaaaattaaattagttttgtactcaggggtacatgtgcatgtttgttacgtgggtatattgcatactggtggggactggacttctagtgtacccgttacccaaatagtgaacatcgcatcaaataggtaattattcaaccctcactcccagccccttttggagtccccggtgtttattatttcatctctatgtccacgtgtacccagtgattagctaccacttataagtgacaacatgtgatatttggttttgtgcttctgaattagttcatttagggtaattccacctgctcatgctttctgagcatccgaaggtgtatcctgctgggaaacaaatgtgaaggaggcataggctctacatgctcacaatctggggtagggtgttatctttcaataaaaacatgtctgagtggggcatggtggctcatgcctgtaatcccagcactttgggaggccgaggcgggaggatcacttgagtccaagagtttaagaccagcctgggcaacatagggagactttgtctctataaaaaatacaaaaatttaaacaggcatgggaggcacacacctgtagtcccagctacttggagattggggcaggaggatggcttgagcctgggaggtcaaggttgcagtgagctgtgatcacaccactgtactccagtctgggcaacagagtgagaccctgtgtcaaaacaaaacaaaacaaaaacaaacatgtctgagattatttcgaatgctataaaaaagagtttgtttcatctggtatgtagtgccgtaaaagatgaaaatgtgaaactgatgaaactcacttttcctccctgctctttagcaatgggatgaaagacattttaaataaatctatgactcatcgggtctttctcttttcagtaaaaattatttaaggcctattttctggaaataaattctgggtaaaccctactcccctaatgggatcccatttcttcctttccccgagggttgatacgtagaatgaacacagtctttggattcaggcagacttgggtataaattctgcctctaccacttcaagactatgaggcttaggccatgttctctaagactcagcttccccatccataaaatgagtatgataacgctgacctcataaggttgtagtaacgattagttgcaagaatatatgttaattaagaaaaaagttcaagtgtgaaaaatgcttttatatatgaatttttggtatgaataagttttcatcacatagctaattgagtctagaaatgattttgtttgtttttgtttttttttgtcacttcctcctccttccagaaaggtgcagtgggaagctgagaaaggcattttggttcccttattttaaggtcctgatgcttaatggcttaccgactgcatttttaagatattgtttccctacccattcatatctctgtcttatacatgtatggtttctgtcagtaattcaacattcacaaaaaaatggcccagacattattttaaaaaagaacaaaaaacaaataggccttgcagttgttaccatggcaaccaaatactttcctgtcatttattcagaagtgaattattaatgagctttgtctgggacatagtcagaaaacacacccgttactctccaggggaaggtaatatggcttctgtagcaagcaaggtcacagtgtggaaaagtaggggatgttcttgcctcctcatccagtgtggggaagacccaaatgagccagccatttacatgggagcctcctcagtggccagagaccccacgtttctggcattttgggattgcataaaaagctgggcccctctctgagtcacttttctagaagcagcatcttgaactggcatttcttcccccacccaccccagaatgatttgacccatttcttcttaggtaattctctcccacacattaaggcagccatcttcagtgattgattgaccaggatcaagtacatataccaattctacaggagaatgggggtgaggggaggtgccagaagatgggaaagtcagaaggtctatttttgcagattactgggtgtggtggatacctgtaatcccagcactttgggaggctgaggcaagaggattgcttgattctagaagttcaagaccagcctgggcaacatagcaagactccatctctacaacaaataaaaaagggggaaaaaagatgtaaatttttgccccttgttcttttttaaaaatgaaaaagcactgcaggttagtcaccaagcttctcagacaaggtaattttaaggaatgtatttaagctttctaagtcccagtttccatgtttgtaaaatgggtttaatagtaggaccacattatttaggggtggttgtgaggataaatgcataggaactatatgaagaagttcctgacacacattaagccccttagtatgttagctattgcttttaaaatgatttatccctaaaccatatatcaatattgcttgaaggttgaatcacctgaaatttgttatgatttcaaaatacaaccttttaaactgatgggttttttgaattttcaaaaataaaaattgatgttcttttgatttctttcaaaagaagatgcttgaaatagccatctgagtagtaacatattgatgccttttcatcggcacctttcttcagttgattgttgatgtacactgacatccctgaatttcattacagcagtgactgagggtgtcaacgtctacaggtatctggaaaccatatttattttaaatgacatctttttttttctggcacaataaaagagtgaggaatgagagaagacaagataggcctaagaatttagatattccatggaaaaaacaaacctgagagtgtgaaagaaatatagcagggaacatggttaaggttcagagaaaagaaaactgtcattatttttattttattttattttatttattttatttttttgagatggagtcttgctctgtcgcccaggctggagtgcagtggcgccatctcggctcactgcaagctccgcctcccgggttcaccccattctcctgcctcagcctcctgagtagctgggactacaggcatccgccaccatgcccggctaattttttgtattttagtagagacggggtttcaccatgttagccaggatggtctagatctcctgacctcgtgatccacccgccttggcctcctaaagtgctgggattacaggcttgagccaccgcgccgggccaactgtcattatttttaaagcttcactgtgttccttgctcctgtgtcctttgtctaaattcttctaactttgatgagccaaattctacacatagtttcacccagagaacctgcaggctcaagaaaaaaatactattataataatatatgatgatataagattggttagaagatgctaaggagaatccaagcaatcagagaaaaataaaaccaagctccctgtctttgatatagcacatcttggggaaagatcaagtcagaaaagcagatggccggcctggctcattgtggaattggtattctgagataacttacaggtcccaaaccatgtcgctgtaaggtgttctgagaaagaacatttgactgctacccagacccctctgcaggttcttctgtttagggagaatgggaggcaaaacactacaaaacctgtaggctttagaaatagacagactagctgtgtgaccttggggaaattgcctaacttctctgagcctcagtttgctcacctggtaaaagggagataatatttccctttcagggttgtgatgaggatgaaatggaaaaaccatctgatatgtgcttgtcatagattatcaacagctgttacctctcttctatgtactgaaaaagccatctgttaccctaattcataaaaaggaggggagggcagggatggtttgagcttggacattttctggcctttctcaatgacaatttagaatgcagtgaggggaaagcttttatttttgaatatttctatttcactgtctcactgggtcactctggggcctctagaaattgtattctccagatatagtatgatgttgtcagcatatgcatacatttttatcacttctttagtttatctttgtataaaccacatatatctgggaaatttaaccaactgcctttctacaagtggtgtcatatttaggcagatggttactttttgggtacacaattgtgtagggaagccatcttgcactgagactctgagaccatgggcttcccagccttagcatcttacttactgtcacctctctaggctttagaggggttgattattgggtttctaaaatccttctaaatttcccaaattctatggttcaaagtctttgtgtaactgtccaatagaacaagcatataagtggccaaacttctgtgatgatactcctttcccctaaagccagtgaatcttctgaacattcagaaattgggatactggtgaatatgccacagtggaaatgcataggtaacttcaacaagcaaataatcttcaatgatgaatcaatatcttctaatccactgagcctaaagctgcaactgtttgagattcattaaggattcttaaatctaacatgtatttgtcattttgaattatggccatatgctttgcagatggcctctgagtgggtcttccttattcaagaaggagtagggtcacattcattatttgtacattacttttttaaagattcatgggattaaaggatgaaatcagaactcagacaatccaggagcaacctgcgtggatgagaatagtcatcttccatattccacatgggatctgtactttcagttaaaatatttatataattatggtatcattaaaaaagtcatttccagatctcactgacttcgttgatgaatcacccactcaccggtttaagttacatgtgacaagacagcttctattactattttgtttcttgttcttggattccatgagatatctatacttagcaatatgatactctcctcttttatttgcactagggtgaacgtatttctctttcaagcaaccaaaaaagtcctggctggaacagaggaggcgatggcaggccattgctaaactttgctgtgttgtggcagtacagtttctgtcccttttatcttgttaactgtcagtactccaaacaagcgagtagaacaattgccatccgttcagcatgaagaaccccatggaagggatctagagggagatgtcacaccatagatgtactgagtgagatggtatcatggtggccattcctcaaaatatcagcactgccctccagaatccacccagatgacattgatcaagcatctactgtaagccagacacttggagaggtgctgggaatacagagatgagaaagacagggtatttgctcttgggtggttcattccataatgatagcaacaacttatatagaacctgttctatgccaggcattgttttaaatgcttcatgtatgttagcttgtgtgatcttcagaacaaccccatgaggtgggaactattcttaccatccctgttttatagacagggaaactgaaacacagagaatctgggtaacttgccctagttacatagctagtgaggagcagaaccagaatccaaacctaagcagtcagctccagagttgggctccccactggcacattctgcttgtactctccttttctctgataatcccatgacatctttatctccttaagccatatagcattttcttaggcttatttctttcataataaccattataaaaataacaacaacaaaaaatactttcaaccaaaaaaggcagaaaaaaggcaacacaacataacaaaattaatttacccaggtcccattactgttgtcattttagtttatgtcctttaaatttgtgtcaaactaacatagtattttcaggcatgcttttttcttttaggattatgccagagtttccccactatattcttttttgacataacttttaatacactaccagtttgagtgttttccagtcatggctacactatacaattgacttaactgatcccttactcttggacatgcctaaaattcctctgtcataacactgttgtgaacatctttgcatatgtatttttttctatatgtctgataattttcttagatggtgtaggcttttaacttttggagcgtgcaggtaggaaaagcaggatcagttttcagattcagattcaaaagaaacatttaagcttttttcactcctagagagctggaaacaataataccttaaaggtctaaagcatgatctagatcattcacctaccctttaggaggacttttttttttttttgagactgagtctcgctctgttgcccaagctggagtgcagtggcgtgatcgcagctcactgcaacctctgcctcctgggttcaagtgattctcctgcctcagcctcccatgtagctggggctacaggcacctgccaccacgcccagctaatttttgtatttttagtagagacagggtttcaccatgttggccaggctgggcttgaactcctgagctcaagtgatccacccacctcggcctcccaaagtgctgggattataggcgtgagccaccgcacccagccttaggaggaatgttaaaacttatgctttgtccttttggaaatatcatgtatcttcttcctatgaaatggattcatgatgttccattataagttagctaaacaaagatttcactggtctagttgcccctgtggcccatcttgaagaatcactctatggaatgatgggcaatcaaacacaagaggatcaggaagaaacaaaataggtttaacagaatctctgtaatagtgaaaatatcgacaggttgacaaggaccacagggaaagcacagtatgaaacaaatggtaagtaaaggtccaacaagtggtgggtgattcagtgaagagacagcaatgcagagtggttaccacgggccttgtaggaacatggagctgagtttgatttcatttcttagtttctgtgtcatcttgcacaagttgttccatttttctaagcctcagtatcttcatctgtaaaatgggcatgttatcatacctgcttcataaggttgttgtgggaatctaaccaatcatgtaagtacagatatagttactgtttgttggctttgtgcagggtactgtatttttacaatttcatcatcattttcttcattgtcacttcactcagtggaaggggactatgtgataagagatcagtactcattgttgcagaacatgaaatcatcatagttgtgtgtttctgggaaagacaataaattaaaaggtgcaatatgacacttacaagaaatacgtactcccctttgttttcctgaagtacaaagtaggatcaggttggaatttcccgcctgtcttctgaggcaaacaagagcagtttgggggcctcgctgagggggctggtgtcctctgaaccagcagggtaggcatgagtggacaggctgtggcttgtacttcagtgtccctctgatgtttttaaaaattgacagctattgaagatttttcgggctgttcttggtgggactcaaactcaaagagaaagaaggggtgatctttatgggtaaggtaactgggatgtctagggattcagcaggctttggatacagcagacagagggctgaaaggctatctagactttgctactctccccatcttttggttgggttttcttctgggttgttgtcctttcaggcaatgatgggtttggcagctcaagacttacagcatcctcagagaaaatgatttcagcaatggaaagtgcctcttttctgatacttctaggaagaggcccagagaagagtctcattggctgggcttcagccacacccattcttgggctgaccactgtaggaaaggattgctctgattgcccagtctggatcaccgtgtgatgacaatcacacgatgggatgacatggaaaaggtggctgcccaaaaagctgcccgaatgatgaaaataagagaaaagaaacaaagggatgaaaggaggaaaatatatgtggctactgcaaactcttaaaaaaatctcataattgagtaacttatacctgagctctgtaatacttcactccaacttagtttgtcaaggagttttcttttcttttccttctcttttcttctacctccatccccactacgtgtaattttgtcagatgttgtcttctattgcctgaaactttagcagtcgctgtgaatcctgtttctttaagcccagggtgtcactgggagcataacagtcatccagtgcagctcagcttctccctacagattctaaaaatacccagaggcactcaaaacaaacagcgaagcactgaggcactgcccgtgcagacacccacacactcccctctttaaactgccttagcgctgtcactatagggagaatcagcaactcacgcagcccttttatttatttattttgtttttatttatatacctctttatgcagaagagatgaggggttcctgatggaacagaattgattggaagaaagggaaagagggagacaaacagcaaaagtgtttgcactgtctttttgcagctcgctgtagacctgaactaagatgtatcgagagatcagaccaatccagggagtcgcacagattagctgggatttaaaataaaactctttaacaagagatcacctagaataactcgcacatatgcatccatgaagaggcccaaggaccacatttggagaaggttagtgctcacaatgaccagggctacaacctggcttatttttcagaagcaaagcaaaagccaaggccttttccatggaatctttaggtggagtcgaaccacccagagcatcagggtgttcttatgtcaaggaggtgtttcatttcacaggactgcagagctgagggtattggcattgcatgctgtgcatctacagtttgggaacttgcttaatgttgattgtcttatcaaaccagtgagctcttgggtttttcaaaagcaggctgagggattaaatgataaaatcagatggattatgaaaatatgagaatcatgggaattataacaggtatgaccttttatagattgcctgggacaatcaggtgtctgcttaacataatgaacctgacccggtatcagcgtgcaagtaaagtctttgcagtcggtggttaaatggagtttattaaatattgttagtgataatcatggaaaggagaatttaaaatggccatagcttctaaccaactctggggatgtctggatgacatttgttttggctgttgggattcgccacgtaagtaattgattgcccagaagttgttctcagatcaagctttcaattggccggtttatggcaggatcctgggatttaaattaaaaagtgaagccttaaggataagcataagtaagttcttgggacagaatgtgcttagcattgtttccatccataagtgagtggaggaagcctgcgtgccccggacatatgcttttcactgggaaaggcgatcaaatgtctctcttcctctctccctagactgattctcatggagagtccttggcatgttctcaagcctgaagcaaaggcttctaagctcccaaattgctaggtgatctctcccgaggaatatgtccgaggcacaggtgccatgttctttgtgggtgggagtttgcttacccaggattttatgtctggcttaaaaaaaagtctgtattgcctattgaaattgcattgtctaaatgtggcaaaggatttgcaatagttttgtgaatcagggcagtctaaaaattttattagtaataacagtagcagcagcaataacaaaggctggcatttacatagacttcctatgtgccgggcactgccctctgtgtcacaatttttctttttttttgagacagagttttgctcttgttgcccaggctagagtgcaatggcatgatctcgtctcactgcaacctccacctcccagcttcaagcgatactcctgccttagcctcctgagtagctgggattacagtcatgtcaccaccacgcctggctacttttgtatttttagtagacatggggtttctccatgttggccaggctggtctcgaactcctgacctcaggtgatccatccccctcggcctcccaaagtgctgggattacaggcatgagtcactgcgcctggccatgtgtcacaaattttaatgcatttaattcacagacaatggagcttcagacttacccctccatcttctccttccccttccatgagctacatttagccgcattggctatgcatccttgccaatctggccaggtattgccaactttaactgcatccttatagacaactattcatagagcttaactgaagagaaccacgggttatatattagtctggagacactcttgcctgtcacactcttgttgcttttgtgagcagtaagttcaaggcacaagacttatcaatccaattgagagcttcagttacaggcagacttattttttcaccctgtccttcttgtctccaatgcattggaaaggttcttaatcttatactaggtggttcttagttttcatgaaaattttcagttattcctaaagacacaaattgctgatgtgaataagggtgagcgctttcagagataaagatgctaacaaatcagtgcaggtttgtgacaattttaaactgcttcagaccagctggcatcaatattttttcttggtatttcttctgtttttgatgaacgatgtctactatgcagccacaagctaatactgctgtcttcccaggaggcagggccctggtgtcttgggtatcatcacccaaacaacgtttcagaataatcagtccctaaagtaatgctttgcaaaggcatcaagccactgtgatttgagcctgggctttaggatctgggggttctgcctttttctaaatttgcatattgcttttcccgttcagaatttggagttagtaactgtggaagggcttttgggatgggaggcagtggtggtgctgattatgtttccaagtgtaaaaccaatcagctgggtttggatttctgggagcttgtgtggttctgtatggctttattcttctggctgaaactactaaaggaacctccaagttcctgcacaatgttgcttccatttgccatgtgcaagtatttttatttatcaatggccagttagtgaaataggttgtgaatctgtgtttcttaaagaaaagccaacactgggataaagaaaaagaatgcttgcaattttctagataagctagaacatgtcagtatgtaaaatgagaaaacaaaacaaaaacgtttctttctgttcagggtctgaattatctggatttgacaaatacgacaggcaaagtcaatggaataatcagcatgaatatgcctattcaggcctatctttgcagcttactttttaggggttgttgggaggttcctttcttggtatctacttgatgattttttttcatcttgcgagtcttccttggaaatagaatgaatgaagagagcacagacctcggccatcagggatgtgtgggcttaagttctgacatagccacttagctctctggtgctggacaagttccttagcctttctgagcctcagttatctcacgaaaatagagttgatcatcatccccctttggtaacgaacagatggaatgacgggtgtagagcatctgttacacagtgcatgctctgtggcattcatctggctgacctgcagcccactctctgagttgagaacaaaccagggatgatttgacagagatagccagtccaatattggttgaaacaagaaagtttgaaaaggaaaaagatgcctacagtctcttgagacacgtggtttccattctctatcccaactttactgctgacttgctgtacatccttgggaagttgcttaacccctctgaccttcaatttcctgatctgtgagatgggaataatattaatggctccttcctcctaaggatgtagtgagcgctaaatgagttaatggggatagagtgtttacgtcagtgccccgcacattggaaggggggacatacacctatttctgctttaccattctgcctgtcagccattctgatcttcatgaagacacttggcctgctcattcctcagtggttatagtaccagctgcatttctggaagctcactgctggctacaaaatgaccttcaacctccaagtgatccaggcttttcctagcagcttccatcaatgtgcaggggttgaggaaatttgtcgaatagcgacattgaggatatgagtcaaagagagggggagatgatagattcatatcttgaagcatgtggaagtaatctggtttttgtttttgcttttttttctgaagcagatccaggtgtctaaatgtaaccattgccggcttaaaaaaaattattattcacaattgaaaacagatataatgttaaatcaagatgagtaattattcacatacataagtggaaacaggataatttggttacaattataaagataaacatgttggtttttaacccaagaatggcagtggctttgatccttttttcatttacattttttgtcttttgaaaatttttaaaaatttcagacaattttagacttatagaagaattggaaaaataatacatagagttcccacattctcctccctcagcttcctttaatggtatcgtacgtattacataaccatagagcattgatcgaaactaagaaattaactttgcaacaattgctagaatttacttggatttcatatttttccagtaatgttctctctctgttctaggatccaatccaggtcctgcactgcatttagttgtcatgtctctgtagcttcctcccatctgagatagttcctcggtctttccatgtcttttcatgatcttgacactttcaaagagggtttttttttttttaatagaatacctctcaatctgggattgtctaatattttctccatttctagcttttaattgactgcactaaacatactttactgtttaggccaaggatccagtgacaaataggagtttttaagcctaatagattgtctagatatttctgagactagcctggctggttattactgatactggaggttaggagtatggactgtggagccagacagcctggattccgcttctggctctgtgacttacctgctgtgtgactttgcaaatgttacttgacttctctgtgccttgatgtcctagtctaccaattggggataataatagaatcaattcttagggtcacggtgaagatcaagtagaagtatgaagtgtgtagaacagtttttcacaggtggtgatcactcagtctgtcttagcttttaccattgctcaccctcctctgtagccctcctcatcccagtccaggcccagtgacctgctgatgccactgcccgggtctgcaagtacttgtgtggctctgaccagagtgacgactttgcagcaaggacctggggtttttagacatggttctcgtggcccaactgaaatagccaccttgactggagggcccaaagcttggatgctactaccacacgggggttccatctccagggcctcctgctgtgctcagctcaccagccacccacatcctgcaacctgcacctgcagtcgtgagatctactcagaaatggccccaggcccgcttcttctactctgctttactgaccactttgttctgggggtttttgtcctctcacctgtgtctcctctcttccccttgttcctctgaattcacgtgaagcggggaaccacaatgataacacattcagcttctctggaaggactgactgggtttgcttctcagccataattcaacttcaatctgggcttcaatgtcttggtatctaaaagaggatgatcgtagtaataataagtatcattaaatgtaatgaggttttattctctgcagggcactactttattatttttattttttattttttgttatacaatttttatctgaaaaatccatgttacacaaatagtcatacagtaagtcctcacttaatgtgtaaaataggttcttgaaaactgcggtttttaaaaagtgaaacaatgttgctatatgccattcaaataccttttgtttgtatcaattaaactatggtaaaatttgttttcttaagcaatatgttgcttcacttacagttacagcttccaagaacctgtcaacattaagaactgactatacacatgtacgatttatataggtatgtgtatgtgtatcaccttacacatttatatatatagatatatcttaatgacacagtgccagcaggctccctactaagtataagacaaaattataagataatagttattaaaaaataatagatggcttaatatttgcttagcaatgttctaagctcattaatgacacaggacatttaaaaaatctagaaggtgagtagatacttttaaccagtggtgtccaaccaaccctttgaatgagaggacttttttgcttatctgtggtacaaatatcatgaaaactatacacaaaccctttttctttttagctcatcagctatcattagtgttagtgtattttatgtgtggcccaagacaatgtttcttcttccaatatggccggggaagtcaaaaggttggacactcgttctttaaatttggggtttggctactgtctcatctatcttcaaattgtaggtctcttttctttgctccagacaggtgaccagatctagggaggccaggtctctgtaattctccaacaacacatcgctatttaaattctgctgggcagggtccaggcatttccactcttctggagagaattctgtggccacatccctgaatgttaagagttccatttctcagcttcgggagtgtcttggagtcttagctataaatcattcaaagccagcaagtcacagagcgagggaggctgtggtagaatcacctaggcatcccagagcagaggacacagggcagtgaagccctaacctgcagggcactactttaaatgtcacctctattattttatttaatcttcatcacaaatgtatgacatatctactaacataatcccacttcacagatgaggaagctgagaaacacagagtttaagtaacttgctcaagatcacacagctaagacacggaggagtcagcattcaaactcaacctggctttggagccgacgttcttaggtactacatgtgagggttaaataaggtaatctgcatggagtacttagcaaagtgcctggctcagagttaatactttgaacttgagctatattaatcccatgatctgatttctgtttcctctgcctcctggtgtatatgactctgggatgctgtgttaatcattgacccagtgctctgtatcatggcaatggctccttgcccagttctcagacaagtatgccccttgcccatgctgcattagccctaccacttcctgcccagcagatggggcacccacagcccctcaccttgttgcagcacagcctgcagccctctccctgtttcacatctactcattttctggggtctttcctgcgttcccacttagtttcaccttgtacctcaacctttgtttctgcttctctcacccttgtttctaccttctgctctcacccacagcctgacctcagcccctccctagaccagctgctccccagccctttgcttggttcctgggacctgttgtttggcacagtctaggggcagaagatcatgactggcatccctaccgggtttgtcccattcatgagggggcccaacctggctatggaaacagcagcacttggtcatgggtcttgaggtctgaaagaaggtgttgaatggagaaaggagctgaaagggcagctgctcctgcagaagggacagtgagcaggagcaggggtggccaccatctcacacgcccttgcctcttcctgtgactgggccttgctcctccaggctttatcaagtcaccatctctgagagaaggtgccccagtgccccacacatggctcatgccctgccctggtgtgtcgtgcttctgaaatgtggatccctgggttgtacataggcctgaatctctgatcatgctgtgagcagtgggcagaagccagatgccccagccaggctgcctgggcttgcatcccaaactaccatgtgctaaacaagttcgagcaagttacccaaatcctctgtgcctcagtttccccacctgtaaaatgaagatccttaaaaataccaacctcacaaacttattttaaggattaaatgaattaatctaaatgaagggcttagaatggttcctggtgaaaaatagttattgattataattctaagagttattgattataattacaagaattattgattttaatcattggttgtagattcttactttgagttattgattacaatttattattgtctataagtgctattgattataattataacctactgtaattaccttgatgataattattgctacaataataagttattgattataattcttactatgactgggaacttcttgaggccacccaaagcaccatactcatatttgtggctggtcctttgctaggtccttcctggttattgagaataagtttgcaataatcacctgtgaaactgaggataaatatctcaaataaattgtatggagtgtgtacttgagagatactaaaataacaggaaaagctaataatctagctttgggagttgtcatgtggctaaatgcccagtccccagagccaccaaagcaggggagaggggaccaatacacatggtgacaccataagatagcatagcagaatgaagccatcacctgggtggcgtgatttgttgatgaaggctctgtaagtgaggagggtctggtccagctgaaaaatgagtgaaagatgcatctgatcctaagagacaagagaggccaaggggcagccttgtagtttctctttaccaggcatacttccttcccttgccctctccatcccttctctactttctctccaagtcacctctttgtttactcccttctgtcctacattgcaccccttttggtagttgcagacagtggtgaaggcaccatgactgatgggggagccagctgctgggccagaccccaaggcttcttcatgcattgtccaggagtattagtggctccagaactctcaggctactatcattttgttttgcatttgcttttccaactgaaacaattttagacctgtagcctggttgagtgaatttcaagatcaggtagaatagtgcttcttactgaaactctcatgtgtttaagaatcacctaggattctgatggaaatgtggtttctcattctgcaggtctggttggggcctggggttctgcatttgtatggggctcctaggtgaagtggatggttgcttgggtgcactctgagtagcaagaagtcagcctgttaattcagctaattgtacttctgactgttcagcaaagaaacaaaactgtgaaagtctctcaagtatcgttgcagatgttgcctactcctaaaaacattaaatgaggtcacagagtctccctttgcaaagatctcaaggcatcatgggtgtgttcccacccctggtggtactaagggaaacgaagtcacaggttcaggtttcaattctcaggggacccatcagcttcactttgctccactgttgtagactgcccagtggccattggtcaccaaagtcattgtagttgacagatggtggcagggagatgaagagtgagaacaatcagtaaaacctgagagaggaggttctgagggtccagctggaccatggtggatacttgcctatgtcactaggaagggagggaatgtggattggagccaagttggtgctgtatcaaagtcatgagggaagctcataaacaagaggcaaatgaaacaatgggaaacaaggaaatggggcttgcattcagagtttcaacagtgggtgagacaaagtaggttgctttaggatgaatgaggcaaagggttctcactgagggtagccacctggcctacaggtgctggaccaaagtgaacacagatgagtcaactccacccattgtctctgcaagaaaacagctcaaaactcaccccatgaatgagagaggaagatgccaccctttgggactgtctgtaccctggcagaaatggaatgatttatccaaataagcaaggcaagttttcatatatttcatgtattcttgcatatatcttagccatcttttcttttcctgggccactcagcatgtgcagctcatgttcttcttggcctgggaggtcatggaaattctacctggctgctgcaatgctggggagggatactcagcaatggggatttcactttctgccatccagttcttctttcagacactgcctccagtgagacagcctctcacataagatggaaagatgcacctgctctcattccccgcactgagccctcctctctgctcttagctctgggtgggagctgctctctacctctcatgaaaccagagtacaccttataacactcactctgttctttgggcttctcctccaacccatatgtaccctctgtcaggctgctgagtatttgctaagaccccagtcttcttttctcttggtgaggcacagttgcccaaagtcaccactgtccttgttcacttgagagctgaagtaacttaggtagttatttcagaagagataatttgactccttctttgaggaggcttagcccggcactgacaatgtgccaccactaaaggtacctaggaagaggtggaggaatattctgtggccactcctgcctcatcactttccctaaagagagtgagctctggaatcacataaacctagccccagttcttagaggatcacatgcttgaccttcagcaaggccaagcctgtttcctcaactgaagaatggggcaagtaacactgtatttccacatcaaggtgttgtgcaggttaaattggatgctgtgtataaagcccttgcctggctgatggtttaagtgcattataagtattaacaattattgttactgacaactgtgctacagcctattggagggtcacgtatacttttcccttcatgcctttgcccacactgttctgcctgaatcatcctccctcttcacccccacccaattttgtgagtctggtaagttttactttaccttatcccaaattcttgatttctgacaaccagatactttattcctatatggactgtttcttacttgactggctagggatccttatattatgatttttgttagcattagttatatatttgagttactgccatgctatcctgccccagctcctgcctgaatacatacaccttgtcatctgggctgacgatgatgatcagttcttagagggcaaggtcagctttgtgtcacttgcaaggcagagcttaagaggcagtcaataaaaattcagaataaatgtattgaatcttgaagtagaaattctaagttctttttagggatgtgtatgtggctgtgtcattctctggtaggtgtgacgatctcatgtgtgggacaatgctttggtaagcatcaacaaaatgtcagaccatttagcttctttatccccaaggccccatggctttttatttccaacctccagcatgagtttccattcattctttacatattttgttttgcttcagctggggagtgggagagagcctcaaggcatctggtaaggaacctggagcttggtaagctgattctagtatgaggatggaaacctacaacacaatcagagctcatgagtgatgctgaaatataacttgtaatttttatactgaaagtgttcaatctctcaccttccctcacctcgagttacatgacaaaaggccctctttattacttttgtctctagagcccccagtctctgggaaggtggtgggggaaaaagtctattctgggatgtgttatttttgctgcccacatattatccactccagagcaggacttgatgttttaaaaccagggagaagcctcgggaagggaaagcaagcagcatatgtagtatgagctctcccagacttgtgtttttctataatgttaaagtcttctctctaggcagtgatttgaagtggagcttaattaaaatcaggcaagaagtgtagaaatggaacattaaaaatagaaaggtacaggaatggcactgtccatcccacccctgtcataatgtcagtggcagggctctgcacttcattttgcttctccaagtggtgctagacaagacctctgtcctcatctgctttcctacacaaaatggcatatcccagggtaagctggcatgctttgggggccaaagacgtgtcagggacatcatggctgggcctgaatctaccccagctgatagcttatgtgtatgcaccattgttctctgtatttcagtgtaaggcagctaagcaagcctgcagagctaggaaaaataaaacaggacaacagtaaacatctctgacttaaaatattcatgacaacccttgctgctttttagaacagttgtttagtagagtgggaaaagcaaggctacgtgagcttgatagattactcaactggaccttactttctttatgtgtagaatggatatcaaaatgcctaccatatagatttgatgataatcaataataatgtcagccataattgattgagcatgactgcaggccaagcattttttgaaagtctttaggaggtagggactatgattatccccattttgcagaccaggaaagagaagctcagggaggtttagtgacttttccaaaatcacacagctaggaagtggtaaagcaggactcagacctgcagctgacaagctgtaaattctgtgttgtcagtagctcaaccatacctgagtaaagatccagggaaatcatatagctttactcaaagtgtgaaatgaatgttctgatgaattgaaagatgattttagggggcacatgagatgattgggggtgcattgatgagggattaagttatgtcctatcatggggtgagaaaattattcctttttaaattctttttcaatctttctgagtatgacaaggattaaactttgattaggtggtgctgtgccttcaacaccgtctaatactttttaacctccatttttaacaaacagagcagatagcagaggcttagcagacaataatatctagctagaattcagtaaaaaatggttttatgtcatattcattttcacttccaccctctatttatggcaggtgatactggatttttattgatggtagtgatctaaaattttgtcttagaatacacttactggagtacaaagaatcagtcagtgttcaacactattacagaaataatactagaggtggcgttcacatagggcaaaaatagcggaggctgaacatgaatgactcaagcatgagaaatgctgtgatagcctgtgagcagttttcagctgatggtagcacgtggatcataataaacgtcaaggacagagtgaaggaaaaatgtaactctctcttctgatctcttaataggagaaaagaaatgagctgcttatgaactagatgaaacagtctttcctctgacattttgggtatgaatttagcctgttctgaaggctgatgggtaaagcaggggttcgggaaaatggagtttgctttggtcttcattgaaccatagaagctgagtgctggggacggaacttaagctcaggatcagatcctgtgttagacacatgagggtccagatgcagaaggcatttcccccaaggtcaccctggctgagagcaactgcagtgtgaataattatttcatccatttctgggtcaagttcctcatcttgagtctctttttcccacaacagccaccaggcatgaactggcccatggtaaaacccagatagctcagggtcaaatctaccagttattgtaggtgctcaccaatgccctggcactgcacaaagcaccatgcattacaaagaaactccacaaagagaaggaagtaaacaactgtctccaaactcaaggagatgacagggttatgctatatgatttttacccttagatgagtatcatttgggaggtaagtagcaagtctgctatgatagagtcagttaggaaggtcctcccaggagtgagaagccctgtattagtcagctttgaccaggttctgcttcaataacaaccactcccatgtttcagtgatttccaacaacaaaatttgattttgtgtctgttacacattggttgcagggcaactgcatgcatttactgtaccttcttcacctaggacccgggctgaagcagcagccagggccacacctctcttaaaccagaggggaaaagagcaatagcagaaccatggggaacttcctaatgcttctacttggaagtggcatgtgttacttctgttttgtgttggtttgggttcctaggagcagattttacaacacggcttcaaactcatacagattattagggagatataggaaacatcaatcagggaatggagaaatgagacaaggaaggcagtcaggagaacatgtgttatcaagctagctaccactgtggacaactccagttcagtcccatggagaaattctggaaaacagggcaaatcatgtgccttagaattaccctcctgaggaacaagggagctggtatatttacacaaccaaaccttccagacatgggttgaaggctactcctgaggagttttaatttcctagcacttccagcccgtgtgtacacacagagagtagccttctagcttccgagaaagcactcagacaaagagatagatgctagcagttacaagttggctggagtgcattagagggacagagaggagggacgtgagtggggcactgagagcatctgagacatgctcacatttctttatccaaaggaattcacgtggcaaaggacgtcttcagggatagagaagtgtaatcctcccacagaggtgcagcaatacttgagaaccaaaacaggccctgaaccctgattcataagtataataaactctagttgacacagtacatgtaatagatggttaactgagagctaccatccagaccagggtgttttgacctcagcactattgacatttggggctggctaattctttgccgtggaggactgttttatgcattatagcatgtttagcagcattcctgtcctctacccacttggtgcccatagcctccctcccctcacctcataattgtgacaaccaaacatgtctccaggtgttgccacgtgttcctaggggaaaagtcacccctgtagagagccactgatgtagaccatatatgcattgctaattcccaaggaactgaaataaattgtggatgcctcgatggaggtgtgcacagcctgatgggagagacagacagacagacatataaactgtaatggccagtccaccctgggtaacaacaatttgaattatgtaaagaaaacagaaatagttcaggagtggtaaacatcacttttgttgcaggctggggatggtcagggaagtctttgcagagacagagacagcagagcggggttttaaaggatgaagaggagtttttcggatgagtgatcccacatgtagaagttaatgtttctgcttgaaaatggcatgtgttactttggttctgtgttggtttgggttcctaggagcagattttacgacaaggattcaaactcacaccgtttatgatctttggtgattgtggagacttgggaatgctacactgagactgatgctggaaatgctgacctcagagccaggctgatggcagggctgtagttacaccagctttaccatatcattgatcatgtgtaaggagcaatgtcaagggctttggaggcacttagaggagttgcccaaatggcatggatacaacccagccccagagggaccagaagcacctttgctgtattattttagtcaagggagaaagccagcttattcctcggcctcctcagtatcatctcctgacccatccactttgatgtttgtcccatgtgttgtgcaaacaaaactggatgtggatttgtcacttaacatctctctgcctcagtttcttgacctgttaaacagagatcataaggttttctctcttgctagtttcacagtcttactctaaaacgcattggctgtgcgttcagatgaacctgccctgctctgccatccaccaggtatggacttctttttctccattttctcatctgtaatatgggcttaatacccacctcacagggttgtcttgaggactgaattgtgtgatgtctataagccctcagccctgcacctggcacacacagtaagagaataaatgaccataaatattaagaaataggttgagtgtgcataatgatagctaacttgtattgagtgcaggtgatgttccaggcaccatcatgggggtgtgtatgtattaacctatgactacaataggtatcctgattatctccattttacatatgaagaaactaaggctcagggaaatctgatcacttacctaatgtgtgtagttagtgagtggtattcaaacttcagcagactgttgagcaagtaattgctttgctggattgtttagtgcttggcattttaccatagctctttgaaaagaaaatcaagtctttaggtagatagttacattcaccaaatgattagagccagtgtagctactactgggtaaatgaacttttcttactattgactgaggcccctttagtacacttacagaatattaataagaaagtaggtgagaagaaatgtatttttaatcacagtatctgagctggcttctcagtgtgagtctacatgggtagatgatgaatcaccccaaactgaccctttccagaaatgccttgtgagggcagcacaaaggaaaactttccattgcttaactctccccacagcccccaccctcagctattgaaataaaatgccaagaggctgcttgccagctcctggacaccacctccagaacagcagggagtgtcttctctccctttgtggcagggacacatatggtgttcttagtgtcagagcaagcagactctgttccaagagctgcttttcaatccagcctctgtgcatgggatggcagcaatggaaaacagtgcagggtcctgggtctgagggtcatcctctttctgccggtgcccctgccacctgctaagctcttgtctttggtggaacaggaaataccactcagtgcaggtacagacctagcctgccttgtacacctccgtgtcctggtcctttgtagatgcttgaatgagaaccaatcagtgaggaaaaggtatgatgcccctcctgttcaaaacacctattgagtaccaagtactacacccagatatcattttcttccttctttctttggctcaggtcctagctccagaccttgtcagccacgtgtcctggagcaagttattttctctctctttgcctcatcaagaagatggacataataataattccgtgcagagagttgctggaagaactcagtataaagcaactggctgacagaaagtgctctaagtgctagttcctctgtcattttgagaccaagccagatgtgttagagatgtccctgggggaacttgtatcctggaatttgacagcctggagagatctgaaggcattctctggtcctgtaccccaaatgaggtttgaaaccctccaatgagctccctattttgtaagttacaaaacctttggcaaccgagaagaggcatctgtagcaactttagctgtgtcccaagctccaagccatccgcccttccttccccactaccaggcaacagcctgctgtctgcctcctactcagacatccacggtctggaacaaccccaaaattgtcatctggggcagaatacacaacacccaaaagatggttttgctttctgaacctcacctgcagccactcctggcttctccacttcccatcctttatgacattcatgctgcacacctccccttctctagagagacagtaagcctctccagtgagaggcagggtgtgcaatagtaacatgcattggctcaggagtccgactttgagggtctgccgctgacctgctttgtgaacttcagcaagttgctcagtctctctgtgccttcttcttgtccccaataggaataatagtagtgctacctcatcaggtttttgaaagattcaaacaagccaaatgtgaagcatttagaatgtggctggcacatagtaagtcttcagtgaagattagctagtatcattgtcctaaagtgataaatgtcaccaaaagggggagtagatgctgcaactagaagttggatgtagtcaggctgctaagacatgagacctgaaaatccagtttgctgtggatttgccatggattcccatggcgactctcaaaagcaaagttgctcaaaggccatttaaggctcataaagtcaatggttgttttgcctaagaaatttttgtggaatgaacaaatacaacatagtaaggataatcataatagttaccatatgttgcatgccacattccaggcactttcacatgtattgatggaattaattttcactacagtcccgtgaatagttattattattatcatctgttgtatgaatgaagtatttgaggttcacagatgttagataatctgtccaaggccacacagctcatgagtgttgaaagtaggattggaatctcaggtggtgctccaaaagatgtccactgcaggccacaggattctttattttaacatatttatctatggctgctattaggaaccaactgaagaacagtcctctctcagatgttatatctcctgtgaaaatttcagattgggattgaaatggcccagggaggggccagagacagctatgaaagagccacagatatggtgaggagtgtgtctagatgatccagacacctgcggggattgtgcagagcagagctctgcatcaggccacatgcaaaacatcttgggcatctgctgtctggggtagatggtagtttggagagtcccctggcccgatctccaccattgcctataccaggtgagaactgaagctccattctctgtgctaacctctggtcagattaataattctatatagcagcctgaatcctaccaatatgatgacaaaagtctttaattatttatttatttttgagacagggtctcactgtgtctatcacctaggctagagtgcagtggtgtgaacgtggctcactgcagcctcaacctcccaggctcaagtgatcctctacttcagcccttggagtagctgagactgcaggcaggcatcaccatgcccagttaatttttgtatttttgtggaagacttggttttgccatgttgtccagggtggtcttgaactcctaggctcaaggagtcctcctgcctaggcctcccaaagtgctgagattacaggtgtgagccaccgtacccagctgacaaaagcctttattcctttctaccctaagactaaatccaactctgtggcttagactcagagtcctctgtgttctcacccatttgtcccctcttcttaacctaaaggattgccatgatatgggagattttgatgcctgacaaggggtgggggaagcagaaaggaggagcgagtaacaaaggccttctccagaagtgagggaggccagcctggacacagagggcctgtgtgctatgttagggagcttgatctttatatagaagactattgcttcagagtatgttccttggatcaataaatccatacatctatatagttcttacataagaaaaataaaacaaacaaaaagttaacatgttctgggtaactttgggtatggcttggttaagcaaagttgaatgtttcttcactgcagaatttctcagagcctttaataaactaatgtacattcttagcctccaaaagtgggcagctctgtcaaatctgatttgacccccatcatcttaaaatgcaggagcaggccagtcatggtggctcatgcctataatcccagcattttgcgaggctgaggcaggtgaatcacttgaggtcaggagtttgagaccaccctggccaacatggtgaaaccccatctctactaaacatacaaaaattagttgggcatgctggtgggcacctgtagtcccagctactcaggaggctgagacaggaaaatcacttgagcccgggaggtggacgttgcagtgggccgagattgcaccactgtactccagcgtgggcaacagaatgagactctttctcaaaaaaaaaataataataaataaataaacaaaataaatgcaggaacattttaggtgattagtgttctgagaggcacatctgagaaatggtgttatggtttatggaagccatggaaggtgacatggagactagagtccaaacctacctcaaaacaacagcttgacctttcattttacatttaattagaaaacaaagagaggtccttccacaaaatccaggagtaaattaagctatggaacatttagaatttaagcatcaagaaaagatcagaagctggggcatctctgggccttaaaatgagctagtttcttctacactgggatttagaagttaaagactaatgactttactgggtcagggttaaatgtcaaagagcaagtcttccaaggatgaaatggttaatggtcactggggttggaagggtggtgttagagaagtgaaggtaggcacccagggaaggtcatctggtgtcagagctactgacaggctcaggggcttacccacaggctgctgggataaccaagtagaaattcacaaaacgtgggagggaaacagccatggttcttgcctaaggagagaaaagggacatcaaaggccaaagatgacactgatgatgactttaactcccataattacacaatgtccaaacaaacagtgaccttgggctctcgaaccaaatgacaaaagtcagtaggacagtttgtgacgtctttgtcatcaaaacactgggtaggtaaactttaaagcccccgacagcttttcctctatagtatagcaggactgtgatggaaggcacagctcactccagcactacgtgaccagcacgttcctggagccgagagaatggtcaggtcagaaatcttggatgggttaagggtgggttgtgaggggtgatgagaagggaggaatcagtttgcattcctggagagggaggagaaatgaaaaggcagaaaaataggttattataagacactcatgagagcctattttggtatttggcaaagacacttgcttttcccaggggctgaaataatgtgatttcgctcctgtgaatgagatcttccttaggaacattgaggctcagagaaaggagtaagagttgggaaatataatctgattttcaggaaaaacaattggtttctgaaacatcttaggatgctgaataaaatgcacaggtctctgcatgccagtgcctggcagtgagccaagtacttggtacgctgaatgaattaatgaattaatggaagaaccagagttatttttatctttccacatcaaattattccccttgaaatgactgcttaaataatatattaattacatgatactgatgatgactttactctcatgattacacaacatccaaacaaacagtgaccttgggctcctgagccaaatgacagcagtcgataggacagtttttgatgtctttgaggtcaaaacactggctaggaaaactttaaagcagctgacagctttttctctgcagtatagcaggtaagtggtgacttggaaaagctgtatttttttaaatcaaaatcatcatccatgattggatcttgaagaattgaagaacccaaaagtgtgtgacgcagtccttaatgaatatgtcctctactttcagcctcatgttctttctacaggttctaatgttagtgtcttcagccatcactgtgaagaaattgacacaaatgaaaattcatgaattgcagctctgccatttccctgttgtgtgatagctgtatttccactagcaagtgcaagtggctttaactaagattttattgtcaagcagtttaccctgctgtcaaagtcttgggtccaaagatctaaagtaaaagtgtcagcgatgttgcactgctgcctgtatttggtgggaaaattagcaggtctggcttttgtggtgaaaaaggtattttttaatagtactaaaggcataagatatttggtcccatgttattctctgggtccttgttaagtatttctctttcctcttgcaacgtagagtgtgggtgtgacaatgaccaccgcctcccgcttgctattcatttattccttcaaattactctttctttttttccattattggaaaaaatggctagtacttatttattctctcaacacattattcagtgttcactaggttctgggtgcagctttagggtttaccagaagtgggacaatattcagtactctgttctttcgcatgttagtttcccttttcagaagtccaagatgatgataaaaaaataaaataaagaagtcaaatgaaacagaaattgcaaatagcagttactcaggaaaccagaaaacattgagaaagtctggaaaaattggatttgagcaagggctttctgtatttgcttggcagtgtggatgatacaaagttgtgaagaacctggtaattttccttgctacaataatataaattacttattctgttcacattttggcctatttctcctgtttaaaatgaattccttgaagttcatttgtttatagtttcagcttttaaaaacatgattaatattatgatcataaaagttctacatgctcattgcagagcagtattaaaacatataaatgtatgcataagggaaaaaaatcacctgcaatttcttcaactagagataatcactgttgaaatgttgtattccccttctagtcataacatacatcaatactatttgagatcatgttacatactttatatctgttttctaggcttcccccacctccctttttttttttagacggagtcttgctctgttgccaggctggagtacagtgacacaatctcgactcactgtaacctttgcctcttgggtttgagcgattctactgccttagcctcccaagtagctggggctatagccacctgccaccacacccagctaatttttgtatttttggtagagacggggttttaccacgttggccaggatggtctcaatctcttgacctggtgatctgcacaccttggcctcccaaaccgctgggattacaggcatgagccatggcacactgcctttcccccctttttttaaagaaaaagaacttaaaccattttaatatactataaaattcttattttaaattcttttctagccttggttgttgtcctaatggtcactcttatattgtgtggacaatatgtaggacctgactatgctcagctttatgtacatgcagtaggttgccatatgagaatatgggtaaggaattctgtcttttaatggctctgttatacttcactattgctgtggtgtcatttgtttaactattttgcaggaattggacttgattgtttccagttttcttattttataagtggtgttgcaaatgaccatctttgtattgcatttattttacttagagattgttccatgcaccatattcccaaaatgaagttacgaggttcatgaacataaacagatttataatgctttttacccattttgagaaagattaagcctgattaatactgctctcatgttgtccgaatgtacttgtttgcacaaagccccactcctgtctaatttaagtcattgatttagattttctgcctttaatagagatctaaaattaatggatttgaatttgcttttaaaaactcttactttttttttttttttttgatatagagtctcgctcagttgcccaggctggagtgcagtggcacgatctcgactcactacaacctctgcctgctgggttcaagcaattctcctgcctcagcctccctagtaactgggtttacagacatgtgccaccatgtccagctaattttttttttcttttttcttttgtagttttaacagagacggggttttaccatgttagataggatggtctcgatctcctgacctcatgatctgcccgcctcgacctcccagcgtgctgggattacaggcgtgagccaccatgcccagcctaaaagatcttacttttttataataagagatacaatgcttgccataaaaatgagcaaattaaatgagtaaaaagttaattattgcctgaaataacaatacttaaataatgtgttatcagaaaattagttttacatttttatgtaataaaatttacataaagactttatatttgaaagaataaggattacttttattctcattttccccatttttcttaatattctctctaaattgtcagagattttacatttgtcaatgccattcacctgcttagtctgtttcaagacaagcgtaaacgacaagagcaaaggaatattctagaccctcagaagaaatttcaaatgtctgagaaggatccttgaattttgctgccccagagaaaagatacgttatattcttgatcaaaagtaggtgtcttggaatgcaccgcatttttgcccacattgcaaccaagggccttctgcccagggttccaggggagtgctgggagttgccttgagtcttagccacctgaccaagtgcactgccataacgcatggccagaggtgcccaggaacattagcagatttttgactaagcctttctactatctcgggacaccaatgaggtcaaggatcttattcccagaaattttatagaacaaacacacacctgcccataacatcactgttcaaaatcaattagggatattgtatgggtcgattataagtttgtgaggatgaatttggaaaaaaacatcatggggtcccccagtctaggtgtatttgatggtattcaattcattcaggaactctcaaagtgtagctaagtacaaagttatagaatctttagaatcattactgctagacatcctacaacctgctcagaaggccacaccaactttcatgggcagttggccatgcaccatgtatttcacataattattttgtttgtaactaaagagaaacagctctgtaatggacagtgttgttatccatctgctgtgccttacatatgagaaaaccaaggctcagagttacctaacttgttcaaggagaccatcagctaagatttttttttttttttttttgagatgagatggagtcttgctctgttgcctaggttggagtgcagtggcatgatcttgactcactgcaacctctgcttcccaggttcaagtgattctcctgcctcagcctcccgagtagctgggattacaggcacatgccactatgcccagctaatttttgtatttttagtagaggtggggtttcaccatgttgactaggctggtcttgaactcctgacctcaagtgatccgcctacctcagtctcccaaagtgctgggattacaggtgtgagacaccacgcccaaccaactaagatgttaagactggatctataactggcctcactccctctacagctggtgcattgaccacttcctgctgttttgtgcagacacgcagcaaaacaaggcagtcagcaggcacaacccatggatgctttttttcccagtgaactccagtacacttacaagtgctaatcatctgaaatggtgcgaattatggaaaaacacagaaaaaaagccatcaaagattattggagtgaagatgcagtaggagggtgtgaagggttgggaggagggaagtcaggtctctctgatgctgagattctgaaagtgagctcaccatggttggtctcattcacagaccgtcttacctttggccttttttcatcctgagagtaaactctataatgttttaagtctctctaccaacaaggtagaagagtttgaactcacattggccaaaggggcctgccacaagggaaaaattctttgaaaccaagcaaatttttacatcatgctctattgtttgtttgtatttctatgtaaatgttatggtttaaactaccatgtttctctgattataaacgtaatcatttataggagtttccattgattttataacagcattgggataagggaaactacattcattatgagacacattccattttcagaaaacttaaaatatgggaaaatgtataattagaacggaggaaattcaggaagattttgctgttcgtggaagatgtgtcatgtttctgttggggctaggccaggcttctggtatctatttgtgtccacatgagagtaggcacgtatttcagtatgtggtgcaaagtctcagatgtgttcttgggtgacagggatgcgggcggttgggggtaaaaagtgtaaggaattgcccatggctggctccttctgcctccctgacatctgttgggatagggtttctcgacctcggccctattggcatttgggtcaaaataattctttgttttggggggtgatttgcagcaaaaccaaaaatgtgtccagacattacaaaattgcccctggctgagaaccactgtgttagggcaaaagagaaacgttggaagaggtgggccaacacagatcctttgatttcaggattttttatttattttatttatttatttagttagttttaagaaacatagtcttgcgttgtcacataggctgggtacagtagtgtaatcgtagcccactgcagcctggaactcctaggcttcaaggaatccctccacctcagacttcctggtagtggggactccaggtgtgcaccatcatgcctggctaatttaaaaaaaaattttttttttgtagacacggggtcttgttatattgaccaggctggtctcaaactcctggtcccaaccaatcctctctcctcagcctccaaaagccctgggattacagacaggagccactgcacccagctaagactttctttttatatcagaaggcctcttgtcccagtatgccactaataggatacctttgccatttggtaatagatttgtgttttggtcttctatctgtataacgatcagacccaagggtttctagggactcttctaggcatgaaacttttctcagtagttgccaggattataggatttttaaccagtggtaccattctaacagtgctgtctgttgaaatcctccctccttaaagtttaaatgtatattaatattgcactaagtcctatgatcatactctttattcacttaacatcctttcaagggaggctttggcctgtaattgaaataggagtaaggagtcactgggagccagcggggcaaaagcacaataataataaatgcctaaatactatttaacatgcaattaattaaatatcaacatggtctgttgatggtagaaaggtgacaagactttcttcttttctgaaggtctagctcatgtccacccttgctattagggatatttgccaaggatcattgaaagaaattttgatcatctgaggtgggaattaatcatttgtcttcgagctctctattagagactcacatattttaatgtagctaaaatttattggaaaccctattgtgctcttaataggtgatttagcagtgaggaaacaagttccaattctgttctcaagaagggtacagtctagtgggggatgatgcacatccatcaatcacacagatcaacaggggagttagactttttcagttaggtcagggaagcttcctggaggaagcaacatttgattcaagattggaaggatgagcaggagtctgctaggtgaagaagagaagctgaggcattgcttctgtgcatttgtatgaacggttaggggagtggaaaccttaagagcaaagagacaagaaaaggagaatgtcatcccaaccccatctgtctctatcagaaggtttctaaacagccacattcactccattctaagtcacccttagttgtaaattgcactcacaatgtaataatagtttttcaagtaaaaagagacatactatagtagataaatgttgatattgactataatatgcatcccaatttcagaaatgttaaatcttaaaaaaaaagcctatcttagaagcaaggacataagatatcaaaattcaaagtcggtcttgaaatgattattgctattattgtcattgcttttatattgaggtctctggttgtcactgctgggacagttttcattggccatctctgctgcccaggcacatgcttccccaccacattgataggatctcttgcttcctgctcaaacctcccctcttttctccccagctccttaattcccaatcccttgagttcccattgatttctcgcatggtgcagtttagccatgcatgaactcactgccaaccatctcaacctaaccctctgaaatgtatccagtaaggtgtattacaaaacaagggcagctctctcagtgcagtgagcatgccctgagacagcttgcaattctagacaggggtgagaatatcaggaggagaaattgtgccactcctttgcagaagggaactggggccttactgctttctcaagaggcagcattggaatggcttctagaaagatgggcttggccttgggatggtgaaaatgctctctgtctgtgacctctggggctcagccaaggcagggatggataaagaactaacctgccctgcctgccagccaaaaatagtgctaactgcgtcacagagcttttggtaattaaaccttccctctgcagaaagctgtggcttggactgataagggaccgtggatgtgttaaggtaattcactcccaacactgacattcttcactcaacatcagaagcaggctggaaaactaagtggaactagatgaagtttgagattcataaccagggcatggtatgtaagtagcaaaaagacagaacatgtgccaacaaagtttcttatagattaagtagttctttgtttttactctgagtcatatggacttttttcctttttggtcagtcagcttagttagcaactttgtttctgatcataaaaatgcttcatttttgctgtagaaagttggaaacataaaggaaagaagcaataaggaagtaaaaacccatccatcatcttatcattcacagatagccactaggaaccttttgtgtccacttttttctcgatgcaatgtacaatttttataaaattatgatcagggccagatgcggtgactcacgcctgtaatcccaccaatttgggagaatgaggtgggtggatcatgatgtcaggagtttgagaccagcctggccaatatggtgaaaccccgtctctactaaaaatacaaaaattaacagggcgtagtggcatgcacctgtagtcccagctactcaggagattgaggcaggagaatcgcttgagcctgggaggagagggttgtagtgagccgagattgtgccactgcactctggcctgggcaacagagcaagactctgtctcaaaaaataaataaataaataaaaataaaaaataaaataataatcagagtatatctgcagttttctgtcttaccttttaaatgtacacacaatatactcccaatcatactgtatctgatggggtcattcaatattacttgaaaaccagactgtttttagcttataaacctccttagggcctgagctgagtggggtgaagtatctgggagaacacacgtccatgtcagtaggaaagtgctctggtctggagtgttcttcagacaggatccatggtcccaggagaaactgacatgctgtctgggaaagcagagatgttctggtcattttgggaggcagagaaggagtgggaagttcactggggagagcattatgcagagagaagagcatgggctcgtaagtaaagcattcctggcttggattctgtctctggcactaatcagttgcctgatcatggttagcctacctaatcctctaaacctcaattttctcacttataaagtgggactaatggtattatgtatttcactgggttattggaggatagtacctgactcagagtaagtactcaatgaatgttagccatcattagtatattatttttattaatctctccaacaaggactgggtcagctgattctattggatgaggatagtgggtagatgggttcactctttaagataatctttaaaaggaagtaaaaatattggtggcttttagtattaatatgttctctcagagagaaggtgtatttaaagtttaggggagtcagaagaatgaaatcttaaggctccttccatttcattttccagaccatgaattgaggacacttcagtgcctggtaggagatttgggttcagaccaacaagcagctccaatctcagcccaggcatcttcctaatcaggcttgatgggcagctgcagctataagtatttaaataaatcatcaaagggtttgttgcatcagccaagctttttagagtcccaaatttaaaagctgagataaaatcttatcttgctgtgtctttacggaaggatccccagatacctggggttaaggtctggctcaagtcaggacctaggaagcagcatatgttgactggagagacctgggtttgaatcccagctgtgcatgttattagttatatgaccttgggcaagattcacaaccttagcccttctttaccttctcaccctaatctggggtaaacatttgtaccttttggggttgttgcaaggattaaaagaggcaaactctgtgacaatgcctagctccatgctggacttaatataaatgctcaataaattttgacaccatcttctatcccccatatcctacaagataaaacaagacagaatgagaaagtgcttaggtttcttcatctgtaaaaaggtaattggaaaaagaaaattaaaggcagaagctcactcagcctctagggtctgggagatgtcttcttgttgtttaagttttagtctgtactttctaaaaaccagtagtgggcctctggcatttcctggcacatcttagcagataggtattgaatatataccatgtgccacagtactgcgccctttgtatgggtgatctcatacagtgctttcatttcatggaggagaaaaactgaggctcagagacatgaagaaactcacccaaagtttcttagctgttaagtggtggagctgggattggtacctaggtctctctgtctcggagcccgtgtttgtaactaccccgaacataggtctctaaccatataggactcctactccttgctggaaaacataagtacaaaacagacaagaatggccttttcaattactaaactgtaagccccctgagcccaaagactgtgtgttccccgctcaatcccctcccaggcatgcagctaataggaaaccctggagacatactgggaatctaagaatctgggttaggattcctttgaaatgcagatgtcctgtgagaagtaagcacctgatttcttatatacctgagttcattagatacttatctttgatatgggagagagtagagctttctcagatacctgggtggctagctgcagcgaaaggactgaaaatctggaggggaagagctcttctctctctttattttctcactaacggaagggagtaaaaggcagaggaagtgggtctgagatgaggaagacagtaccacagggttcataagatgtacacatcagaattcctggcttgcaggccctgggcattggctggacaaggtttgttggtctctagggcacagaaagaatctatgcctccgaggattcatagaaaattaccacttcctctgtcattatcttttatttattattctctgtgatctgttggtctttgattccctttgtatttttgattcttttgtgattctccctttcgatttggcgctggtttttaccctgatctcatctgtatcgtccacacctcaatgcaggcttcccgcgcccctgcccgggctcccgcagtgcccccatctacatccctgcctccagtcttgttcattgctgctgccagattcacctccctctatgtccacctgttttggaaccttgccactcccatcctgctctgagcttttgctctgtatttcctctgcctgatgtatcctctcccctttcctcttccaaccaaaagaaagtctacctatagccttccaaactcagcacacatccttctcctttgggaacctgttcccaatgattccctcaatttctctgtcttttttttttttttttttttttgagaccaggtctcggtctgtcgcccaggctggagtgcagtggtgtgagctcggctcactgcagcctccacctcctgggttcaagcaattctcccacctcagcctcccgagtagctgggatttacaggggtgagccaccacgcctggctagtttttgcatttttagtagagacagggtttcaccatgttggtcaggctggtctgtaactcctgacatcaggtgatctatccgcctcagcctcccaaagtgctgggattacaggatgagccaccatgcctggcctctgtcttcttaattctagtagtgctgatgtgtgcctacatcagctggtcatgtgcttcctcccctctgcttagggcattgtttacctcttggacatgacttctcacctgtttgctttcctcccatctatgtcaggagttctttaaatttaatatttcttcttcatttattgagtatctgctacatgcgagcaccctattgagggttgagaaacaaagaggaattattaggtttgctcatcaataaataattgaggtgagacccttagaaatgtgtgtccattggcctgcttcaattttagacagttttttcaccaactccaggggaggccaagccaagcatgcctctggctcttgcattccacatgtctcttattaaaaacagatggcccaggactgctttggccattgcaccagttgacaggcctgttcctggggaggctctgcttatgaattctagaatcctttagctgcattagtaacaattcctcctgcagagcaatgaggggatagtgtctgtgggctgggcactttccatgaataagaaaggcctgaattcaacccaggtgccgcccagacttgtcacatggagcttggcctcaggcaaggccaaaatgggaagctagcttcagaggaagaggtcccttctgccacttctgaattcctgaagctcacaacaaccagcttctttgtcctcatttttcttaggaacaaatgtattcatttaacaaacatttgtggctgagtgtggtggctcacacctgtaaactcagctcttttggaggccaaggcaggaggattgcttgaggccaggagtttgagaccagcctgggcaacatggcaagacttcatctgtattttaaaaaattgctgagcacaatgatctctgttttcccagtgcctgcttggctcagggcctggcaccgaggtaaatacaactgctgctctaaataagctcatctctaagaaatgaaatgaatgcaaactattgaaagcaaggaaggcaaatacgggcatgcatatgtccacttcttaattttgtgtccacggcagatactgctaattaatcatagaactcattcactttgaatctggatttaagtgaagattcagccttggaatccttctgaaaacattgctccagcagccactatcagtgatttggactttgcccatgagatgaaatctgcttgtgatcctttttctggtctttaaagtggtccaaatgccactggaagtggggagcaggggttcaaaacagcaagtatattgaattaccatgtctgtccagagcagactaggagactccattcatgggagtgtccaaaagtaacaccgctattgcagaagccctgaccattgctccttcgcacttcttctcgctctcatggctcctttctgtctgacttttgtggactcctcttcctcctcatacccctcagaagtggctgttttgcagggttaaactcttatccctcccaaactcttttttcttgtctgttttctcagttggagagctaatttcttccctcagctttttctagctttttaaagtagttaactgtcaaatctgtatcttcagagatgtctttttccaaagtctaaactcctccctttggcactgaagcacttccaccatctgaccctatttatctttccagtcccctttccagtcccagctccttgcctacagaactactgctgtgagcacgaggtcttcttccatcctgtgtccaagatgtggggtacccatggggagtcctgctcccatgccttggcacatgcccctgccctgcccctcttctctgtttggtctgtcatatccatcctatgagtctccgcttcactgtcatttcactgagaaagccctttctgacttctttatgatttcagaggataataagtgccatgagcagaggatcttactagcttacgctttgagtcactcaacaaacagttattgactgcctcctctaagtccctggcgtatatgacgtgaacctgccctcaaagagcctacagtctgtttacatttctgtcattagttactcttgtttataggtcatgtctctgccattagatcgaatgccttgtggtccagagctgagtcccagtcactgtatcccctcaatcccctgggtatgccagatgctcagcacatcccgagttgagtgaaaggcagcttctttccctgtctggtttgctggtggctcttttgagtgtgtgattcttggggaggctcataaagggttgcagagctggcaggggaaggagtagcccatggagactaagggaggaagaagtccctgctctatgcttgaccccagaacagcaggaggtgggatggaaatggatgcctcaaatggaaagcagccatggctaagatgcattaagaacatgggtctaggggagggatagcattaggagaaatacctaatgtagatgatgggttgatgggtgcagcaaaccaccatggcacatgcatacctatgtaacagacctacacgttctgcacatggatgccagaacttaaagtataaagaaaaaaaaaaagaacatgggtctgcgttttaattgttgcagctcttatgcttaatgattgtgagaccttgagcaagttacttaatttctctgtgacttggtgttctcacctgcaaaatgggtcttaaaacaatgtcaactttatagagaggttgtgaggtttaactaagaaaatgagttaaaatgaatataaaacatttaaaataattattggtacaagcattggctattacttagattttcctggcagtgggatttactggtgattttcatattcatcattgtatttttctgtagacaaaatgtatattatttagctcatctggaaaatatattgtaaaactatttctttacctttttttaagagacagggaaagagtctggttggtgaaggggttatagttaactctggtaacctctgccccaggtgctgtgtgggtatttcatggtgtgattggtgtggggaggtaaccttcagctccccgtcttctgcctgtccccatcactggtccccctccagtcccaacagtcagatgctcacagtggcggtgctgacctttctgaatggtgcaattattggcgcccagtgagccttgcacagggaacagggagtgaaatcacccagcacttcctctgcaaagaggatgtgatcttcagacagtgcaatcacaggcaagtgacctcagtttcctcagaactcagcagaaggttctgaaagctggaaggccatttgcagaacccaggagagaaaggagggaagacaaggctgggtttgcaaaagcaggagcaaggtctgcacgttttatgaagtgttttacagtggagctgtaattggaaccctggtatttagcaagagttatgaggtgtgatggtcttagcactgcgagtcctttggcggcatatgtgatactggcatgaaacaggccaagcatcatggactggattgcttgggttcagcatgctgcttaaatcggcttgtttattatttttaaaaggactatttttttttactcttggggcattcaaaactccacttagagacaaaccaaaaatatttctcagttacgtgctcactgtttgaatcagagctgctaagcctaattggttggtccaattctcttactaccttctggagattaaaagctcctctagctcacttccaaatcagagtggatggaatttgatccaatccaggtgctcagggctccagaagcccttcctgttacagagagggtgagtgagcaggccgaagattgtgctttttattgctcgaagatagtttcctagtccttgaagctgagaaagcaggaagggtctcccattctttttgaaattcagaacaagcacattgtctgaagagggaggttggccttctttttgtctttcaccatgtgagggatggcagccaggactcagccttttggaatcacagagccatgtcagaagcaacaactggttggagtagaacaaaggatcttaactaggggctgtgggtaaaggtcttccggggtctgaaattgtaaggaaagtttgtctgtatgtgcattttcagggggagagttccataatcccatcaagcatgcactcacagaatttgacctgtgcactgtgtagtgagagcttgctactatttgtagcatataccaagcttgcttctgcctcaggcctttgcacttgctgttccttctcagaatacttttccccaagatccacatggtcactgtaactttcttcaagtcactggttaaatgtcacctcctgaccaccttatattaaatatcccgctcaacagtacattgcttcattgttctttacagtgcttattccatatgacattgtttgttattacctccctctttcagtatgtaagcctctatggtattcactgctgtatctgtagcatatagaacaatgccaagcccagagaagatgctcagcaaatgtctgttgaatgggtaaatgcatgaacaaattaataactttgattatacttaggtctcacctgtaaaaaaaaaaagttttaatgatgggtaaaaaaggatctgagttctcagtggggccacttctcagccatgtgtcttgggttccagacatttcatctgctatgaaatgatcacctgacattgtaatagatgtttaggcagaagttttcaagggatttcacaatgcttgtacatcattattaatttctgtttttcgaatacaccagatctgtgtgtgtgtgtgtgtgcctgtgtgtgtctgtgtaaaaatgtgtgtgtgtgcctctgtgtgtgtgtctgtgcacatcctggtgcacagatactattattattattattattctggtgcacagataataggttatctccatttgaaaatggggatgctaatactactgctactgatgtgctagggtaggtccccaaattcccaggggacctccatcctggttggtgtccaggctcttgacaccagagccagaaggaattcaaggactagtcaggaaaatagtgaaagtatggagagttattgcaagtgaaaagtatacactcaagaaaggggagtgtgtgtgtactcaagaaagtcatgcccagtggggtttgcggcttctaactttacgagtttctttaaccaaggagtggaatattcatgaaggttcctggaaaaaggtgaagatttctcagaactgtggtgccacccatttttacaccaaatatggttgtttcggaactgtcatggtgctggtgggtgtgtgatttggtatgttaatgagtgtataatgaggtcctaggtgaaacctaggtcaaatccagtgctatgttgggtccagtcggtcctagccagcttgtcccacatcctgtttttcagggtcttttatcagcccctagcctatgctgctaattcaacagtttcctttttgctagttttgtgaaactgcttctattctcctgcaaccaccctgtattattcctgtctcactactgacacaccagtgtggtttttgtgacttgtctgaagcctcacgatgtatcagagcaggatagtgatagaagtccctcttgcaaactccagttccactctagaaccattagtgttccattctggaaaagatgtcctagtagttgaatataggtggtcaagaccaacttggggctagtattttctgacacatgaacttgagtgtgaatgggatataattgcgtctgctactgaatgtgtagggttaaagttcagaaaagagatgctgcattcttctctaatcttataaaatttcattttatttttttaattttatttttttgagacaaggtctcactctgtcgcgcccaggctggagtgcaggggagtgatcactggtcactgcagcctcaacctccagggctcaagcgatccttccacctcggcttcccaaagtgctgggattacaggcatgagccaccacacctagccattgttctctaatcttacatgaggcagcaaaagttaccccactagaaattattatgctgtggctccttttgaaccaaggcaaaaaaaacaaacaacaaacaacaacaacaacaacaaaaaaaacactcatttgagaggtacattacatctgagagaaataaactctggtctcttctagacaaactgctttgattttcaagcataaacctcagactcattttgggcagaaagttactttttgtcggtatctgcatcgggtgagcttggaggtaaatcttcacacagagcttagtacatcctggataacttcctttataaatgacagcttcttagactcatcttttaaaagttaatatttttcttgttaaaacaaatgctgtcttcttccaaacatcttagatggctgattcaccatttcttaaaagtagttttaattgtacagcatgatacatttatatgcattattttaaacgtaaaagcctagcaaaaaccctacaaaaatatataagaatctccatttacacacctgtctgcaaaaccctcatccattcccagaggtaatccttgcctatcattttttaacttttctttccagaatttctttccaaacattataaatatacacatgcatatgcaattttcaacttcttaaatacatcttagatatttttccatatcagttcatatagcaatgcatccttctttttaacaggtccatacactttcattgcatcaaaatatatcagaatttattaagcactcctctattgatgacatttaggttattactcagttttttacttttataaacaattctgcaaagaatcgacatctttgtgaacatacatccacatttctcaagacagatgttaagaaaaacattttgggatgtgaaaaggtattacatatcttaaattttgatagaaactaccaaacttacccccaacacccaataccggtttggactcccatgttaaatttacctgtccttggcaatcacagatgttgtcaactttttaaagatgttttgtcaatttgatggcaaaaattggtgttttcacttactctgccctgattgctaaggtagttgagagtgttttttgcatgctgcttgtgatgttctataccttattaggtttttttaaaaaaatatttttaaattatactttaggaagcggaacatcacacaccttattaggtttttaacagggttttaaacattttcgtgaatacgactatttcagaaatgcttcttctccagggttgctatgcagctggtagttaaaatatgccttcatttattagtattggtaggtagtaaatacttaaatacttgttggtaaggtgcgccaacccaagttcactttcctcgatcttaagtctcgttacccccacttctcccctctacctctccggcctgggacctccctaggaggcaacaattaagaggttaatatgtagcacttcggggcgaacctgaaccttccagaggctgctctaatgcagttccagcctctattcagatagtttggcatattgatataccatttaaaaaatattttgacaagtcccttccccgctgtcaaccaaatgtactcaatctgtgttttatgtaagttcctggcgtctgggagattcacagtaacatactgctggtttgctccttgaactggtcactgctttgtttgtcaatttctcaggattatgcttacataatttccttttgaccttagcctccacaccataatcccagggggcacactgggggaataagatgacccttatgtaacttgttacataagagtccagagaagctgggtctcacttcagtgtctgcacagttttctaagaaagttcatttagttttctgttgtctctttcaatcaataaattctttaaaaaagcattccctttacttctgagatgccaaaggggaggggggaaccaggccaatactgattgcttctttgtagttggcacttaatggaagtgatcccatctaatttacgctacaatctttttcctttgtatggacaaggaaactgaagctctcagggactaaagtgagtggctgaggatcatacagctagaaaggggtagaagtaggctttaaagccagacacaggttcttcctacagaatatgtgtgtgattcagaattgtgcaggacagctctgtttcatgtcctattcttttgaagtgatagacattgtccactgactatactaaagcagatagggagctcagatcattccatggacttcaagtcccttagaggccagactgtggacagcccttttatctctgtgccagcgttgccctgccctggctccagcagtgcccagatggactagaggcctttgtggcctgtattttggactccttcctatcaccctttgccctttacctctggcttggcactgagttggggcagacaccaaaggaacaggtctcatgtaacatcttttcctgacatgagctgggtcccgttgcttcttctctctgctcagagaagtgacacgtgagcagagagctcatgtcagtgtgtctgcatggctggtattacaaagcctcaaggaaaaaagcttaacaagaaagcctgaggaaatggggttttggtcatttaaattttagggtcattgagggatgaagccaagagggctttgtcattaaatatatttttgataattccctcttatttttaatcctaacattgaaaaagcaataaatgcacataggaaaacatttaaacagagctaaggagaatacagtgatctgtgagtcaccctctcatttgagatacccattttctcagttctccctagaagctgctactctcagcaatattctgtgatctttccagaaatattacttgtaatctctatatatacaattatacatgtatatatttgtgcttatcaatcttctgtgtgtccaatatccatccctccatccatccatctgcccatccaacttatgctcaactctcatggttgaaaatcattaaaaaatgcttgaatccattctctcatttgatgtggtgtgttgagaccagtggacccctgacagagggtcctgtgagtcaccaggatccctatctgaaacccagtcctcatgataaggtcctccagctggtaaaggtgtaacattgagccacacactaaccaaacatctccctgagagattctgtttccataccctgcactgcatgtttccttctggagtctgtccccttcaaagcagagtataagaagatgccctgtggaacggatagttccagttaggtttgattttatgaaatctcttcttcagcaaaatctgtcctgactgactccttgacacagaagggccctgacccacaatcttgttcaccgcattgagattccctgattccatgtttcttgctgaatgactaaatatcccaacagagggaggtcaagtttctccccagcaaaaatttttcccagttaaatggcaagaatgaagagctgacaaatggctatgacatcactctttgtcataacttgccccaaattactgcatgagaagccagtactctactgggtcttgccatgggacagtcataagtagaaaacaagatgatcccccaaagaattgccctttagagagcaattcaaagacaggaaaatcacccgttggttgtgtccctgcttctagccagatcttctagagagctctagatgctgaccccttcatcttgaaaagctcagtggagacctgggtcctagcctctgccacttactggttatgtgatcttgatcaggtgtatcttagtgggtaaagtaattgtgtctatttcaaaggactgttttgttttagttgcaagtgagggaagcctaccttagtctgacttaagtgaactagagaatatatcagcttgttaaccaaagagtctagagataactttaggtgtatctggatctaggagctaaaatcttattattaggactgattctctttccatatctccttgtcctcaaacaaaggcaggtcattcccttataagctcccggcagctctggacacatcctagcagctaagaaacctcagcaaagaagagctcctccttcccactttttctagccaaagtcttaggactatatctcactggaccaacttggtccacatgatcacccacaaatctatgtggttatgaggatagagtatcctgattcaccagtcctgagatgggcatgggtcagttccatccaaaccatagggacgggagttagaaggggaattgccctgagaagtcgagaggatagaaccaaaagagtagcaagcagacactagggaggcaaaaaacaacagatttgttatgtagggtctaaaagaagggggtcaacaagtgttttctgtaaagggtcagataaatattttagggtttctgttgcaattactcaactctgctcttggagtgcaaaagtaaccgtagacaataggtaaacaataggcttcgctgtgttctaataaaaccttgtttataaaaatgggctgttgactggatttggcccatggctgtagtttgccaactcctgatctatgcagatactacaatcttcttgtcccacatattctagagacctgaacaaataagatctggcacatgcaaagcacttaagaaatgctagttattattatattgttattatttatgctatactaaggataataacaatgataatgttgatggtaattataatactaattagataatgagatatgatgaattatgagtcataagtcagcagtgtattccaggactgtttctaaactgttggtggagcttcccctccacatactcatagagctggaaggcaggggagaggcatccaactcaaacatctcattttatagatgagtcttaggctcagataagaggcagcacatgcacaagttcacacagcaagctggggcagttttggagtttgcagctgtttcttctgcaaccttaaaggactctaccctataggtagagtctgtttacacctactggtacacccatggtacacctgttataccatggtacatctagtacatttgaacatgcaggtgtagttagatagatattccttgagttttggatccatactgagtagtgtggtgatactgttggtaatattcctgaactggtggaaagacctgatttgtgactagcatgtgttatatgactcatgagaactccctgctgctgagatgactcagatgtctgttttacacaaagattaccaaacacctctcgccacgtttgaaaacaatgaatagttactcactgcctttctgactaccctctttgtcactatttctattcgcttagcatgctggcagccatttaaacagctagtcttctgtttggctggatgttggtaggaggagtcttctttaatcccccatcaacatggatacagagaggcctgtgggcacttttctctgtactcagtgtagacccattcataaaattcttcatgattctggcaaaaccctccctggattttggttaaccagcagctctgcagtagtttaggaggtggatattttacaaccacaactctttagctctttttttccccaaatttatttccaactttcatcactcagggtcatttacataaatcaatgcaaataaatatttttcttgagttaaaaaatgttgtggaatctgctggtcccaagtactacagagacctcagtacactgaatggaaaatttgggatttggtttactgttctaggccaagggtcagaaaacatttttctgtaaagggctaaagagtaaatattttaggcttcatgggccatatggaaagccatgagttgctgaccccggctgtgagtgcttgtaatttataaatataaaattggaggatggagtatttgaattggctgcctagttacttgagcatagtcctacaaactaaagtcttggatttgggccaatgtaggtttagctatgtgattctgatgcttactaggtcattttaggcacattggtggccttagttccttgtctataaaatgaggataataatagcactctatctgtttgttccttcctcctacttgcttatagaattgttgttgtgaggatcaaacaaaggaaaccacttatctcagagctagtatgttccataaatgttgagagtataatcaatactgttattaatatcaaagcccattgggtgaaagcaagtattcaagagcaaacaattaatgagctgattgggtcaccttcaaagggttctagatagagatcatcaagaaaccttttttccttctctttttaattttaattttaattttagttgtggggtacatgtgcaggatgtgcaggtttgttacataggtaaacctgtgccatagcggtttgttgcacttatcaacccatcacctaagtattaagcccagcatgcattagctatttttcctaatgctctacccccacccaccccaccccctgagaggcccagtgtgtgttgttcccctccctgtgtccatgtgttctcattgttcagctcctgcttataagtgaaaacatgtggtgtttggttttctgttcctgtattagtttgatgaggataatggcttccagctcaattcatgtccctctgaaggagatgatcttattcctttttatggctgcatagtattccattgtgtatttgtaccatataagaaaccttttttcagcatcttctgtgggaggatgtctgaagagactggatcagatttttaacaacattttttaatttaattttttaaaaattttatttacttaatttttttgagactggcttatgagactacctaatttttgtttttggtagagacagggtttcaccatgttgctcaggttggtcttgaactcctggcctcaagtgatccacctgccttggccgcccaaagtgctgggattgtagatatgagccactgacttgggtgagactggatcagattttgcttggcattgttgtgaagaccctggtagtaactcatgatagactgtcttcctttctccaaaaaatgaagcctcacattattcaaaggaaaatctcaaattaaaaatcctttcctgagcatttccttcagctatagagttcagctaaatggcatgcccagggtctggatcatcaacacagtctgaggtgatgagtgattacaggccagaggagtactgggacctctgctaatttgttccccgtgacttcatcacagctgcccttggttgtgcaattgcggttgctatggctgaagtttgaaagaacttggcctgaagctgcctatatggccaatatcttgggggaaatatagctttcaatagataggttttatgggtatttgtgaagaattagcagctatgaggttgaggttgggtatgttgatgagactggaggagaagtttgcttgagagtggcaaaatacaacaatacacaacaatacacacacttcccccccatcaatgcatacactcttaactactttggacaattgaaggctatgtctatgatgctgtaaataaagaaatattgaagaatgttattctcatcttaaagtatcaggttctttcagctgccatattgtaatgaaaaggggttgggtttggatgaagacagaccaaggtgtgattcccagctgtctactcctagctacccgacaatggaaaagttacttaactttgctttctcatctgtaaaatgactaacagtcacttctcatattgtacaaaatgtctgtcttaagggatgttgcaaaacaaaacaaaacaaaacaaaacaaaacaaaacaaaacaaaacaaaacaaaacaaaattgctctccagccagactctacaagctgtgagtccaactcaccaaatcttcacatcctgccccccaaagtagactggtaaagaaaaggctgaagtcatgtctcagcatttgagcattgctctctagtcattgctctagagagttctaatcttggggctactgataataaggggccatgcagagaagatagtgaagccctcctccacccgctgtaacctgctagtcagtcatcaatgattcttaaagcactgcctctgcctgctctcaggaaggtgagatgacgcatcacttgcttttgttttcacacctgtcccctgggaacctttgctcaaagttgtaaattatgtgacatctttagtaacaacaacgtgattcgctctgttaaatcactccctacctgcttgtagcctggtgaataaattttcattccttttttgaagattttacttaagcatatgaagaaagctcccatctgtacaatgatggaaccaaaagggacaggggctgctaacttaatgagagccaggcaggtatgcacatgaaatcaggaaacagtttgctttcctcttaacactctcttcagaaagacagcaatggaagcctgatgataaatagtaattgacacttcgcattggtgtcaaggagacaataagggatggtggggactgtggcagactggaaaatccatgcctatctaagggacaatcacttcttagttctatctgattgttgccactcagggatctaggtttcataattataagtggacaaaaccctttagtaactttcaataataatactgaaacaaagtgcattgaagtttacttaagaaaaacttaaatgagcagtggcttgcacctgtaatcccagcacttttggaggccaaggcaggtagattacttgaggccaggagttcaagatcagcctggccaacatggcaaaaccccgtctctactaaaaatacaaaaaaaaaaaaaaaaaaaaaaattagctggcatggtggtgcatgcctgtcatcccagctactcgggaggctgaggcatgagaattgcttgaacctgggaggcagaggttatagtgagctgagatcgtgcctctgcactccagcttgggcaacagagcaagacactgtctcaaggggaaaaaaaaagagaaagaaaaacttacatgattaacaatatcttactataaattaaagggttttagaataaatttccaactcttcgtcattaacattgttaaagttactgcttatttagcttagcaataaagaaaaggaatccttatcttaaggtgaataaattctgtgacatctgttaattttggtataacaatataggtaaaagttatgttttctttttgtttctgtttatggtttttgctttttttttttttcctgaggcagagtctcattctgtcacccaggctggacagcagtggtgccatcttagctcactgctgcctccgcctcccaggttcaagtgattctcctgcgtcagcctccccagtagctgggattacaggcatgcaccaccacacctggctaattttagtatttttttttagtagagatggggtttcaccattttggcaaggctggtctcaaactcctgacctcagatgatccacccaccttggcctcccaaagtgctgggattacaggtgtgagccactgtgccccctcactgcaccctgccaaaggttatgttttttgagtagctgcgaaagagacctgttcggagagtgaatacttgatcagctgtgtgcggatggggaatgagaccactccagggagccaacctgaggaacagttggcagttgtttgaagatccaccaggtttagctcagtgggctaaggaagttaagagcgagaactgaagtaaaagagaaagaggagagagactctgaagagtatggggaggaagaacaaatttgcttataatgaaattgtattgcatgttctctaggtagcgtgtgctgcagacttcttccctttctccccataaaatacaaaaacaatttctgccctaaggaactgtggagtcgaatctgctctcagataaaggacaatgggctgagtgtgtgttcagggcagatggggagagggaggatggaggaagaaagcatgattgtccatggcaaaaaaaccctgccatttctgtgttaactcaaagccctagaatatatttgagtccagagatctcatctggacttatctgtaagtcttatttgacccctctgtcttaattttgtcatatacataattcaatctaccagcttttgctgaacacctattaggtgcctggcattgtacatgtcattatatagaggattcaaataaaaacaggacatgttccttgctttgatgtcataatttaagagtcaacctgataagtcactcggcgagaaactatcctcagcataaatttgagactttacgagttgagcaggaacaagcctttcttccaaggcacttgggatgaaggcttttcacctcagttgctaaggaattaagtggtattgatgacccggtagccaacataccacatcatcaccacttccaggctgttgaggagacgtggtgctgctggaatgacttcaggaagtgcataaaaattcaagtcatgatcacttgtggtaattagaagccctagttgcttttggcaaggtcactaaacattagttggagcttctggtggacttcaggtttcctgatcctttccttgtgctttgtttaggcttctgtccaaagccatctccatgggagatgcttaagctgataaggtcctgccactcgctgtcagaggcacctcccagtccctgcagacttgggtccccttagtacctccaaatcactagtctctcaaaaattcttattaaacacctaacatggacagggcccagggatagatgtatggcccttccttcacagagtctaaggcctagtgggagaggcaaaccatatgaatgtgatgaattgtgcaacgttaagatctcagaggcatgaaaagtagattgggggctcaggaaaagattattcgaagagacaacatcaaagagtcacttaagatttcaggttcgaatgtgcgaagtaaaatattccccaaacaccacgaactgcatctgtgtatggaaaaggtgggaagagaatggatcgtgcaagaggatgtattgcacttgtggactgtgccatatcagcacaaagccctgtgaaccagcctgtctccacaagctaccagagtgataaatatacattcttctcttaagaagaaattctcctggtgagaacattacccttcaggggtgactggatggctcagtttatcacttgtaaatttagcagatcaaactagttgagaagcagttgggcagtcagtaaactgactggactgctgggatcaacagggactggatgtttagttcactttcaatagccacaaatttagcagctcattagaaggaaccaaagtaaagaactgcacaagtcctctgggaggccttgaaaggcttccatgggcgatggaagccatttagaggcatggtgttgctgagccttttaaacacgtgattagctaaagagagaaagatgttactttggtctgcatttctctagggcaggaggaagtgaggaagggaggagcagaacacttcagcctacatctcaggaagggaggctgagaagcagtgtctggctgagcatgctgcttctctgagcagatttctagaagcagcagaggtgtgggtgtggacaggaaactctctatgtctatcaccttctgctgaggctttttgtaaacaacaaatgagatagtgtagcataaggtctggtactaccttagtttcccattgttgcagtaacaaatgatcacaaatcaagaggcttaagacaagacaacttattatcatatagttctggaggccagaaatctgagttgggtctcactgggctaaaatcaaggtgtcagcagggctgcattcttttctggaggctcggaggaggagtctgtttccttgcctttgccagtttctagaagcttctcacatgccttggctcctggccctttcctttatctttagagccagcaacattgggctgtgtctttgtcatgctgccatccttcagttctttcttttctgtttccctttttcatgcataagaacccctgtgattccactggtcccacctggagaattcaggcgcatctccctatcttgaggtcagctgattagcaaccttctttgcaactgcagccttagagcccctttgccatgtaatctgacacatccacaggttctggggattaggacatggacatttgttggggcattactctacctatcactggtacagaataaaaagtcaataaatggttctattcattaccagtactccctaccaccttctttctctactgtgaaattacctatgcccttcagtttttcaaaggcagggcagaagcctcagctctggtagaatctgacgtgctggaggttgaaagtgagaaaggcagtctttgatgggcttaggggagtggggaagtgaccagcccttacctggaaggttgtgtgcaggtctgggaggcacaggcaagtaagtagcttgaggtgctttaaccaggatagtgacaaacttgggagaagagaaaaccctgagcagaaacttcatatgcctcaaaggttggtagatggagaagggattcagcttcattttctgtaagtgtcgtgattaagtgtgtgcaccttgttcaggccaagctgggttgccatcccagctcatctactcaccaactgcctgacttggagcaaatgtgctcctctctctgacctccagtttttcatctataaagaaggactaataatagtagctatcttgtgagagtgttgtgggaagtcaatgaaataatgcatgtaaagcatccagtacattgtctgatggcaactgttattattaggtagctccacaggatagaaaaataacctgtgggtaaaagctgcagggaaacagatataggctcaccataaaggaagggcttcttaatagtcaaagctatccaacggcgggatggttagagtagaagtgataagctgccctgcactgcaactgttcaggcattgaccagacattggtatgtggattagctgcaacagtgtcatctgggtgcttttgcaaaagcccagaggtctaggccccatccagatgtgatgaattggaatattcagggatggggcttggagatctgttttgtgctttgttttgtttgtttttatttaatatgctgttttttaaagagtagttttagttttacaggaaaattgagtggaaagtacagagagttcccatatacccctgctcacattcaggtgcagcctccccaactgtcaacatcacccaccagagtggtacatttatcacaagcgatgaacttacattgatacctcattatcatgcagagtgcttagtttacattagggttggctcttggtgttgtacattcatgggtttggacaaatgtatgatgatgtgtatttaccattatagtaacatacaaagtattttcattgccttaaaaaatcctccgtgcttcacctattcagcaccatgcccctccatagttttgccttttccagaatgtcatatagttggaatcatacagtatgtagccttttcaaattggcttctcccacttagtaatatgcatttatttttcctccatgtctttttttggatagatagttcatttcttttcagtgctgaataatattgcattgtctgcatgtaccatggtttatccatttgcccactgaaggatgtctaggttgcttccaagttttgggaattataaataaagctgctataaatatccctgtgcagtgttttgtgtggacataagttttggagatctgtatttttaacaagtgatccagagacagagttggggccactagaccagataatcatttgtccagaggctgagaggggacaggaagactctctagtccagaaattctagggttccatgactgttgtatgtagctcttggatcaggctctggtttggactaggtgttaactttcttctctctgggatccttcccatcccccaacagcaaaatcactcttttggccaaatgttcagtgtcgatgtctattgctagcatgaaattgcctaatataaagagcaagttttctcgggctggagggagagtgggctgaccagtttttccaagtccaggactgacagggatcaaatcctagctctaccatccattacatttgtgacattgagcaagtaacttaaccattcaatgacttcatttttccttcagtaaaagttgctgatagtagtacctatctcctgaggttattgtgagaaatcaataagttcatatataagaagacttagaaaaatacctggtgtgaagttagttttgagtaaatgttagctgctgtcatcattattgtcaccatcattattcttattattaccagttaccagacattagggtccctctgatgggggagtccttcccggtgaagaaccagagttggagtgaacccttgaggttatttcacagcagcaagtgctggctgagtcagtgggaataggatggttcctgtgtgccctcgttgcctgaagggaggagtcagttgagtggatgccattttcttatgatggtacatctggggccatggcaccagcagcatatattgtccaagacagacaacaaggccatagctccccagagctcactttgccttttctctcatttagcagcacttcctctctctatcttccctctccatgtgctagaatgcaagtctcataagtagctacctagtgccttggtgtagatggtagttctaacatgtccattgctctgtaaataccccaagaaagagtatacccataaaacactggactcaaaggcaaaggacagcacaggtttaactttgctgcagaaccacagcacaggtttaactctgctacttccaagcttcatgagcttgggcaagtttcagaatcttctggagcttctgtcttttcatttctaagatagaataatccttccctctccgggatgtcattaactcttgatgaatgcaaaaacgctttttaaatgacacaaatgttattattagcttatttgttagaaagttaaactgatgaaatgttggttattatttacgattgaaagatgaacacaaggagaagagtctgcttgggttcctgttatggaagacaagaaaggaaatgtatgagagttctttgctgttatgggcatggaagagtagaaggaagatgaaggccacaaacttcttctttggccagtgaggtcactctgttataacctggactaccttaaggccccgctgttttgcctcatctgaaggagatgtttacatgttcccaaagtataaggtgttctttgggcaaaattagtacctgttcttttgctgggaaatccaccagtatgggaatcagccatttaaggccaaagatagatatactatatgtatttacttctaacaccataatttaatttgcctatttttcaactttagctcaagtttagcactcagacaaaaaagcacacaaatcttacatgaatagtgtgattaatttccacaaactgcacactcatgtgaaatgagcatctggattaaaaaggaaaaaaaggagaataaaattgctagcattcaagaaacgctgtggaggcctcagaatttcaaacacggttgacttcaagactgatcctggcaatggtatgcagttagcaaagtttacgtcatttatgttttgacatctccttttgtctggcttccagatatggttctgtccaggacctatattaaggggttcctccagacaattctattttgggggatggattgagaatctcctttatactaaggtgtcagtgaatgggttgctttttccgtgagtttctggcttaaatctgggtccttgggtggaatccaaagggatagttctctcaaggaggaaatttgggtctctgggagccagaagtgggtgactttgaaggtctccagggaacttttgaggaagctcttaaacatcatctcacaaaagaattgtgtggcgttttgaatgcctgccatggtaaatcttgcaatttgcaaggtcatggtagtgacttgccttcttgcttgggattgatgctacattgcctggttggctgctcagtctagaaggaagaaaaaagagacagactgcactgaagaaaagcagttgtaaagtgtgataaaaagacccagtcctggctaaggtatacagcacctcacccagtttctgcctagtgcctgaaggcgctgcagctaattaaaccacctcttagtcaacatcccagtcactcccatctgggagactgattggaaaggctcagtttgagaaacttcagaggctagaagaaactcccaggcctgagggccaaatcctgagctcttttaacctcaagctcagggttccagtggctcttggaaggggaatgagtactcatgctttctagcagaaggaccacattttggagggtccaatttagagatgttgatgcttggtagttgggtcctaagatatccttcacggacaagtgcatcttcccgggtcctcatcagtttccccaaaggccttgttgggtgaacctagagtggttcctcgttccatcttccctcaagagtgctgggagcattgaggccaccatccttggtcagggcagctggatcacaaccaccagcagaaaagaaccagacctgctgtgatgctgcccgtttctgctacacactggttttcccaatgcaggtgttccctcctttttttttttttttttttttgagatagaatttcacccttgttgcccaggctggagtgcaatggtgtgatcccggctcactgcaacctccacctcctgggttcaagtgattcttctgcctcagcctcccgagtagctgggattacaggtgcctgccaccatacccagctaattttttgtatttttagtagagacagggtttcactatgttggccaggctggtctgaaactcctgacctcaggcaatctacccgcctcagcctcccaaagtgctgggattacaggcatgaaccacttcacctggcccgcctgctttttacaggacgtgacttccccacttgaaaccatttctgatattccttctctcatttctctcttcttctcagatttgttagccttctggaccactacctcttacaatggagtgtcacaaagaacctgtgacaagaacatattttaacctaatcatccattcattcattccttcaggcaacataaactaattgagcatctactatgtgccaggaagatgctaggcatggtggagacagagacaaataagacacagtttgtcctcaaagtgtttatgttctagtggggaaaacatacaagtaaactgtgaaaaatgccttgagagcacaggcgacatggtaaactgcatctacaaagcaaacctgggagtcatcaaaggcttcctgagggaagtcattcctgagttatttggaaggaataaaagttggtctaagaaggctgggttggagggtgggtagaggatgttttagctagcagagatggtttgcttcaaggcaagctggcttattcatctggaaaggggccaagttgccccggctcaaaacccagagtgcatgccacatgaatcttcctcagcttgttgatgttgtgtgaagttatcaaatgtattttcgtcttgttccatgaaccagaggtgggtagccattacttcagaattgacaggcctttggggactaggctggccaatatgttcctgggccatggcataatctttatttttagaagaggttcccaatttgagatgatcaaacaccccaccccagtctctcattgggccctggaggctcattgttacttggtgtcttatttctgtttggggtgatgagtctatctggaaataagcaaatttgttgggtcaaagctggctaagtctctgcctggggaaggatttcacagaagtccagaggccatatccttaaggttgtactcctgatgtcttttgaggggttatccagtcattccatcatagggaggctgatggcagtgggaccttcccaggcccccacccactctggaccctctgggactttctgtttgtaaaaagcaccagcaccaatgtattggcaaggagatttactaaaactcaacagtgagtaaactctcttactggtcattttgcatcatatgagggatttcaggcaaagaaaggatattaaaattgagtatctactatatatcagatactatatcagtgctttcatagatatcatctcactggagctctgtaatgacccagtgagttgcatggtttgtccaaatgactaaatgtcttgtctcagccactgccagaaaagagacattttaaccaagaatcaatggccatgtaattatgtgattgcattccaccaacttgtcttctgacagttactcatcagagctggtgttttaacatctgtttctgagccaaacaaatacaacttttattgatcccttgaaaactttgtctcctgctactttgtctttgcagcttctgtgtagacacctgaaggctccactggctgtatacctgccattcattgtattagctggcttgggccactgtgcttaggaagcaatatggaaaaaaaggctcttctccttcgatttctcatcttgtcttttctgagtgccacctcaccagttccacagtaattgactgtgcctgatgtaggtggtctctcaatgacttagtggtaagtttagcactttgctggtcccaatgccagtttacctgtttgactgtgttcccaaggcattgacctgcccatgttagaaatctagacctgagaatgggtgaaggatggatgaggaattagaagatgctcacgtctgaattgtgtactgaatttcatcccaacccagctttattggccctagaaaaacatgcttccgtaacagataggacaggttaaaaggaacacaaaaacatcaagaaatggttgttgttattgttgctgttggtttgtcgctcatctctacctttccctgtgagggttgtggtatagctactgagctgtctcatggcgaatgaaatgacttgtcttcatggtcagctctaagcttattccatcgtgggtacctagaatggaatccacatctctagaactgaatgctactactatccttttccctacctggagaattagagaatcacaggattttaaatgttaaagaatttccaattcaaccctcttattttatagattaagagaatgggacctaaaaaataaaaatgggccaaaattgatacttaaaccttattgatatcttacattagaacgtgtttttaccatttcatagcagtttaccctactgtctgttgatcacagaaggtaacattatatccattttatcctcatacttttcccctgacacacccatttagcagccgtcctggaattagaacacagacttcctgacttccagtcctatcctggcccaataccatcatgattcaggatagctatacactgtattctttaaccagcccctcgaatggactggaagaagctatagaaaagaggtttgtgaagtctggagtgcctcaccagcaggaccagaaagtaattctgtgatttagcaaatgaacgctgtgaagacacaatgaatagaagaagggactgaaggagactttggaggctgtcaccctttaagtttcatttgcaggatctgtgacaacacggtatctgtcagagagagactgacatcttggttggtaaacatctttgacacagttaaggcaggtcttacaggatctaggaagggtggagggatttgcaggctgttggaaatgccagaaagtcttagagtttcaggcccttttaaagcaggggtggcattcttcaaggagctgggggaaaccctggatgtgggacaatcaaagctgaaatctctgcttcctggttcttggtgctcgagctgatgcaacaggtatttccagcattcttatccaaatacaacaactgtcttacgggagaggacctgcagtgagcactgtttttgttcttgattctagggtgacctagtgtcttccagtagggcaatctctggacatctttatctccccagtacctctccagatcctgaagcctggggccagggaggagaggttagatgtcagcagtggaaggacaggtgggtgaagcccattgcaaacctcacatcctccaggagaaacacaccagttgcttttaggctccctggggagtgttctgttgccacctcatcaaatcagtgaaggtggaaaaaagagtttggtgccagctaaggtgacactgaagtgtgcagcaggaaatctgaatccaacaccacatctaatgagcctattattacaggctattggcaaagcaagggaaatcgaatgctaatgaaaagcaggttctgagaatagtttaaaacttagcgttagccccattacacgttcccttctgagtcacagaggatgatttgcacgataagctgagcttgccttgaaacaggactcacgtggatttgcatgagaaagaactgggcagagattgcaatattaacagctgtttaaataattcaatggagaggctaaggctgaaggaaattatgggctcattgttaaaagtttttaattatcccaacagctgtcccatcacatggccttactttgttaggcagtggaggccatttgagagatcggcctgagttggcgcactggaacttccaacattaaggcattgcattgctaatattcctcaatttaggaggcagtcaagcagaaacacagatggtgggcagtgtcagagagcattagcctcgagggatttggtggacccaaatccaacctgggttttattgctttgttctgtgtgcacagccacaggacataggaagggaatattagtaaaggggtaagcgtgcccactggacgtgacttactgtgtatccggtggacttcccagaccagatttggcactttctgctcattgccatgggagcaaacctgctggctgttgtgaccttaggctttccatctgtatccaactcacctcttcctggtaaccatatctcttagggggcgctgaaatagtcatttaaaccctcataatattcatgatggtgacagggcccagcatgacttattacatattcatttgaatccatgtaaaaatcaacatgtggaccccagagtgtgcatctgggtgggagctttaggatcttggtagtaagacagatttccaaattgtgtatgttccatttatttgctaagctctagacaaattgcataaaatacttgaagaaacccctcatttcttctaggtttctattcaaatgtcccttcatcacagacgccttccctggacacttgatacaaactcatgctgcctccccacacactgctatccttctcctccacccttgatgtggtttggctgtgttcccacccaaatctcatcttgaattggagctcccataatccccatgtgttgtggaagggaccccgtgggagataactgaatcatgggggcagttaccctcatgctgtttttgtgatagtgagtgagttatcacaatatctggtggttttataaggggcttttcccccttttgcttggcgcttctccttgctgccaccatgtgaagaaggacacgttctcttccccttccaccatgatttgattgtaagtttcctgaggcttcccaagccatgctgaactgtgagtcaaacctctttcctttgtaaatttcacagtctcgggtatgtctttattagcagagtgagaatggactaatacaacccccctctgagcacttctcactacttaaaatgtatttatccatgcatttgttctctcactaaagtgcacactccatgatatcaagggctctgtctttttgtttactgcaacatctttaacatcaacaacagtatggtgcctgtaatatgggcccactagaaatttgtggaataaatgcacgaatggtcaaaatctgactgaagtggcatgctgccagtctgtctgcagaagggccttattcccaggggcaagcaaggggcccttttagagctgcttttcaattctcaatttctcttggcaaacattgattaagcactcaggactaggtgttaaagatcacaatcttgccctcctggggctcatagactggtggagaatgtaggcatttaaattaaatccatccttcaagagctgactcaggtctcggccccttctgggaccccttcttgaacattccttcttcttccctgaacctgggttaggcattgttcttatgatttcccatagactcctttgcaagcttgctcatggcctgtacataaagcagacaattacagtacaatgtgctttatgtttcctctctgagtaaaggctctttaagagtaaagattgtaccatacccattactgagtatagtgtctgatacatagagaacactcaataaatataagttatgcctgttattgtcactgttaccaggtgtgtttgcaatcagcatttatatagctgtttgtgtgaacacattttttaaaacttatatcttattctaaaggtatataggcttagaagcagctgtatattatataatattctatcatgctatactatatgatagttcccatgtcagtctctgtttgtgttctgggagacgtagtgattagttagactaattagaatagttggaatttttagattagtcagaatttttacaaagagttcttgggggactctgtgtttccagctgcgagctgagtccctgaattaccttaaaaattattttctatgtgcaaacatcaagaactcttacaagtcttccatatctgtttaattccaagagggtaactcacgagaattctctcaataaatatttgtgggtttatagtattttgatgtagccactttgatgtggctgttttgattcagggcttcagggacattttgttatggcctaaaaaacaaaccattaaagaggcagcaattttgtacaacaaagaaatgtgtggcacaggcatccaaccacattgccaggttgggtgtgtatgctaacctaatgtttgtgtgttttcactttgacatggctgttttgatgcctgacgcttccattacatcatatggatcttgccagaatggttgctttaaatacttcctagttttacttgaataccaaccatgtgcctgattctcatttcaatggcaggagggattcaaatgaagcagaaggcaaggagattaatgatctcaaggggactggagagttttgccaagagctggctaaggaaatacattcaccatttcagaacgcatactacctccattctttgtttgacatttcctggtttagagcttcagattacttgctggagacatgtttaaaaatggaaaaagatcccactgcaaacacagaaatatggtctatccacgttaaaaaggtcattttgatcatttccccctgctgtgttgtaaaatgaattttctgtctgtttcacttggcgaggggaggaagtgatatttgttgctcactgatcagaaaggccctcacccaactgctgtgagcagtcataccctattttctttttcagatggtctgagggattgttattgcacacatatgtcaggaaaccagaagttgcctcagaaattaactagatgaatagaaaattaggccattaaggggagactaagaagcctatattttgactaacattctcatctggtcatgcaatgttattcctaattttaaaacatttgggtagcaagtatattaagcagcctgttatgaaaaagcaagtagttgtatttgggttccaggtcttaactctgagtctggaagctaagttcttggtgtcttgctagaatggcagggcaagtgggtaagccccctgaacaaaatgtcatccttgtcatgaagttgatgggtgttatatgtctcttctttgtgtgcactggagaaaggtactatgctagcatatttttgtttaatttttatgaagtaggcatcaggcatttctttctacaccccacacagctagcaagagttggagtcaggatttgaagtcaaggccctctgactccaaaacccacactattcccattataaccagttattccaaaacactggtctgcagctcggtgttggttccaaaggaagttttctccagtctatgacaagactatctggataatgcaacacctccctgtcttgaaagcactgtcatctgttcagagacacctctctttctaggtgtgaaaggcttattttttttcttttatcaaatgatggtgattgtaaatagcagctaaaaaaatgttctaagatatcaaagtgaaaaattggcctccctatggcaatccccaagcttacatctggaatcttattggcctgggaagtgacaaagctgaggaaggagaagtactcccattaccccagcaagggctcctttgggcagactcccaggatggcttaggcttacctgaggttaacccagaaaagggcttggctgcagccatagctggaggtgatcaaaatacttcttaaagccatacttcttggactctaagtggtattagctcttgccagtttagctgtcctgataatgtaggtggccttttaaaagccacaataggttgaattattattattatttttttactagataaactatcttttccaaaaaagaaataaagcttggatgatcagtgtttgtgacgtttacatgtcaggatggggaaggcttgagcttggagatattttaatgttgatgtaactcaagtatgactctcctgaaaaagtcacctttttactgttgttacaagaagaaaatagctcaggctttggagccagacctatctggatttggatctctattttagcctttgcaactttggtcaagactcaagtaaaggctctgtaacatgataacttccttccccaagttaccacggggggcaactctttggaagatcctaccattgcatgcggtgttcctttcctttactgggaggatccacatcagttctcagtgtgtcctcctgtcctgcttataggtgaccctgagtcacacttacttttattttcctgcagatggttccagattccaactgtgcctggagaggttcctactagtcgagcccctgaaactgtataggggaggtgccagtctctctaatctctgccttcacttctgttccagtgccaacaatatgcccaagcaggtggaagtgcgaatgcacgacagtcatcttggctcagaggaacccaagcaccggcacctgggcctgcgcctgtgtgacaagctggggaagaatctgctgctcaccctgacggtgtttggtaggtacctgcactaccccacccccagccccctcttctctgggactctcctggctctgtggggcagctggtctcagcagccagcccttccaccagaaaggaagccacgtggtttgcctagggccctgtctgcccaggcttcagtgatataattttcctccttacctcctctagccattcgttctcctttggattctagtagttcttaaattttttgcaaataaatatcttgtgagagtgttggcatgtggattcctatacttatggagactttgctttgggccacctgaaatgaggtcctgcaatctacatattagcaaacctaggtggttccaaagcattggtccatggaccacatttagagaaccgcctgcatcaagataagcacaagtattgcacaaaaccccactaaaatggctcccaaggtctgagcttcttcagacacatcattaatttaggtaatttgggcacattagctaatgaggtcagtgtggaagatgtttgccccaatgccttgatctgctccagctccatcttgcaagtcctcttcctcctctgcttcaggcctcacccaggcgatggttgttctcaggctattgatacaatcttggtcttaagattcccgtgagggtttattgaaaatggggcaatatacagtttcttgtaatgacaaccacaccatttcctttctcaatccctcccttgttctgcagctctcacttaggtttcacagagaagcagtgaacaacttgtccttcccacccacccacctgcacacacctacctgaacccctccattccatggcctttcctttgagacagatgccttggttgccagtggcccaggatcaggactgggagctcgccacagctaagttcacttaataagaaaccacaggcatggttaggttttccaaaggttacccgccatgtaaccacatctaattcatcacaggacttgaagaagttggagagtgggatttttacctgcagaagaaaaaaaatcaggctttcagccacattactccttcctcatctgtggaattaacactgtagcctgcattcctggaactccatccctcccttatggccagtggtactatgacccaacttgtggtttctgaaagggtcattcatgttggccacccatttgcagagatataaaatttttcttctgggaactttgagtctgtaaagtgaaagatccctgccagcatctctgcctaaattgtttcctccaaaattatatatcttagagtccattcttgagctcccataagatcagcaatctaaaagctatgtaaaaggacatagaagtcaaggacaagccttgagagtgagccatgaggaaattattggaagccaaagaaaatagatgggaagaaaaaaatagaattcacactagcttggtcaattaaatgttcattttatcttgcctccagttacaatgagaagacacacattaaatgccatgccatgtggccaagcttgagctgggcaaggaggcaatatctgtccttgtgggttctttctttcttttttctttttctttctttctttctttcttttttttttttttttgagatggagtctcactcctgttgctcacactggagtgcaatggcaccatctcagctcactgcaacctctgcctcctgggttcaagcaattctcctgcctcagtctcccaagtagctgggattacaggtttccgccaccacacccagctaaatttttgtatttttagtagagatggtgtttcactattttggccaggctggtctcgaactcctgacctcaggtgacccactcgcctcggcctcccaaagtgctgggattataggcacaagccactgtgcccagccccttatagtttatttctataaacaatttctggctccaagtagacaaatagcctcaaataagttggagtcaagttgccagtgtgcactttcataaagccttgagttctccttgactctttgggtgctgactttttaagaatagttggaggtatagaaagttctcttgctagtcatcaaaatcagcttcacttatctaatgttgtttttgttacacattgttcatcatttaatactgcagaagcatgagaaaggtcaatgttgctgaaataagtgtctagagtaagtcatttgacgaaggcaaaaaataaattcatattgttttccccttccttttaggtgtcatcctgggagcagtgtgtggagggcttcttcgcttggcatctcccatccaccctgatgtggttatgttaatagccttcccaggggatatactcatgaggatgctaaaaatgctcattctccctctaatcatctccagcttaatcacaggtaagactacctcactagtgcctggctaacatgggtcatactcctgccctggcttttaattaactgtagaatctcaatttggttgagtgaatgtgatcgtctatgtcatttcatttcagagctttggttttcccgtctctgaaatgaggataatcaaccctaaagaaataaaagcttgccatcgattagtcagtctatttgtctttctctccagcaaaaaaaagaaaaaaaaaaaaaagaaaagaaaaggaaacacagccacatgttacaagtgatgatacctctagtggttttaaattttttttttttttgagatggagtctccctctgttgcccatgctggagtgcggtggtgcaatctcagctcactgcaacctgtgcctcgtgggttcaagcgattctcctgcctcagcctcctgagtagctgggactacaggcatgtgccatcatgcctggctaatttttgtatttttagtagagacagggtttcaccatattggccaagctggtctcgaactcctgacctcatgatccacccgcctcagcctcccaaagtgctgggtttacaggcatgagccactgcacctggccttaatttttaatgtctacttttctcccctttctaaattatattttgttcagatactgataaaggtaatagatggaaaaggaaattatctactattttaattgggaattgagggagattggcattaaaaataaatgaaatgctaggtatgaaagccctctgagtttttcagaacaaagttactcctaatatgtggcatcatgttcacttatttttcactaccaccaagttggccaatgtatgatttgttaacaggtgtatatcctgagtcccagcatcaattatctttgactaaaataattaattactttatttgaaagaatttgttcttcctctgtgggcttatactggtattttcctccttaccaaataatattgctcaaacagggtataaattgatgccctttggagactaaactctgagttaagggcaggaagctgagctttggtccatatttgggtaccagccagctaagtgatctggagaagttgttcccctggactggccacctcatgaaagaagtgagtgaggctctggtaactccaggagattcaggggctgagctgggttgaggcttcagctggttgaccagtgaccccagtacctgaaatgctggaactcaggatcaggcacttaggggctaagtgggaccttatcattcagcgctagattgagtgaaagggtgcatttaccatcagtgctcctctataaaccagagaaaatgttctctgcacctgttaacaggtcatacgttggccaacttggtggggaaacctagctcccgtcggctagaattagactaggttgtaaagagaagtaggtcacacgtaggtcagcttaatttagagcagctcacatcactaacttcttcccccatagcaaaaaggactaacacccaaaaaggggttcaatctctctttctggtaaaagcaggaactgaaaccaggaagtgaacacattcaagaaacaactggaaaaaaacccagtggggctggagtttttgtgaatttgcttggaatttcctctaacctccctaggtatagatgaagtgcccaccattggcagggtgcttcacggggtgttccctaatccctgcatgaggctgggaatgtggatcttcatgcttcacctcagagaaatgagaggactgggcaaaatcgttattctcagactctccatgtcagttaccagtaatatattcaaaagacattttgagtgtggcacagaactactagctttttagtcttccaagtgaggacattaaaacataaataaataaacaagttaaaaactagcatgtaccagcagcatcgcttcataaaacaaaggagatgttaagaccaaaaaaaataaaaagtggaaaggaataatctcagaattaaaaatgggatgtcttcaactttattttaactcattattgcagactgacaaaaaatttgttacagaccatttgtaaactctaaacaggaggatctccaactctcccagttctgtaaaatcttgaaaatctccctggataatagaatgataaactatgggattgatcaaatattcaatacagtcggccctgcatatctgtgagtcccacatgtgcagattgaaaatatttgagaaaaaaaactaataaaaaatacaaaataatgcaagttaaaaatatagtataacagttatgtacatagcatttacattgtattaggtattgtaaataatttagaggtggtttaaagtagacaggaggatgtgcataggttatatacaaatactacaccattttacagaagaaacttgggcactctcagattttggtatctgttgggagtcccagaaccaaccctctcatggatattgagggaagactacagtaggagatttaatcaaccattaacacatttgagtaatatgaagctaacgtcatagaaatgtagacacaggtcattagcacaaacgtaatagaattaatccttctgcatttcttttcaatccagggttgtcaggcctggatgctaaggctagtggccgcttgggcacgagagccatggtgtattacatgtccacgaccatcattgctgcagtactgggggtcattctggtcttggctatccatccaggcaatcccaagctcaagaagcagctggggcctgggaagaagaatgatgaagtgtccagcctggatgccttcctggaccttattcgaaatctcttccctgaaaaccttgtccaagcctgctttcaacaggtaacccagagttcagatgttctctcttctccagtcctctaagttatcaaggcgataacttaagagtattttaacagaccaactctgggtagaaattttctaaatatataattatctctgtctaggcccagggattctatgaggtggtttagggcaggatcttgggattggagtctcctggttttaatttttttaaacatccctttttttccagctcacttaatatatttttgctgtgggattgtcctcctttctcccccaccccccccccccgcctctctctctctctctctctctctccctccctctctctctctctctctctccttatatctatctcttcctttcctttttgtgcatgaggctgggaaatgtgtctttgagttgtccatgggcatatttttattagccttgcccacaaccttctagaatacacagtggttctcaaacgtggcagtaaagctaaaccaccaatggcacttttaaaaaaatacaaataccctacacaatcagaatctccaagagatgaatctggagcttgggtagttttttaaattgtggaagtaatacatgcagattatgaaaattttagaaagtatagaagtacacaaagtaaaagttagaagcttctgcttccccttctctagagctacttatgttgagaatgctgtttcctcccctgtatttttcttttgccacttatgcaagtgtgcataatctttaaaagaattcaaccctggctgggcgtggtggctcatgcctataatcccagcacttcgagaggccgaggcagggggatcatttgaggttaggaattcaaaaccagcctggccaacatggtgaaaccccatctctactaaaaatgcaaaaattagccgggtgtggtggcgcatgcctgtaatcccagctactcgggaggccgaggcaagagaattgcttgagcccgggaggcagagattgcagtgagcagagccactgcactccagcctgggagacggagtgacatactgtctcaaaaacaaaaaacaaaaaaacaaaaaaaaagaatttaacccaatggtactccattgttcataaaacgttacatctgactttttcacagaacaatgtttgaacaatgaaaaacattgaacaatgttttaaagtcatctcttctttttttcatgattgcataatatttttaaaggataaattcctagaagtaaaaatgtccttgtcaggacaaggagttttgtattttgagtttgctggctgttgcaaaatggcactacaaaagtatgtagcagtgggtacagattccttagcaatgtatactcttgcttgctgcatacatgcctatacatttttttaaacttgagatttttttaaaacaggtgattctgttgagtggaaccactgagttagctgagtaggccccattcactaccctgttttctagccccaaggccagcataggctagaacacatcccgcacaccccggtttccattaacccaggtagaaactaagctaaaaccaagcagtctaagctaaaacttcagccatttccaagcacagaagaatgagcttaggaaacagtttgcttagaagaaaagtatgtattcctagctgtctccaaaatgtagtccttaaccattgctgagcccagattactctgggttgggatatgttccctggtttcagatactattttagtggaacatgtagcatggacctatattaaaggaaaccattccacgccagggaagttggatgcagaaataaacagaaataagctggagaagaaggtgcttagtgggctccatctgtatagcgtgtttgcccctcagccagcctgctcagaaagatgaactgacttgctttagtgtgagagacacgattgggtgctatccattcttaacattttggaaagagcattctgggatcgcagctgcaggaggctgagctggtagtagattgggggagagtggagcataggagggcctgggaaggacagatttggacacagttctgtgcctggtcatgccatgctctgtgaaaaaaggaaggcaggaccaagaagcaggcaggctcctggagctattgctctggtcttggagtgaacttttgtggagctggccacactcacactcggtgagcgctgtggtggatgggcagtctttgcatgcagctgcccatggcaaaggctgctctctgccattctggaatagagacctgagccattccctgccccacgccagccctgaccccaactttctattgccaaaattcatatgaggactgagccttggtccctcagtaggctcagtatcaaggtccctttggattaggacaacctgaggaagaatggtgtagaatccacctcagggagaggatggttacagattccttaagcctggaaggaaggcactgaagaggacttgaggacaggaaactcttttaaagggacgtggcatttccagagagaaagggtgcgtgagagacatcttctgtgtccatgagtacagctagaagtcatttaaaataacctgtcttgagtggaggaggctccttgaccagagttagaaacagagatgtaaagaggaagatgagctccccgcagagtggagactgcctcctcccaggcgacagggcctggtttgcccaagttaagtccctgtgtctttgtgagcagagaggtctccagcttgctttctggggcttactttgaaccaaagtgagatttccaagacagtaactggctgtaagatatgaccttacaacgttaaatccagcccagtaatagagaccgcatgggttcttttcctccagaaaattccgtgatctgtgtatgttcactcggccaatacttgtgagcaggacgggctgccaggctctctgctttgtacaaggatgccacggggggaggagacagatgaggaccctgccccaaggagctcacttacattaaaggggagggaggtagaccaaaacaaacatcagggaaacacagaagagacttaaacattaagacaggtgttctctgagggctagaggcaggatgataggctggtggtaactaggggagatatttcagctgagaggataggggatcagaatgagttaggcctacaaagagctggggaaaggagcttctcagtagaggcacagatatgcagaagctgaaaagtacttataatgttcagaaaagaaaaaggaggctgtgtgaggccagtgtggaggtatagtgagtggaggaaggtaaactcagctcaggcatgacttggtgggccaggggaagctaaggatatagatagggttataggtagccacacttacctatagactgtatgcagacaagaagaaagttgagtaggtcagtttatggttttgcaggttttatgatgagacatgatggtggcttagggacagggagactggaattagcacctgctatgctttggatgtctgtcccttccaaaattcatgctgaaatttagttgccattataacaatattgataagtggaccctttgggaggtgattaggccatgaggtctctgctttcatggatgggattaatgctgctataaaagaatgagtttggctcctttgtgcctctctttgcctttctaccttcctccatataatgatgcagcaagaaggctcttgcccgatgctgatatcttcattgtgtacttcccagtctccagaatggtgaaaaaataaatttctgtttatcataaattatccagtcttaggtattctgtcgtagcagcacaaaacagactaaaacagcacttacatggagttgtgcaaccgaacagcttctgtgaatcaggaactcaggcagagaactcggcctgcgttcgtgttcctatctcctcagcttcaacttacatcactggcctttgctatttgaaatctggatttctggagtcaaacataactcatctcgaatcctgcttcagcaactaactagcaagctgcccttgagtcgaagggctactgttgacctaagacgtaatggatgtaaaataggtagcagctggcctcctgcctgatcctgacagccaccattcatttagatccatgagtatttctcttttaaaccaaacgtaggcttctttagcatccttaggataggttgacagttggctttggttcccttttctttcctgggagcatgactctgctgttcacataagcttctcttgtgatcctccctgcattctcttcacaccaatgttgcccagatgaaggggccacattgaggggagaagtgggctgcctgttctcccctcacacagcaggccctaggcttcctctctccctgcacgagtacatgtggccaggctagaacagagagcaccctgcctcacctcagagaacactgacctcccttcccatccattttaaataactggcagttcagcattgcttcctatgggaaccagcacagtaggattgggtccctatagcttaacatacagcacagactgtggaaataactcaatggaggtgaggtcatctgagttgacatcccagttctgcccataactccatgacgtccaacaagtcacttgactttcccgtacatcttcttccgtatctattcggggttcagccatctgttacctactacatgccagcactgacaatctaggattctgcattgagttctattttaatgcccctggaggtggtgttttttaagctcagatgtggatttttatagcactctgcatgtagggtgcctggcacctttaaaaataggaccactgccatggatgtcgaggaatagcgggagaggttccttgtgagtcatctgacagagacacttggggaacattgagaaaggcttggcatcactgctcagaaggagtggctgtcttcccaccttgaatttggatctgaaatataagcaaatgctcctgccatggtggctgctggcagctggcactcttggtgcccagatggagatttccagctgagcctggctctagaaggagcccaaactgaggcagcctgtgatacccctgtccagtggggaccaggtagaggggaaaacaggtggatcatgagttgctgatctgacccctgccaaggcttcctattcttaaccagatccagggcccatcacaactggaaggaccatcacaactggaaggaccatctaactgggtctcacaattgggaagagcatccaagttagacatttcatactgtttctgagctacaatcataggagtgaaagaagacatttatcccccaagtttaagcctgtgtcctattattgactacagtacttatagtacatttgcaaattattttcatacattctatatttatgaaattgtgtcatttgaagcaacatggataagactggcggtcgttatcttaggtgaaataagccaggcacaaaaagacagatattgcatttctcatttatatgtgggagctaaaatatttgaacacatggaaaaatagtggaaaaatagataacagaggctaggaagggtgagtggggggaaaggggaaggacgaagggaagtagcttaaagggtacaaacatacagaaagatagaaggaattcattcaatgtttgatagcagagttggatgactgtacttaaaaaatgcattgtactcagatgttagacaccttaaatgccctgatttgatcatcacacattgtatacattaaaaaatttatcatgtaccccataaatttgcacaaataaaaaattgtgtaattatctgtgattaggacaattgtatctcactgtgtataataaaacaccactttgtaaatatagacatataaaatattctccagttttcataaccttgttttggcatttcttaattattgttaacctgttgggaaccttaaaatatatgagtagccaatctttttttttttcaccttataggccaaatctcagctctatgccttttttccctcactctgttagattcaaacagtgacgaagaaagtcctggttgcaccaccgccggacgaggaggccaacgcaaccagcgctgttgtctctctgttgaacgagactgtgactgaggtgccggaggagactaagatggttatcaagaagggcctggagttcaaggatgggatgaacgtcttaggtaggccagctggtggtccgggattctgcttccctggcaatggctgggctatcctgcactcccttttcagaaaactgatgactcagctgtcctctaggtggagcaggaggctctctctggggagcaatttgagggtcactgggactgagagctgagcgatttaaggaagagagagaagggcagaggagaccataaggggacagggcagcaagaagctgggtatgggaaaaaaggagggagctcaccgtcattgggcacattccctgactctctgtgtggtgttagaaagtcactttctctgactctctgtgttattaagtgacacatccattgctttcgtttcttaagcattttttaaaagctgcccccatgtactggtgctgtgctaggtgcgggggctggaccaccacagcccttagtctgcaaacaaatgcaatgctaccaggattgtaaagtgttggagtaggtaccaagggagctttacagattatcttgttatcttgttttactttctgggatcccagtgagccctttctcctagcccagtaccttcttagcatgccatcctagaggtttttgggctctgcagttgggcagacctgggtttggatccagtatgggccacttactggttatctgaccctgggcaagttactccatttctctgagcctcatttgtaaaatggaaataggattggcatctattttgtagattactgtgaggatgaaatgtgattgtgcatatagggcacagtagcacatgccatgtgctctctccgtatgagctgtgatcattattcaaagtgggtggagagctgaggagttcagtaagaaaatacctccatgagggacagaggtttattaccatgtgagcggctctagtctgcccagtttgctcccctcccactcagtgggtccactcccttccgtaacctccatccatcactagaatggtgtccccgagacaggaaataggggcatttggccaaaacctgggagaaatggtgaatctggatggatgaagtatgtttatttatccaagcacaatttctaaaggtttggatgacagctacttagagatgaatgagctcagtagtcctttcacgttgtcatctgaaagatcacatggccttgtctccttagttgggttgtcagataaaatacagaatgcctggataaatttgaattttagataaaaagcaaatagttttttagtgtaagtcacaaatattgcatgggacataataatactaaaaaaaaagtattcattttttacctgaaattcaaaaagtaattgagtgtcatgtttgtttgtttgttccaaatttggtaagcctactccttagccatctagaatggtagagagaaagaggagagagagggagcagaattgcacagtcactgagaagcagaagcagatcttttttgtttggcttggcaggaagcaggttggatgagtgagagtgagggaagagatgagctgactaggttgctgggcaatggaagatcaataaacattgtttaacaaccagtgggaggtgagaggtggaaggagcgaggagtaggaaggagagttcctctggggagattttgcaaatatccccagcacccaccaccgagcagctcttctccctcactgtccagctatctatgttcctttcaggtccttcctaactcccccatggtcttttctggtgggtcataacttaaaacacccaacccccttttgtcaaagtgttcctcagtcttctccatactcaggaggagcttgaggccatgaacaatggggccagggctttggagtgaatcattcaaagactttcctggttgtttccagagtcttggtggattctgggaagtcacaggacctttggctctactggggagtttcaacacaactcactactctgtaaccccagcggccaagtccaagagggttttgttcagatgcaacacccccgttccagtgagcaatttcaattaggcaatgtttacaaagaaaaattacaagctgaatacggtttccatccaagtgcagatcaaggctctggaaagccaagggaagttagactgttgagaaacttcccatttacaaatcatggctgaaataaggttctttccacggtcttctgagggtggagatagtggcttttttatttgtttgttttgctgtctttctgttttttggctttggaaagtcccgaggattaagcacttgcaataagtgaagatacaaccccagctcttgcctcccacttctttaaggaaccatttctctcctaaaaaacctccagaaacaattctggtctccaccctctcccaactgcttaaatcaactccaactgttcctttaaaaacctatctctcatagatatggccagtttctgctgacactgaatggagctttttttattccagttctttgggaccttgatacctcgggcattttctcttaatttcaaatgaaattaaccaagtaatatgagctattctcagccagaatattcagattgattctctttgacctcccacgtagcagactcctctccatgggcttgagagaaggacttgggaatggcctgaaattgattttgtacattactgcggaactagttccctctgtcctggatctaatcttccctaagcctttgtctttccagaccaataacttacttgtgaagtcatttgtcaagctttctagctgagagcaaaaagaggagatactaaatgtgaagtattagtaaccccaagtgcaagtgatggattctttttgctgaagatagaaaggatccagcaaagggtagttagacaatctgggttgatatgtgcttggtgtaaagaggttagtgggttagatgactagggaaagagtaaagtcaaaggttcagagagaaggaattttgttataagagaatcaaattataatgctaaaatttactgagtatgggttaagactttaggcataactggacaccataggaaactggatataatagggagggactggaaattaggactgccaaattgagcaggttaggtgtggagaagaggaggaaagagaagatggctcatacttcagagtcagagaacaagtcaggtggggaagcaaagtcctgtagccaaggacatagcaacactgatttatagaacatgtaagtagtaagaactgagacctcaagaatggcaatactagatcaggggtcagaggtcagggagcacatggggattggaaattagaaatccagatagcccccaggcagtactggaaacacctgtaagccgcacaatgtgccccagtccctggatgcgttggagtgagactgcaggcctgagcgtgaggtaccgagggagagaatggaagggaccaacaggagtggtaggaagagcaaagccaggcctagccttggaggaactaaagtgtagggcagattcccaggatctcaggcacaggggatgaggtaaagccaacacagaagtaagactcatggttgggtattggagttggtccaagacctagtgcaatgtgatgctgacatgaagagggcagagatgaagctccttaaatctttcctggggttaggattgaccccaaaggctgatgtgaggctggacttagatacaagtcaagaatgtcaagtaaaggaagaaaagagtggagggactaggaactagcaaaatctgacagtgaatctatattctgtctttatgatcctgaaaaaataaataaaataaaaaaagcattctaaccatttcaatcatgaaaataattatgacaaattcataaataacagattacatttaaaaaaactggataaaatggaatttcggattccttattgttttccctttgatttttcagtatttttttctccctgtcattttatgtgtgtagtaataaaaaataattttacatataggattttgtaagagtgaaacataccagccatgcattgatttgggataataccaaaacaagctagatgtaactctagcaaagaatttattggctaattggcctctgctattccaatattggctccaaagtttgtatgataatccccaagtcccaacaggcttttcctcgttaatctgtgtaataaaggaatctgcttacacatgatttcataagtgaggggagggaaaagagagcaccttttagtttggaatgaaaatgaatacattttcttcaaggacctaatgctgcttacagtttaacttgctcatgtggaaagtgttcaagaaatccaaaattatccaggggaaagttacattcagtatcaaatataatgctttgttcttttaatgtctaattcatagggtaaccagcagtgagaacatggctccatacattgggaatggtaaagaatgagggagaaaaagtacattttttgtaatttgtccttctatgtaatgtgattcatccaacaggtctgatagggtttttcattgcttttggcatcgctatggggaagatgggagatcaggccaagctgatggtggatttcttcaacattttgaatgagattgtaatgaagttagtgatcatgatcatgtggtaagtggccttgttcttacttcttagcagtgggttgagaaagccttggggtccccagaggatactggagctctccctgcaggaaaaagttggcatgggctgatcaaatgtctttccagaaagactttgagaaagggatgaaaatatcttttttggagcttcccctagaacaagtgtagacaaattatgccccttgggccaaatctaacctactctctcttttatatggccagcgagttgagaatgggttgtatatttttatgtaactgtcttagttgggttgccataacaaaataccaaagactgagtggcttagaaacaacagaaatttctttcttatggttctggaggctggaagttcaagatcagggtgccagtatggttgggtctgataaggggccttttccaggttgcagaccaacttctcattgtatccacagttagaaagatatttatttatttttatttgaattttattctattgtaatttttttgagacagggtctgactctatcacccagactggagtgcagtggtgtgatcatggctcatcgcaggctcggcctccctcactgtagctcaagtgatcctcccacctcagcccctcaagtagctggaactacaggtgcacactaccatgcccagctaatttttgaaaattttttatagagacgaggatttcactatattacccaggctgatctcaaacttctgggctcaagtgatcttcccacctaggcctcccaaagtgctgggattataggcatgagccacctcgctcagcatgaaaagagattcagaaagctctctggggtctcttttacacagtcattgtctttccatctattataacaaaataccttagactgggtaatttataaacaataggaatttattgctcacccttctggaggctggcaagtccaagatcaaggtactagcagatttggtatctgtggagggcctattcctcgtagttggcacctttgtgtgtgctctcacatggtagaaagggaaaacaggctccctcgagcatcttttattaagagcactaattccattgaagagggcacagccctcatcacctaatcatctcccagatggttcacctcttaacaccactgccctgggaattaagtttcaacataagaatttgggggacatatgaattcaacttatgaattgcagtttttgccattactttcaatgggaaaaaccacagttacttttgcaccaacctaataattaacttgcctaagatgattatagctagggagaggaagagctgtagttcatattggtatcaaaacccttgatgcataagcaggtaggttttttggtttggatcgtctaagcaatattgtttcccctttatttcacatgtgtttatagtcagtgactctgaaatctaggggagcctaggagagcatgagtatctattctctcattgtggaagctctgtcatcttcaatcattggaaacttttggtgtcccatatccatcagacagaaagctttttacttgcatttgtttcagatctctaggatggtcctgtatgtctgcctagaaaaaaataaaaccactcttagaccaagtcatacctgtgttctcttttccacaggaattctgggttacctattccccatctctgcatgttccaggcctacccaccttctttgccaaacttcttctgatccttttccacttttctgtaggtgtctttcgtggaaattccagctgctttttctcttcctccttttcttgtctcccaccccacctcacaagggcaaaaatctgttcttttttatctccacagaaccaaacatggtgatgtgcctgtagtcaattgttactaaaactttaggaacgagtgggatagctgataactccaagatttcagatcaagaagatgctcctcactatttcatgaaccatatttaacagacctggcttgttcagatcattgttttacggtgcttttaaaacacagaaaggatgctagtgaaataacatcatgttctcttttatgattgtactgaaccctcagcttctcaggcaattctagatttctggatatttctgttgtatgaagatttgggaatatggtggtgttgtaaaacatatatatatatatgtatatacacacacacacacacacacacacacacacagagagagagagagagagagagaaagactcgccctgttgccaggctggagtgcaatggcacgatctcagctcactgcaacctccgcctcccgggttcaagtgatttttctgcctcagccttccaagtagctgagattacaggtgtgcaccaccatgcccggctaattttttgtatctttagtagagatagggtttcaccatgttggccaggctggtcttgaattcctgaccttatgatccacctgccttggcctcccaaagtactgggattacaggcatgagccaccgcatccaaatgtaaaacatattttttaagtccttcagattcatctgagtctgtcgagactttagtacacaatgcagaataagtctcttgcttaaacattaggattttccattgtttcctagaatttctagcagattacgcatctttacgccaaacatgcagcccgtatttctgtaatatgatgccaataacatgggcaatgtatgtgtccttcctatgtccataccaatgtgatttccactaaacccttgcaggaaagggaatcttctaggacatcagatgagtctgtgggatgaagtgtagcctcccttctccccagagatggagggtggtggtatgaattaagaagtttcccattcactgaaaccagaactcctaaatacttattatcatcttgggaggtaaaaagtggttgtgaggcaggaataagaccttagaatgatttctgacagctgtttggttacctcatctaggctcatagtcaggacaatgtcacatgacatgagatgccaattctacacatttctttaattctttcactgcctcgtcagcatcagtatttgctaatgatgtgtgtaaaaaggttctggataaaacagtcaactactctttaactgacccctcaaagcttaaaaaaatcagaattcttttgtattcttttctatgtagcagttataatagtaataatagcagaatgtaacattgaaaagattataataattctttttattattaaattataaattagaattactaacttcttgctgtatgctcagtactatttcggttacagtacaggtactaacccatttattactgaggaaacaattattattaaataacttaaatttaccaaattcctgctaaatacttaatattattccaattgttttacatgcattagctcatttattcttcacaatagtactgaacaaaaataggtgcttttgttaacccatttaccaaatgagaaaactaagcacagaggttgacttgcccagtgttatggagctgtacggaagtgatacctacatcaatttctttttgacttcagactggattgaatccaggatcctcctattgcaagttgtgtgactttaggcaatttagacactctaagccccgatattctggtgtgtaaaatgggataattctagaatccaggccataggttgctgtgagaattaaggctgtgaccaacagtcatgaagcaccttctttgtgctgggaactgtctaagcactttacatggattagtattatagtaatagctgtttgctgttaccaatattatcatcaattcaatccatatcctttgtatctctgtgttcatgaattctttaagaaacctgaaaaccccttaatttttgtatgattttcgtatcctcattttcttaggtagttatttaaaacatttttttcaaaatttgaaaaacttaaacagaaagtaaaatgtttcataatctcacccctataaaaacataaagtgagaagtaaaatctctgcctactcttccaattcctttttccaataaaccaccatccatccacactgttaaataaaaaactattcaatgacacgtgttaaaacacagtaaggcagattttattcaggatcattgcaatgagcacagggaccacagcaacgggattttggagtgggggagagagattgggctcacttgcaagtacaacatgggtaagtgggaatttatagccatggagcaaggtgggggcagtggatgctcgggggtaaggagtattttggctaaaccaaccccacaggattctagctgaaggccacagggtgaccaaacatcgtccaggagaggatgaagaacctgatcagatttgagggtgatcagattttgaggatggaggttcttgctaacctgacttagatgagttttttgctaaaccggattttataaggaaggtttagcaaagagcccagaagaggccagaagaaggttcagacgcctaactgaagtttggtcaaacaaagaatctttgtcaatccatccattttttttttcattcaataaatattctattctgtgcaggcaatgattttaggtactggtgagataatggtgaataagacagagaaaggttctggcccttgtggagcttacattctaggaaagggagagagggaaagccaaaagggagcaaatggtagcaaattgtctttgtagcacttattattaattcgaatagtaataagtgccgtgcaatagcgagagatagtgatgggggtagaagtgatggcccacgtggtgctgtctggaaaggtgacctttaatgaagacctgcagagtgagccaagcaacctggtgaagaactgaggggagaatattccaagaggaagaagtggcagggaaagccttttgagggtcagaacaaaggtctagagaggctgcagtgtggttggtgaaagggggcaaaaggaagtcaagttggagaggtgggcaggaggcagatcctccagggtcctgcaggccaccttgatgggttggaatttcatttccttgcaaaaggaagtctctggaggaataataaacctggaggctatactaactgcttttcactctgtcttgatgaaaagttctaatccacaaatggtaacttttaacaaaaatcactctttgggtagctggaactcctatccctaaatggattgggaaagatgaagatttgtgatactttctgagcacagacagcacctttcagcaactcttggaatgtgtgtttaggtctattgacaagctattggaaacgtgtgggacagaaccagaggtgctccacagcagggctgagaaagtccctcagcttacctccactccaagtgtctgtctcatcatctgtcccaggcctgaaagtcccaaatgaattattcgagtgggttaagacctcaaagatcctgaagtagttggagctaaggtaaatggtttccagaaggtcaccaagtaatatctgcgtttcatcagttgcagttaagatttttgtttcttgaaatactggttttcaaacagatcagaattacctggggagcttgtttaaaatataaatgccccaaggccagctccaggacattctgactccataggtatgtggtaagcccagggaatccaggtaagctcaggtaagcccagggtaagccagggaattgttaacaggaagctggtggtttctggcacccggacaccgactgaattctaggtagcttgcctgctgtagatgagtgtgtttgtggagccctgcgaggggcatcttaggctggcaagggctgaaagacaaagtaggtggaggctagaatggatacagtagtaagaaaaagactccacaggccagtcctggatgaatctgtggccctgaaaacagagaacaggaacagcctaagagcagcatgggagccattccctctccccaggctctccagccatgtccttctcatgtggaaaatggaccaacaatcactgggcattatttggcttcagaactctccgtggagccctcagcctctttatgcactttgatttgtggttttgattgctggcttcatctcagaagctttgagtggtggccttgggtgctgggcatttgcccatccttttccatggaatgttattttcaattaggtaattcattgatatggaaacccaggaacccagaagtcccagtttcggagtgaaggcctaagttgtttgttttaaaaatgggtgcagttggtcggccacacctataatcctagtgctctgggaggctgaggtgggaggtttgcttgaggctaggaatttgagaccagctgagcaaaatagtgagacctcctacaaaaataaaaataaacaaaaattagctgagaatggtggcaaacacctgtagtcttagctactcaggaggctgaggtgaaaggattgcttgagcccaggaggtcaaggttacagcaagcaatgatggtgccactgagctccagcctggctaacagagcaagactctgtctcaaaatataaaaataaaataaaaaataaataaaataaaaataggcacaagaaagtaatggccctgaaagacttcatagaacaaacgttcttaccttcttctacttaatgctcatcctattcccagagatcaaggtgtttggattagcaagggcttcttcttgccatatttataaaccctaacacttcactttctggcctttgattaacactctccatttacaatgggagctcatgcttttctcagctggctaagtgccccagaggtaaactgttacctctctctagtccatctgtctgtggcccaaatgcattctccaggagactctatagctagtctttttttggcaaagagccttgaaagcattttctctccattctacaaattgctcgtcccaggagagaaggaaaattgaatggcaccccaaacagcttatatttgtatttttctggacatctttaaagggtgcttggtgcttgggaaagaattgatctcttgttttatgaagataaatgctttttggctttataggaaggttcattctgcttatttacagtctcaatgaatgaagtgctggtccctgagactaccttgataatttataagatgtgactatggacacaccagcagaatataaaatggcgggagagctaagggtttaatgacatgagcacaggtttgtctcagactccctaatgtctagggaagcagtcctcagacttgaccagcctgcaccccacggaaaggaaaagtaggaccttcaggctagattctcatatgggaagagagcagctatgctaatgttagtttaactaatttgtgtcagttacagatcagttccttcaggattaggttcctcttgagagaatatgttgctataaaatcatcttgcaattgggtatcccatgagatgttctagaaagcatcactaactcaggcttactaagcatgagtgatgagaggacatggggtacatgtgtgaaaacagaacctacaaggaatgcctttgtcgggactcagagaattaatggtactgacagagatgcgagaggggtttttagcagcacacatatatgaatgctcaaaaatttaatccccacagcatctccatgaggttggagttagccgctctgagccttgacatacatatctgtaaaatgggaataagccactaaccatggtcacatattaataactaataagtggtgagacgagctccatgtcttatgtagtattcatatatatgtgtctcatctactcttcacattttttctttaatccaggaaagtgtttgctccaggcacaattgcaagtctgtatagatcttacaattacagcatcctttcctgactccctgacccctgctggaagccttatctagggacttcattctccccatagtctttctctcaagtatgttcataatttttaataaggtagcagccttcccataaatattttcatatcagccagaaactgtcacaggctgaacaaattcatgccctaacaacaccattctggataataaaggattttaccaaatatgggaagaatatattcaggttgagagagaaaatagctttcccaagagtgaggaccaaagtagtttccaaactctctataaattaataataagatagaactataacatcagtttatataagataaattggtatacgacaaactgcttatctacaaagagctgtgattattcactaaaaagaagtggcttgtcttggttgggaaaatcccccagttgggagtttcacagacctgagattgttttcatttcctggtttcctggtcttgggctgattatttagcttttcttaacctcagtttctttatttgccacgttgcaataatgacacctagattttcgggttgtggtaagcattaagtgagggaatgggtgtgcagctctcaccatagtgcttaaaacaaaatgaaagtagccagcattattgttagaataagtatggaaaaaagactttcagacttagaagtcataaaaccacttttctctaaatgtacattttggctcagatgatttccttgttctctctctctctctctctgtctctctctcatttcaatatattccctatcttcctaggtaagaacaatgcaaatttacaaattccagtttatagttttctaaaaagctcaaattcccaaatttctaggaaggaactgaggaacacaaatcaaacaagattcccagagacacacctgggtctctcaactttgaacttgatggtaaagataaagatggcaatgcatgtctctcctttattcctagaactcaccttagccacaaaatttgcctttggacttttcatcagagcaggcgccaccagatccacaaaacagattttggttaagggaagtggtccaaagtaaaaaataacatgaacttttctcagcaaaagtctttttttgtacagaagagccaagcgttttcctcagtgtgcggtacagaggaggcccaggttctgaatccctaatgatctcttcaatgctgtttttcccttttgtgtttttcaggtactctcccctgggtatcgcctgcctgatctgtggaaagatcattgcaatcaaggacttagaagtggttgctaggcaactggggatgtacatggtaacagtgatcataggcctcatcatccacgggggcatctttctccccttgatttactttgtagtgaccaggaaaaaccccttctccttttttgctggcattttccaagcttggatcactgccctgggcaccgcttccaggtagagaacaaaagaaatcacctttctctttgctcactcttttgccctctttgccatttctcatttctcaaaaccctcccatcacaaagttcaataagaacacttggcacacattactaagatcttttggaaaaggcgaatgatttgaatttttgtctccttctaggaacttctgagccttctggtgaacatttttgctggtttgcaactatattggaaatacgatctcacattaaatttttcagataaatgcatgctatttgtttgcatgcctaatttgccacttaaatcattagtttagttttagatgttttctaaagggagtgtaacaggatatttttcaataaacatttcacctgtgatttggaaaatgctatcacaaaatattactctttgaagattttggtaaatacattttcaaaagtaggagaagcagcttttacaaagtaaatggtatgttaggtgagactttttctaacaaaattcggccaagtctttgacctcgacacgaacctctaatggattatttttccccagagttaacttggcattgatgaagaatcagttccccctttgttacttagttccagtacctagaaagccaaagaggaccccagagatatgtagagaaaaatcattttttggactatcatcttggactgaatctaacaaaaacaaaccaaaaaatgaacaagaagaaatacataagaaacgtcttacaattaggctgggcgcagtagctcatgcttgtaatcccagcactttgggaggcctcggcaggcggatcacttgaagtcaggagttcgaggccagcctggctaacatggtgaaaccctgtctctactaaaaatacaaaaattagccaggtgcggtggggggcgcctataatcccagctattcggtagtctgtggcaggagaattgcttgaacctaggaggcagaggttgcagtgagctgagattgcatcactgcactctagtctgggtgacaaagtgaggctccatctgaaaaaaaaaaagaaagaaagaaagaaatgccttacaattgagaatttttaagactagtgttttactttcagcttgcaatcattgttttatttctgcacatatgtccttgggtcacaaaactaagactgaatcataaaacaggtggcagggaggcaagcaaattctgaaacccatagctcatcattcaggtccttgttgcagaacctgtgcccatgcaatgctagggaggtgccactgcatgacacagcagggcctgttgctccacggctactgagcagtcagtcaggtttcccttaagcgacctaacagaccaataatgccaaccacctgggaagccaaataaaacttccatcttgcaaatcaatgaggattcagtgctagtagaaaatggagtttcagacaaagctggaatatatacaatcttaagggtctagattctttacccagtttccgaagatgaaggaaaacacttcaaaatttccttcttgatttataaattttccatgactaagtatctctatccatacagatcttcacttgaagaaaaagagaaaaaaaaaaaaacccaacctggtttaattttatttttgttttctggttataagcctggtatctcatactttatctcataccaggctcataaccagaaaacaaaaataaaataaaatttctgcaggctcaatgtgaaaaagttcaggcagtgaatacaattttgaagaagaaaatgagctttgccaattattctatcacccagtgataactggtcataaccttttaattagtctttagttatatatctttcaagttcttactatgtatgtatatattgttttataaatagttatttttttactggtcaacgtatcataaaagttgtatctattgcaagagactttactaccattttttaaactgcataataatgcactgtatgtactacaatgcaaaccccaccctgtcctagccacagtgatgtatatttaaggcatgtctattaaacagggctgtgacaaacatccttacaaatacatctctgcaaggttgtatgatgatcccctcaggataagtggaatttcagagtcaaatggtatgcacattgacagttttgaagcacattaccagattgctattcagaaaaatgtattattttatgttcccattaactggggtttgagggtgtgcccatccctgcttgcttaccagctctggatattgccagtcactttaatgctttccagtcctattgggtgaaaagtaatctcatgggatatgcatatctttacttctccttcccctcccctttcgcctgccttgtgaattgttcatgaacttggtcattttcctgttgaggtattcgtcccttcctgattgattttcaagctctctttttgtataagaatattagctcatgtgtcacaagttgcaaataatcctcctcttcacttgacatttgtcttaaaaatttactgtgctttttgcctctagaagttttaaatttgtacttagtcaaagctatcaatacttttctttagaatttagaatttagattttgcttaggaatagcttctccaagttaatacaatatgactttttattttcttccaatacctttatggtttagatctttcaactatttcaaaaatattagtattattttcttttgaatgactagaacattatttcagtaactttataagacaaggtgaatcttaaggggatttgcatggcccaaatttgtatttaaatcagagacaaatgctcagattatccaaccaaggctgctaatattagaccaatttcttcccctaactctgtatttcatttgaaaaaaaaaaagtggttttaatctttagttaaaatgtggtttttgcctggatgtggaatttctttttttaaaaggccatgtggcgtgagtcatgtaccgagaattaactgaaggtttctttgccatcatggtcacagagaagaaaaaaaaaaatgtaaaacccagggacagcccacaaaatatccttcctgcctcctcggcccttgtacagaataaagacgttgagggtagttgaacatcttttctcaatggttccagaggctggtgtcagggaggacagagggagtggggtggcctgagactgacctgtcttcagccctccaacttcagtgcagtctgttaaaactaatacgtaaaaaacaaaagaagcatttcaaatatctgacagttattattagcaacatttgaaggctgtcatatggccattgaggcaggaaccaaaaaagcaatgtcagcatgtcagcccatccacacaggaaagcttgaaattaaaattctcaagtcctagtttgattgggtgggtgggttttttaagacaaaaagcctgtccagtagagaaatagaggatatttttatacttaccaatcatttttcccagtcgacttaattgtccaaagaccatttgatgacattttggaaaaatgaatgcaataataaacataaatgtatgccagcaattcctagtttgattgggtgggtgggttttttaagacaaaaagcctgtccagtagagaaatagaggatatttttatacttaccaatcatttttcccagtcgacttaattgtccaaagaccatttgatgacattttggaaaaatgaatgcaataataaacataaatgtatgccagcaattccagaagtatccttagatttgagaatgcttgcaatcgagaatcctggccaccaaccacaactgagcagtcatctcataccagtcctggtgtcctggcaacccttcgaaagggcccaggaaagggtggggtaagaggaagaaagggacactgacttctcattaagatagcaagctaggtctgatgccatcccctgcatgcaaatgaggccaggctccaactttgccctgggtttgcaagattttagttatgagatgtcccccaacaaacaattcttcttcctaccccagaccaagaaggaggcatgagacagacccctgacttgaaatcacaaagaatgttctggtaagagaaatctggctctcctaaggttgttttaggagctcgtgggccagtggtttgataagatgcacatctcgcatccctagttttagggcttctgattcgttggttctggataggccctggaatcttcatttcatttagcttccctggagcagatggtcttctcccactctttgagaaactaagacctctacagggatctatgtccagtttggtcactaattctgaccagtagaaggaggaaactttgacaaaagctgtaagtgcaagagagaaaacacctccaaatgttatctgcattgcaggttttctaattcactttgctaaagtttgaatagaaaaaaatcaagaggatggaccatgaagcacttccatggcagtttgagtgttctgcattgctttctacattacttaaactttgcagcaaatccactcaccctcccaggcacttctatccacatggaaataatattctggcctttagcaacccttactgtttattggtctccaattttgaagacatatgaacgtgtcaggaattctggccttcgaggcttggtcatgtggtcacgaatccacatcccaggcctgggaggagtgggggtgaagtcccttcatatttagtctttgatttgctaatgagcacatgctttcctgctccatgtcattgaagtgactgtagaattggccgatgagcatatatcagggtgttggactatctgtgaggttccccagtgaattgcttgaagctcaggttcatgctgaagtgtgctggacatgtttgttgttatggaaattagcaagtccagctcaggacaatttcccagggctaaatgcaatccattcagtcattttatcggaaacagcatttctagcatgaaattatgggttattcaaaaattcctcatcccattttgctgttgatagctgattcttttctgacatagctggcttttgtttttttttttttgcaacccaattaatatgggcaatcagatgcacttcaatatcgaatccaaggtggaaacagtggccaaaagaaaaaatcttcaagctctgagtatatctccaaaaccagaaccaatgaaaatattttgctgcctattagtgtcttaataagattgaatttgagcctccaactcacgagtttttaatctggctccagatactgcttttttgcatgtcacattgcttgattgacacaaaacaagaaaaactaaggatgcagtggcattccagtttatgcattgtcctgcttctctaaagtggacataaccctgtctctctctttctctttgttctcagtgctggaactttgcctgtcacctttcgttgcctggaagaaaatctggggattgataagcgtgtgactagattcgtccttcctgttggagcaaccattaacatggatggtacagccctttatgaagcggtagccgccatctttatagcccaaatgaatggtgttgtcctggatggaggacagattgtgactgtaaggtgagaagggtggggtaaaacacaaaacaacctctaccctgtttcccctccacactaactccatgtgacagaggccacttgaatttcatttctgctggtggaagacaatgaaggtaataaaaaaagagaaactattggcagccttcaaaaggaaaagattgtgacaagaaagaagactcttattaatacctcctgtttgtattgcacatgtcaacttgctttagaaattggatattatttgatttttagcaatcctgtgatggaagcagggtaatttctttgcccatttaatagacaaagaaactcaggcaccaagaggcatggtagtttgtccatggctacagcatggctgtaagtgaggccaacatcagtaatgatttggcaggactgtaactgaggccaacatcagctgactctggatccaatttttgtttcactgaaatatgctcccttcaatattccatcaccagagggtaatggcagaaattacaaaatactggaagagattcctcaatatgacatataagattttattacaaataaatagcacatagttttgtttttactaaagctatttttatttaaatgtattcatcattttaaaaattcagaaagaacattttcctaagagattgttaaaaatgcattgcctcaccataaacttaaagatcacacctactagccaagccaacactctgtttcttgcttataggttaagtcattgaaaatatcagtcttcagcccattcaatgttatattgacattacagcatgaaataaagctttttgcaatcatctttttaatattatcactcccaacccatctaaatgcttcaattaagccagaagccaatttctgccttatgtcatatccctactctcagtctcaatttcctcatctataaataaggaaggtattcataatttggggctaaaagttggtagttcatggatggactcccagcccagagtgttgctttgtttgccttgaaatatattgtaaaagattagaatttcatcctcttatgagacagctgcccttcagtttcccacagtctcccctgctccctattacttatgcctggcctgctgcacctgtcaccacagcttagccctttaagacaacggagtttgtcaatcttggactcaacaatttataagttttatttcccctctcagattctatgtgatcagaaaacatagggagtaagtgggtaacattctgtgtgacagatgtacttgtagtagaaagagaattccagatattagaacagccaaggcctgggtgattcactttaggaaatgaatgaggtagacactggaatacactttcatcctccatgatgataatcactccactctttggttcctctgagatggcggactctttccatacattgctttgaacatgcccagcagtcctgaagagaaggaatagtcattattcccattttacagaggaggcatgtgaggctcaaagaaattatctgacaaacctaggtctcatggctatgggtgccagaggcacaagtcaaatttctattccacagtttacctcttccaaccacaggtcatttcttctttctgactgtgactcaaaaaaagacattagaatagtgtttttattgactttttccattgggcattagaaggggcaatagtttttgggttcaggctaaggcactagcctctttctcccacttcaaaccccgggcagcactgtcaatctctatattagaaactttggtaataatctggtgtctgcttggttcatgttattcaacagcccattctctggtaggcctttagtgggctaaggccattttaggagatctctcctaagaggcagtgttcatttgggtctgatgtctctacatgctcaggctttttaaaagtccaagctcagggaccacccagtgtctgtagcagtgctggaaatttgctctaatcatgtcctctatgtgttctaggggctgatattgccatggaatggccacttcagagcctttgcttgatctatctagctctgaggtattcaaccagctcaaggacatttttgttaaaacacagctttctcctctctccttctaaccattccagaagatttagtgaatatcccatatgcatctgagttcactttagcaactcagtcagcaaatagagaaaagaaaaaattcaccatgtttaatacacacacacacacacacacacacaatatgaaaacatgaaataacaatcacatttatttaatcagctagaatgtatcatctgaaatgtctcccagtggttctcttgctaaattatctcaccttatacatagataaggaaacagaggctcagagaatagatcacacacagccgtctagaggaacaactataatttaagtttccaaatgctggcatatgcttccatttatttaacttgtgatcctagaaacagccctacaaagtagatattgggttctatattttacagatggagaaaatgaggcacagtaagttgaggtaactgggccagaatcatgctgtttgtaacaggcagaaatgggatttgaacccaggccaccttactctggggtttgtgtttttaaccattacacacactgcctccactatactatactgttgggttgcaaaataataatttatatatatatatatatatatataataaaatcttcacaaccaccctatgaattatatactataagggagcctcagtttcctcatctgcgtaatgggaacaataacaaattctagggtggctgagaacatggtgcctggcttatagtctcttatgagtatgagccaggcaccagtcaataaatgttagcttctattattattattgatgtctaataaaatacacaatactcctagaatattaaagaaaaatgtggctgtgacatcatgagtaccatgatgttactgacaatggaaaatatacttcaggtcagaagatcaagcctttcaaaattatgtcctaacagatatcacgagactactaacctcccttgctttaaaactcaaagatgaaaagggcttcttaagcaagtcttttgccaagcaaaggtaatttctggtatctcgactcttggtcttgatggtaaccatattttccattaagttcccactattagatgggaacttacagatgggagaatggaccagtgagtgattgaatttgtgcttaaattctataaatttatctacacagggtttgttttatattaactgatactactgagcattttcacttgacaaaagatgagtttgaccatatgcatttaaatctctggcccctgggtgggttcagtcaaatcctcctaaattgtagacaccacaagggctacctctggggcacccaccacgggtgtatatacttcatgcctgcagtttgtttggaggaaaatagccaaatctatcttcaggctgcgcttccaagtaaaattttcatttctctcctttcactgcatgtaggaaaatagtgattagaaattcttagcatttttattaattcatagaattttcagtgtagggagggatcaaggccatcaaggacaagtgtggcattgaaatcaagcagaccagtgttcaaatcccagcagaccatgttcaagctgtgtgacctaagtttctccacccatcctatctgtgttttcctcacggtgaaagcaggtgttaccatatatgtcccttgcagggttactgtgaggttctgctctgatattgtgtgtctagtatcttaacagcttccaggaaccctagagaagtgagccaggggagtggaaggccaggcaaagcagaaggcaatgagggatgcagggaaaatcactgcccaagaagctcttgcagggcttagaattccacacacagagacagtgcctaccggagggtgagggtattattagggacaagaggggaaagcaacttccaggaagaattatctttctaagactttgtctcacacaaccaaaggataaccagataatgttaatgttaaccacagtgcaaagggatgtgcaagagtgactcagagcaactgatgctgtgtataaaacagtcaaggtcaagactgttggaacttggggagttccccttccctggtgttctgtctgtttgggaaacagttgagaattcccatcttccagctttcagggctttagggaagttttcattgcaaagcagcctggtcctgtccagatttcttgataagaaaaacaattcacattcactgggcatggtgggggtgggggagttgcaatgtgcccagcctcttgtaagtgcattttaatttattagctcctgaaagcttctgaccaccccatgagagagataccattactatctcctttttacagatgaggaagtcaaggcacagggaggttaagttgcctgtagtcatgtggttaagtggcagagctggaatttgaactcaggttgttcaactgcagaactttcacggctgagcactccacactgtacctcctgtgacccagatggattcaaggaaattggagtgctctgagccttgacaccatggacggggaggggaagggtgtggttggggggtctgtagatcacacccagggcaagtgtctatgcaaggatgggcctaaacctgggaatgatggcaataggggaaaaaacagctcaaaccacaggctctccaggggccttaatcttccaaacgtaagattaggtatattcagcaataagaccccaggattctgtgcttggtcaactgatggcctggatttagttgaaacaatttgagaggctgcctctcagctcataaaatttctagtattttataactacaaagaaagcagtcccccttaccttttggcacccacaaaaacaacttgggaatccatatttccaaagtactcttggatattttgatatgacattttgatatgacagctttgtacaaatggcatctagaaaagaggaaaaagagtcactgccctttgccagaccacagagactccctggtgtcaggacagggcacttgaactccagattaaccctctcccagagacaaacttcaaaacggtgctgggtgtggccctggcattgcttggaaagaactgatgagatgcttcagaaagaaagccttcctttctttcattatcatttcttggcatcccctttctgaataatgtattttccagcccatggtgaggcatccaggcgcctgacgcttagtgtcatttggaatctgttgatttgtttccctgatgtccaactcagttgggtctggatatttgctattctgagttctcatgttaaccttggcaatggccttcttagacccttgccacatagtccaaaagcctctggtgctcacagagacataaaagcgtaagcagaaatgaatgcagttgtgttcccatgggaggattaagggtgatttgtttttatctttaatatttccttgcctgcttttagagccacgcttgccttatttgagccctgtgatatattagactaaccggatagcatcatgggaataaggctccagtccatgaatttataagcttacatcatagttgagcagtacccaaataggccttaatccttaattccttggtcttagtactttagatttctctattccttggtggagagtatggggtgggggttgggggatgaattttatggctgcaggaaaattagagcttaaaattgccagggttggttttgctaagattctttccatttccatgacctgaacttctctgttctcatagcctcacagccaccctggcaagcgtcggcgcggccagtatccccagtgccgggctggtcaccatgctcctcattctgacagccgtgggcctgccaacagaggacatcagcctgctggtggctgtggactggctgctgtaagtgtctgtggatggggttctgctgggactgtgagtactgcctcctagggatgcacaggtggcaaggttgcaaccaagatcttagctaatccccatggcaactccctcactcttccttcctccttcccgctcacatttactgaggacctatttgagaaccaaagaagaaaaagatgaaatatttgaaggcgtcacagtctagtggaggaatcagagagattatgacacaaggttaaaagtacagtaataaggaaccagctactgatgcattcaaagaatctcagaacattatattgaatgaatagagccagaaacaaaggagtatgtactgtatgattccatttatatgaagctctaagaaaagacgatgtaccacatatcaatagaaagagatcagttggggctgggtgcggtggctcatgcctgtaatcccagcacttgtggaggccgaggcaggtggatcatctgaggttaggagttcaagaccagcctggccaacatggtgagaccccatctctactaaaaatacaaaaaattagctgggcgtggtggcatgtgcctataatcccaactactcaagaggcggaggcaggagaattgcttaaactcgggaggcggaggtcgcagtgagctgagactgtgccactgccctctagcctaggggacagagtgcgactctgcctaagaaaaaaaaagaaaaaagaaagagattagtggtttcttgggccaggtatagggggatagagattaactgggaaggaacacaaggaaacctttgggagtgacagaaatgttccatctgcacaggtatgcacaggtgtctacatttgtcaaaactcttcaaaacacacacttaaaatgggtacgttttgttgtatgtaaattatgcttcagtaaagtgattaaaacacagcacacacataaaagcatagtgatagagagaggccttcatcccagtcaagaatggaaggacagagcggagaatatcaagaaacatgaaagtggttactgaatttgagtgttcactaggttccagctactagactgagcactttacatcttcctctttaacaaccttgaaagttaaatgttattattcccactttatagatgaggacactgaggtttatagaggtaaagagacttagaaatggacagatattcgaccctaggtcaggctgcctctggagcctgacaaattcttgtttatggtcacattcaagcttctaaaggcagtggtagctgagctgaatcataaccaataggtaaaagtttctcaggtgtatgtagggagacggggagacaggacattccagtcaaggccagcctgcacaaaggcactgaggctaccagcagtgtgaggatgtacaagtggtctggtactcttggaggcagggcgtggtgaaaggtgagcaagacggacatcctcaaaggccatgcagagaaacttgaacttgaccatgtatggtagttcagctacctttcccagtgaaggacattttcctcatgtagaatactcactgcccattcacaaaggtgggaaagtctaaccagatggtcttcgacaagggggttggaatggatcccctctaagtgcccacttgggcttggatgttctgtgagatgtaatctgatgcctcctgtccagcactggagttaaatgatagggcctccggcaatgccagtcttcaatgtcagaggcacagagtgacaagtgctggcccagagtcccaaggccaaagtgcccacacttatttttcaaactgcctgacttgccagtagcaaattttctgacatttattggcattgattttaagagccagaaaccacatttttcttttttttcagatggagtcttgctctgttgcccaggatggagtgcagtggtgcgatcttggctcactgcaacctctgcctcctgggttcaagcatttctccggcctcagcctcctaagtagctgggactacaggcatgtgccaccacacccggctaatttttgtatttttagtagagacagggtttcactatgttggtcaggctggtctcaaactcctgacctcaagtgatcggcccacctcagcctcccacagtgctgagattacacgggtgagccactgtgcccagcctcagaagccacattttgtggacttgagtctgtttctgcttcccactcccacccttccaaagagaggaaaatgcaagtggccgaagggaggaaggacagctgggaaggctagaaagaagcctgacttctccataagatgtgcctgctgttggtgcagacaacagggcttaggttagaaataagaagtgcccagcactttgggaggctgaagcgggcagatcacctgaggtcgggagttcaagaccagcctgaacaacatggagaaaccccgtctctaccaaaaatgcaaaaataattagccaggtgtggtggcatatgcccgtaatcccagctacttgggaggctaaggcaggagaatcacttgaacctgggaggcggaggttgcagtgagctgagatcgtgccattgcactccagcctgggcaacaagagtgaaactccatctaaaaaaaaaaaaaaaaaaaccaaaaaaaaacagaagtaagaagtggctccctgaacagaatcagttcaacttgggagggctgcaaggaaggccatagattttcctgattggctccttcatcatcagaaaatgctcaggaaatacctttagcggaaggtgacaagcaaacaaaatagcctcatctctgtctctgccagtctctcaggtggtggtagtggcgtccctacctgctagcttggttattctctgtgtcctatattggccccaagggacagcctttctcatgacatctgttcagacaaggcagctgagagtcaatggtggtgtatgggtgagaaggattgtgagagaaggggatgaaggatacaaaggaatggggtaggccatggatggaagggggacaaaagggaaataaagacattggcagtggtctagagacagagcaaatagtagcagctcaataaatgtgagctactcttaaccacatagttgctgtgtgataattgggtccatccacatgaaaagaaagacgaaggaagccatttaagttctgctggctttccccatgacttgttgcttacttaaacccttgactctttgcctctcaagtcttttcaatgcttgtggtcattgagggtccctcgcctgctgtgacaatattgcctcatttttttcttgggcttatttccaaggctttaaaccaccattagaaattcatctttttaaaaaatattattatagaggctgccccccattataatacaaatgcctttgagtggaaaaaaatgcactaatatgatcaggagtgaggaaaaggggtgatatttggtgggtactgcaatgtctttacatctgtctccatttaatccttaaggtgccctatgctgtatttccagatgagaaaactgggaatcagaagggttgagtcttttgcctgatgcacagcagagcttgtatggccaggtcaggacacttcacccaactccacacagcctcctaatttgtactaagtgttctaacagtggggaggaggagcagagaggcccagagttggaacggttggagaagacacacttattagggccacccactgggctatggtttgaatatttgtccagtccaaaactcatgttgacgtttaattgccattgtaacaatattaagaggtgtggcctttaaaaggtgattatatcgtgaaggctccaccctcatgagtggggttggtgcattataaaagggtgaattcagccccttcttgccctctctttgtctttctgccttctgctatgtcatgatgcagaaagaaggcccttaccagataccagtttcttgatcttggatttcccaacctccagaattctgaggaaataaatttctgttctatataaattacccaatctcaagtattttgctatagcagcacagactaagacacacctgattctgcatgctaaccagagaaatatttttgacctatttttttcttctctcagcatgaaaataaaacaaataggctcaatgaggacaaatggggtacaatcaaggtcttggccacccttagaattcaagtcttccagccccagtgggtctgccattgtaggtcctggtccttggcagtcacttgttttcaagcctgttggatgtgagtcacttcatgaaacattcaaaaccctgcctacttctgacctaaatgttagcaaatgaaacaggagggctgggccctcccagatcaccccatgcaggtgctcacatgcttacacttgcaaaggaaagcagagcgtcctaactccagggctgaagtgtgtcagcagaagggagttggctgaatttttttttttttttaaaaaggatgatacatttggattaactatgttgatgaaatcatataatagaaaaccccatcctaggctggagctgggaagaaaggagcaaatgaagagctgttgtccagttctggggctctgatctcaaatggagggaggagtgtgatcaagggaaagagagtctaagaggcaggagccctcagtctgagctctgcacttactatctaaaggaccttgggcaagtgactttctgagcctcagctacatcatgtgtaaaatggggcaataacatatcaggttggaagcaagagtctaggttcaatgcctttgagtgcccttctagttttaagacctagagtagaattctgctggggatgaatgtttgtatacaaataagcacgagcattccttttaagaggaaaagaaaaaggaagggtagaggatcctgggaaaatgtgtgtagctgtttgtagctaggtcagatctgctttgaattagtaatggtggcacattctttctcaccagcaagaggagttctggaaactagctcttggttgtgagctctgtgactattgggtgctcattagtgtgtaagtggtggtgggggctaagatgagatggggtgcaactggccattccctagataagtagtctgtggaggaaaagcagagaaaaagaaaagggggaaacttcacctctttagccaaggtttgtaagctttcataactctagcaatttttcaatttaaaaccaaacaaagcctacagtgacatttaatgtgtcacagtgtttgccaactgctggagaccagccagcctcattactgccctctaagccctggatggttttcaacaggcaggcttagctgctctgtaaatgtcatggtgaaaaccaagattctggagccctgaaaaatgccgagtcccagagcactggatgggtgggactgtttaaaaccagaaccttcccctgggtccaggaagccctttgcgtcaggagcccttggcagatatttatgagaccttgctgacaccccagtgtctctgaaggaggcaggatggagtggtaaatgggagccaataccaggaagaggtaataaataactgtgtctggctacaggtaggaaaaggaaaatcaaaataaagtgaaatccgagtggacctatggcctaattctcacataagactctgctagtgagatcttttctgggctcacatgtgctaattggggaatatagttgagacggcacttagaaggaagacctcaaagagcctccaccctccaggagggctctgaagctcctcccaacagcattcctctctggagagaatagagcattcattctcaaactcgagcatgcaccaaaatctcccagagatatatctgaggtggggctggagaattgacatttctagcaagttcccaggtgattctgatgatgcaatctccagggactctcccttccagaagcaatgaactagagacggagaaggaaaacaggagtttctgattgtgggtatatgagcacctctacttttttttgagttaactcttgacagttgatgcatcctttcaaaaaaatagattgaaaagatacaggatgcaaatagctaatacttagtgagtgctccttaagtgttagatattgttctaagcactttacatgggctcgtttgaaagtcacagcagattatgaagcaactaatagtattatcattgttttacagttgagaaaacaggttcagagagaagtaacttatcccaatttagtggatattaactggctgaattggggttcaaacccagatgatctagatatccttgggtgttccaagcatgctcatctgagttctgctgttttaaaaatttgagacacacacatgcacatgcacacacacacacacacaaacttaactaactgaccctccactcatggctggtggaaaacaaaactaattcctacgttaaccttttctttgaagattttaggggcttatgtctatcttagtcttttgctttgatttcccacttccactgaattctcttttttacatcttatctccggtctacatcaacctccccatggaatgtggccccttttccactaagtcctttcctctctcaccaaagtttctctgacttgaggcagcataattgcagatcaaggcgggatggggcagggctatagttctgcgcagcaaaatcattttttgatatatcacaaaataaatgcatgttcatagcaaagggaaggacaaagttcaaaagagtaataaaatgaaaaagaagtcgtctccccttcatcgactgttgaatctcaagtgttatttcactgttaataatttcaggtagcacagacataaaataaaaatgtaatgttaggcatctccttttctaaaaaatcttttagtattccccacccctgggaatttccccttgggactccttgttctccatctttgaatatttccccagctctctggacacccctctccttttcatctgtaaagtaatctgagctctctgtgcctctctcctcatcctgctagatcatggcctgcatcctgactttttaccacgaaaatatctaaccagatgttttactaaacaaaaaccaattgtgtctctagagctaatctgctttcaagtcttaaattcacaatccatcctggtcctgccccttccacataccagcctccccattctcccctgcccagcctgtgccataagtaaatgaaacatagtctcagtcctcaaggagcttatagtctagtaatggggtcaagaaatcccaatggagcctcctaggtgcaaaaagaaatggataaggtgtagggaggaataaaagagaaaatgctctgatccccttttcacctggactaaaaatggtaatataatgagaagcttcttctgggtcatataagccttttatataaaacagccttggtggaggacctcttggttgacaagcactcaatacatgttagcagttattatcttctcaacatgcttgcaggtgagtatccctctccatatgttacgaatgagaaagctgagcaggacaggctaagaaatctttaatgcttgagctgggagtgtcatccaggctggtatccggacttcacgctcttagccaatgcttacgtggatctccttttcttccctaaccccatgtgactttagcccttgaatgcccagagctgtgccagccttcctcgggtttggggcctcaagtgacccctcttccacaccctgcccctaaagacagtcccttcgcaccatgcatcctgagaggcaggtgctatgttttgtttctatcaatattaagttgaaccatatgaaattgccaatatttgacctttttatatggaaataaatggcaatttcatatggttcaatccaatgcaagacaccagatgaattgtgggtgacagctccctcagccctgttcttctctgtgaaccaggagttccagacgatttcacatttccctgttggaggatttagactgagagatgaagatgagagagagtaccttggtacttgtttttctttcagtgaaccagacccagtgactcagtgtgaagtaactcggtcaagcccctctctcatttttggttcctggtgacctctaaagcatagccgtgtcatctgtagaaaacccatgaaatgcaagatctgctttcatcttcatccccttcttgcagtcctgacacacagcgtccagacccaaagatggtgtcacacactctaaaagttgtcttttaccaagccttaaagctcttgagggcaacgcgaaagacagggtttcctgagtggtgagggatgattgtgagagaaaatgaaactctgcctgtgaagaaactttccacacatgaaccacaaactcccatgtcctgccttgggccccagttaaacttccccagagttggtcagacattcccctggcagcctcaagggtgttctgccttgcagcattttcagaaaggaagacccatgcagagcagccatgacctacctcctggctgggcatcctgggaatcttcccagaatgccttgtggcagagaaacctggcatgagagggctctgtattctagtttaatccaaattgacagctttctgtttaacagatcccctttaacgtcctgccttctcacttagaaacctattttcataatcttaccttttactccttcccttctgtattgatggaatacagtccctccaccaaaggaaatggcctttatctccactctggacttccatcctctctgatctctctaggaacctaacttcatcaattattccctcttctctgtatcttcagttacttcttccccaccaacctcttctcattttgatttaaacatgttcaaatattctacctcttaaaacaaaacacaaatttgatctcctttccatttccatctgccatttcctctccttcctttctcaatcaatcatcttgaataagctgattatacataatgtctccatttcttcacttcactttccattttttacctatagtgagctggcttctatcactacctctgtattgaaactgctcttgccaggccaatagtgacctctttgttgttaaaaccaaaagaatcttcttttttaagatggagtctcgctctgttgcccaggctggagtgcagtggcgctatcatggctcactgcaaccttcgtctctcaggcccaagcgattctcccacctcagcctccagagcagctgggattacaggtgcacgacaccacacccggctaattttttgcatttttagtagagatggggtttcaccgtgctggccaggctgatctcaaacacctgacctcatgatccaccaacctcagcctcccagagaaacgtcttaccctcatctcacctgatccctagataataattagggttgtttgccatacccttattttgaagcatacttccatttacttacaaaatgacaaactcttctagtttcctttaacttttgcaggctcttatcttgcccattcattaaaagttggttgaccttagtgttccagcctagactgtctgctttttacactctgcattctctccaagggttaattaagcacctcggtggcatcctcagccttctctatgggatgagtcctattatcacctgcatcacagatgtgtctcctgaccatcagtctatattaccagccatctgtggggcatctgctcataactgagtcacatgcttcaccctcaacgtgtccaaaccaaagccagaatctttcccgctccaactgaccatgctccctacatatggttacattgtctactggttgcccaaaccagaaacctgagaggaatctttgactcttttttattccctataaccaatcagtcttcaagtcctataattctgtctcctgagtcttgctcaaatccatctttctccaaacccatcatatcctcactaactggatttcactctttcaggcttatgattttttagttcgttcttcacaatggaacaaacatgatcttttctttcaatggctcttcattacacttgagataaagactaactcctgaacttggctgataaggccatacatgatttggttaattcttactttctgcgtctctcactatacttgttagccatcctgaattcaactaagtgttcctacctcttagatttcatgcatattatttctttcctctctctatctcattttcttggacttatccttagggcccaactcaagacacttctacttaaagcttttcttatgacccaagtgtgatagtgttctacctacatgaccctgtagcactctgtactcatttctttttgaacatttatctcactctagtggaggaggtagacaaataaacagtacgtgggttcttggggaaaagggagtttaagaaggatttttgctgcctaagcaattggcatagtgcccttacacactctaagatgcttattaaacatctgttgaataaataaattcactaacaaagaactcaaactattagagttgatgttttcttctttctacttagctattaacaggtgtaagaaaaggaacattttcttgctcatgtatgcctgtaacctacaatgagtacttaaaggatgtctagtatttctcttattccgcttagtacaacctcctgtgaggttgggattagcctcattcccttgctcaggtgaaaagttatttgctcaaatgggaatcagaagccctgggttagtgttctcacccaaggtccagggccctttgcatcttgattttgcatcaaaagaataaaagcatcaatctgcttttattgttttttaaaaattcattttaaaatattctttcattcatttttgagacagagtcttgctctatggcccaggctggagtgcaatggcacaatcttgactcactgcagcctctgcctaccgggctcaaacgattctcctatctcagcctcccgagtagctgggattacaggcgtgcaccaccacgcctggctaatttttgtatttttagtagagactgggtttagtagagaccagggtggtcttgcactcctgacctcaagtaatccacccacctcagcctcccaaagtgctgggattgcaggcgtgagccactgcatccggccagtctgcttttattctatacaactctgtcttccatccattcctgtcttaatggctatttcattggccagagttctttttcaaattcaaggagatttgatggcatggaagagatgtggtggtaaaaagaaaaaatgtggggaaaacttactcagaaatcctattccaaaaacttggctgcttcagtggctgcttctggagagcaaggatttggtgtcaagggttgaagaagcagtcgtttgtaaacttatgtcaaccacttgagtggaaatggatgtgttaaactggaaaagtcattaaccctttagcataatattttgtgcttttgttcataacatggtgtgtgagtggagttatccccaaaaacggtaggacccagcacataatgagtgtcaaccataggctaggaactgaatttgtcttccccaaattctacaaaatattaatagttattttggctacatgagaaaaattatggttgagaaagtgtcttagtccattcagactgctataacaaaatactatagaccaggtaggtggcgtataaacagcaaaaatttatttcttacagttctgtggaggcttgaaagtccaagatcaaggcactgggagattctgtgtctggtgagggcctgcttcctcatagacagctatcttttcactctgcctcacatggtagaagggccaaggagtctctattgggcctcttttctgaggtcactgatcccattcatgaaggctccacccttgtgacctaatcacctcccaatggtcccatctccaaataccatcaccttggagatgattaggtttcgtcatatgaattttggggggatgcaaacgttcagatcacagcagtaagtcatccagatcacacagttagtaggtggctgagctagattcaaaatcagggctgtgtggttccagggtgcttctcaacatgtggcagatggtggattctggaatggtaccgcctgtgttcacatttgctgtatgactttactaggatgtcagactttgggaagccactaatctctccaggccttagttctgtcatctagtaaatacgaataatattacctcttcagagttacagtgagggttaataaggtagtatctataaagtatattctttgttttcttttctttctttctttttttttttttgaggcagagtcttgctcttgcccagactggagtgtagtggcaccatctcggctcactgcaacctctgcctccccagttcaagtgattctcccatcccagcctcctgagtatctgggattataggtgcacaccaccatgcccggctaattttgtatttttagtactgtattgttaaccaggctggtctcaaatgcctgacctcaggtgatccgcccacctcagcctcccaaagtgctgcgattacaggcatgagccgccatgcccagcctataaactatattcttatacatagtaagtgtgatataaatttaactgtcatcatcattatcactaccaccaccaccattacctttggtgtctttctttgccaataatgcaaattattctgggttatgagatcaatgggtactcagagtattgctctgaaagacctcagcattctttggaattttgcaattggtcaaaggtattgtatatgtaaactaaaaagtatctgagtcaggtctcaatcaatttagaagtttatttttccaaggttaaagacatgcccagaagaaaaaaacatggaatcacagaaacagtctgtagcctgtacttttctccaaagatgattttgagggcttccatatttaaaggggaaatgcagactggagggaaaagagggagagtctggtcactttactgaatccacatgttgccagggaaaagaagctggtagggcaatagacaattatgtatttatcttgtgctcagtaaatcagcactttacataagataaggtgaatatagagtagctacctgtggagatatttaactattagctatctgcttaggaacagaaggagaggcagtttcttgcatgattcaactttcagcttttttttttttccccatttgacatagtaaattgggggctggagattttactttcctttcacagatatatgactcaggatacattccaggagggattgaaagtatagtggagtagctccaaagtagaccacaactgtataacggacaaataggtcagctagttagttgggagcgttgccataggaattgttgtgctattaaatagggttaatgttttcagggggagatagtagcttaactagccatatttggatgatctacctagaagttgccacaaatatatttgaattgacttgatacaatttataataatattaaaattatacatcatagaataaataatttttttgagttcttattaaatgtccggaagcatgtaagcactttgttatcttatttaatcttcacaacaaccttatgtattggagatttttattattttcattttataaacgaggcaactaaggctctcaaatgtcaagtatgatcagggttgtcaaacagccaagggacaaattggcatttgaatccaaatcaggctgcctctaaagttcgtgctttttcttaactactatcatgtattccttcctaaacccacgtactggggcttcttagcaattattccaagtgcccgattttgtggatgacctcaagacgcagtcttcactcagatgtagacccgatcacactgaggcagattctccaaagcagaagaggcgcaagagcattctcagatggagagatgcccctgagagttaaactccagctctgatcatatttttttccacattttcttcttagttgaaattagaaagaccaccagcttataccttgcaaacaactggccttgcaaaggagccaggcccgacttttcctagtgcagcttccttattattctctaataagaaatagatttgataatagcaactagaattcatttagagtctttgttccaagaacaaattaaagtttccgctttgcctggaactcatattatttgaattgaaagctaaaatgtcctggactaagactgtctcagcagcatctttatgtaaactccttcattttaatttttttaacttttttttgtggttttccagcatccttccttttaagactttgaatatctagtaaacatggccaaaagtattcttcacactgatttggcttgaacttatggatgagaggagaaaacttactcttaagaatttaattagctttcctggcactgaatttctaagagagttatcaaccattcttttttcaagtcaaaacttgcaactcaagacggggagaaggattttcttaacatttcctgattccagaaacattctggaagatttatttttttaggttaatagagcaagataaagtattttgtttttttcaggacaagtagtcataacacatattggtcaatgagaaaattatggctggatttcttatctaacagctgcgtctgtgtgtgagggaagcaggtgcagggagaaaggaagggttagttcctattcttacaaaaagaatgacttttctactatgagaaagttcacagatggtaagtttttcagtaaaacaaataagtaagataagcagagatagtgtagagtcttcaaaaacacaacagtttaaatcaggaggggttgctgtactcagctaggtgtgtctggagcctgtgtactagttctgatttggacacattatttttctttaatcttttctttcctcctcctccttttcctttgctactggttattggtgtttaccatttgccagacattttactaagcactttacatacgttatctcactgaattttcacacggcctatgagagaagtataagcatcacctccaactgacaaacaaggaagtcaaggctcatgaaagttaagtaacttgccccaaatcaggcagagggaaaaggtagagccagtactcaaccctatgtctctctgactccagaccttgacctctcaactaccacataatactgcttcctcactgaaccttttctgttctttgtccccagggacaggatgagaacttcagtcaatgttgtgggtgactcttttggggctgggatagtctatcacctctccaagtctgagctggataccattgactcccagcatcgagtgcatgaagatattgaaatgaccaagactcaatccatttatgatgacatgaagaaccacagggaaagcaactctaatcaatgtgtctatgctgcacacaactctgtcatagtagatgaatgcaaggtacatttcccattcatggatatcgagacttgtatatagtagtgcatgcttgatttctttaaaaaaaaaaaaaccgtaaagccctgcatgtattattgtcacatttattttcctaaagaatcatgtaacccaagcttctgtgagtcccagatcatctaattctgtgtctaacatggcaggaaatcaacaagtctgatggagaaagagtcaatcagttgcttatttcgtccatgtgatgtgaaacaaccattcgggttcccctatctaccccatttaactaatttgaccagttgtcttgaatatttcgcccaagaatttgtggttactaggccgaggcgggcagatcacgaggtcaggagatcaagaccatcctggctaacaaggtgaaaccctgtctctactaaaaatacaaaaaattagccaggtgtggtggcgggcgccctcctgctagtcaggaggctgaggtgggagaatggcgtgaacccgggaggcagagcttgcattgagccgagattgcgccaccgcactccagcctgggcgacagaacaagactccatctcaaaaaaaaaaaaaaaaaagaatttgtggctactgactttcaaatattttattcctcaaattaaacatcaagagaaatccccagcatcatctgatgtacctagcacaagtagtcctccttgctatatatcatatattggtcaaaaatgtgccaacttaactttacacaactatctttttcttatttgtgtgggaaaggtgaattttgacctgagagtaccttgctccaaaagtgggtaaacaatttcaagtaaagaacagctatccttcaggacaattatccagaaatgtctttttaaaaacactacatctcagacaatgcctggctgtgccatctttctgcagcatggatgttctgggctctcctccaagctgttgggtgctaattcttcaagcttgatgggctctgtctagccttcattgtaactaatttgacattgtcaaagtcagagtgtcatgaccagagtaaagcaaacttggagaaaccctggcaggtgagcagaatcaactctgggggttggtttctaaaatgattccacacagcagctgaggacaagctgaacccagccagagatctctggtagctttttgacttctgttgacaaggtcacatttaatcactaatttcttcctatattacttctgggtcattacaaatacatactgtggctcttgctgggcaactaagggtgtcatagaaacaattctctttactggattgtaacataggtccagaattctagtggactagcacaggctttttcttgtcctctctttgtaagatacatacatgggtgaacaaggactctgaaacaaattagggagggaaaccacccatcaagaggcaattgcacaagtttattaattgactcagtgaaaatgattcaaattattagaaattcagatgtacctagaggacatgatgcattctcatggaaagctggtgtttcccacatctgagtgaatgtgctggattattccccatcaaaatgttagtttgaatcaacaagggtcaataatcttgtgaatggctttatgttctagtatatttaagtacttattgtgtgccttgtaagattcagttgagtgcgcctgtctcattcctgtgagatcctatattttgattattcatccagtatttattgaatgcctattatctataaagccataaattaggcactggaggacagcaaaaagaatgtataatgttgtaatgatgataagacttgaactcaaattattgccatatgaggaaaaattatgtaaaacaaaaaaatcacaattttttaaacatttcataattatatttgagaagaatcctagtggttaactgcgtatggcccttttggaatttctcaagaggcctcttaatattttgtaggacactttttgaaaaagaaggtgtgggcgtggagatgtctttagatttcagacttcctggatttgtttttgaaggacatcaagcacctgaggataaatttgcttctttttcttttttttaagacggagtttcactcttgttgcccaggctggagtgcaatggcgtgctctcggctcaccacaacctccgcctcccaggttcaagcaattctcctgcctcagcctctcgagtagctgggattacagtcatgtgccaccatgcccagctaatttttttgtatttttagtagagatggggtttctccatgttggtcaggcttgtcagtaactccttacctcaggtgatccacctgcctcggcctcccaaggtgctgggattacaggcgtgagccactgcacctggccaatttgcttcgttttttaaagcaaactatttcaagccctataaggaaatgtgaattatccatattagtagaaagtaagctcattaggagtaaggctttgtccccagttatactactgtgacccagccctaaaatagtgtctggcatgttgtaggggactcaataaatatttgttgaatggatccttttagcatctttagtccttgctgtgttttaggtaacctttttgctggacagttccatagagatagtggctcagtctctatgtaaatggttagccagccaaccacctgcaaactcattggttaattagcctttaggtgaccagtggtcaagctgagcaggtcttgaagatgatgaaaatagctctattggtttatcaactatttcagttgtttacatttttaatgaaattgttgggttcagcttagtgaaggctatttgatcctcagcctttgctaggtaaagcaagttgattcttctcactctaaatcagttaactgtgttgatgctggtgtgggaaggaggcagccagagccatggagataaatttacaccctttctgaggatatctgggtcacatttacttattcctttgaacttccttatggttaattctgtctcactatttcccactttttaaaaactgagatgggagatgtcagcgcttgctgccaatgccatcctctttttcttttgtattacccaagtggttggagcagagagaagtgggacaggttggggaatggagtcctggctttctttagcccagccaagaaaggaaacgccaaaaaaatctgctgtcccagattcttttgaaacataggccccagtatttacaaacaaaaaaacaaaacaaaaacacttccccccaagtgctgtctggtctttcaaaggcaccacactgtgattgataattttgtaccactattgatgcggttcatcgctgagagccaaataggcacattcaaggttatagtgaacagacaactttctctgggcagacagtctgtccctggcaatctttcttgacagttcactgaaagggaaacaaatttgctgcagctctggtcaaaactttaaccatttcaagcattgttatgtcttgttggtctgtgtattcaaactcttgcctggtaatagtagtttgaagttacacaatagttttcaagtttaatcagaataactgcatgtggagcagtcattgctaattgcatggtctgtttttctgaaaaaaattggggggctaatggggattggataaatggtttttattttcctttgcttgattcgttgaagggcacttggttttctgttcctagcatgttgtatgtggtcatgatgcatgcatttcacttccacttgggtaagaagaaagtcagatttctttcaaacattactgcgtttgtcacgtctccatattctaatgctttcataaatccagtctctccattatgtggaatatcagtcgtgggtttaagtttgcacatgacgttgaggacagacagacagaaggtaagctaggaaaactacttagaagtggaggggaaaacctcctattctgcaaaaaggttcagttcactttgagccagggaagcataatatagatggtctggtaattttatctgattattaaatgtctgcattgaagtaatttagataaacattgtcaccaatctcagacttttaattctccctacttttctttttaatctttaaagctgggatagcttatttggcacagctgaaatgtcatgatttctgatttaaaaattagacacgtatgccatctacctggtgtcattgcaactgaacctttcacatgcatgagtagaactagatacctagttctggatttcttcctctgtggttgtatggagtagcacatgggcactgtattttaaggactgtgttattgtgtgatggatctctgggtagttagacaccccacaacactaaaaacatagtagaagttattccccaaattacaaagcagctttaataccttgatactcccaaggcaaatatggatttttaaaattctcagatcactgttgaaacccaagacaggttcaaattcaatttggaaagaactccatttaaaactaatatttcagtcatgtagtataatcttggatttggtgcttctccacataacccacagggcttttttctggttcgtggtctgtaagctggatgttgatgataattattttcaggtaactctggcagccaatggaaagtcagccgactgcagtgttgaggaagaaccttggaaacgtgagaaataaggatatgagtctcagcaaattcttgaataaactccccagcgtatcctatggtaactgatgatataaacaagctttctttaaaaaggaaaaaaatgcgtatatttctatgtttacttaatctgttagccgaggcttagaggagctcttgtgagtcagtgatgacaggcacggtgctgtgtctttgccaaataatgctttataaccgtctaattttctcacttgtattattatttgaatggatgctgctggaggaatcagttggaattgaagacacgttcttgccagcttcccttttctcccaagatgcagaaatgtggatgctcttttcccaggggacatgagtaaagcagtgtggtacactccagggacttgggaaaatgagcaaacacacagcgtgttattccttaaagtgttctccatgtctcgccttgttatgcacaagagattctattaaaagcctctagaagtaactccccttaaaatgtctagtaaagcttgcacatggattgattaaaagcaaatacctgtcttagggaattctgacaatttatcttccatatgctctttaagtaaaatgtttcaaagacagttttaaagggagccatgctcttaaaggcagttgattaaagaacctgttacatctctgccttaccctgtgtaatctgtgagaacaatggttgaaatttcaaagtatgtttcattattctttctaaatttgataattgattaggaagtattttatatataaccactgtagatattgacaaaagtaagagagcacagtcaacataaagtttaaccagagttaaatattcaaatttatttatgttcggtttgccttcacctggtgtagtaaaatcaaatgagattatttggtatgtgttttgctttgtttaacccaaaagattattttttggttcctaaagaaaaagatatttttaatctgtcaattatttcagtcatcatctcatcgtcctagaaagcctggtcattttactgtcctcacacatggaagacacttgtgttggctgtgcctcttttaatgtcatctcttgatgaaacaaaaatactggtatttatccaatatgttgaaagcgttttgttatcttctatcaaagcacataaaaccagttataggacacagttggaagcagagccagtcttcctcctcagtcttctcagtagaaaggaacagaaaacaaacatctgtgcaaaaccctataaaagtgatattcctatggcagagtccaggcagccttgaacaatgacatggcaacaaaggatggctctgtacaacttcacagatggaatcttgtttaaggctgtgaagttttaaggaataaataatataattggtgtagcacagtgccttgcatgcagtaggcagccaacaaatccttaatgattggtaatgcaagctaaaatttttaatgtctctactatccttttttattgaataacgcacagtattttcctaaggttgctgggtttgggagtaagcttgggacttgaatcattgagaaataaagcacatttgactctaagaagtatgtagaaccttgtttataggtgagaataggctgtattacatgaaaccagcggagggatgctgagacagtcatggtttatagaatccaaattctctgagatgagggtgcttatggacctcaaatagcctttcttatctgctccttgtgacttctctcttttaaatcagatacctttgaaacatacaagagacatgagattccagttgtttttgtctcctaaaccctagtgatttttggataaggatcactactgaacagtattaggcaacttttcatttttgcttttcaaatgacattggtctttatttccagtagatgggcagtaaacagggtcagggtggtcaagggatatgattaagtgtagtagtagaaaatgcattctttttttttttttttttttagacagagtcttgctctgttgctcaggctggagtacagtggcacgatctcagctcactgcactgcaatgtccacctctctagttcaagcgattctcctgtctcagcctcccgagtagctgggactacaggcacatgccaccatgcctggctaattttttgtatttttagtacagatgggtttcattatgttagccaggatggtctcgatctcctgacctcatgatccacccgccatggcctcccaaagtgctgggattacaggcgtgagccaccgtgcccggccagaaaatacattctttacagcaaatgttataggttaaggagacagttcctgggtttagctgtgaaactgtttaggattttctttaagtggtgttcccaagagcttttttctggtaagttggaggctataggcaaagcgtctaggagcttgttgttttttgctatggaaggccagctttgggatctatatacatgggcatgtttctcaatggagtggtcacaggattctcttctcagaactctgcctgaaacctttccggtgtgttttgtcttcaactttttcctagctatcctattagcctgtaaatatgtcagcagacaatgtgtttggaagaaacaaggtgtacaacttcacaaagcaagttttttctggtctgagacttactgtgtgcaggaagtctcgtgagaatatacttagaaaatcacacttatctggaaattcaataagtcatattaaaaatatacaatttcttgaactcaggactagcctgaaaatccaaaatgcatgtagagttgacatgttgacatatgtctatgtcctctgtttttatgtaagcctcatttatttctcccttgccatgcccatttgggattttctttgcccagcatatgtgccataaacagaacaaatggatccagggtatacctctaataacctttatctaaatagaatacatttaacctgtcaattatatgtatagatttatcctaattggttcaacatatatatgaatgcttgtaatagtctgttactatttgataatgcataaatgttatatttatatacagttacagcaggccagaaacatacatacactgcatcctgtaaggtctgtaaatcagggcttcggcaatgccattttgctatagactcattcatgttttttaggaatcagaatcatttcaggagaaaaccaactaagtagactttaattcttctctttctcattcttgccctttgagaaacccaagtggaatcatcacttaattacttactcaaattcaatgaatcaaatccaatccaatcagtgagaagaatagcttatctttcaaggtaatactttaccttagatctttgagggcatgcttcccatacaaagagcatcagaaaatcagggcaatcatctagatctcacagatcttcaacataggactctaggttatgagagctgaaccacatagctatcagtttcagtttttacttcctattgagtgtgtagaaacacagcctatggttttgctgtctgcagaagttaccataccctgtaaaagacaaatatttctttctcctctcgaaccactagtcagcctggatattcatgaaagctgaaagaaggggtgccaaaatgcctagctcctggatttagactcatggaatatgagaaaggcttagggaaaattcaagtcatggggagattcctgctaggtgatgccaggaatctcaatgacctgttgattagagggtctctggtcatttccacttgtgtgtggagaaatacatcatttgcatatgtatctagtcaagaagcccttttggagcaaagtggttgggaaactcatttactgggtccaccaaaggaaacccaattctgccatgtttttgcaaatactacacgtccctttgctctcaatagcaaaagtgatgttatagttttttttacttttgtcagaatcaaggcttcggccacctgtgcaatattttcccatggaatgcagcagtaaatccaagtaggtatatccgtgctcagagagaattctccatagttctgactcctgaaaaacaagtctcattagctctcatctagtttgatgactaaaagtgcacagcagttataccccagtggaagtgatttttctcacctagctgctctctaactcttacggctatctagttgtctgagctgctggtttgttttacttattctccaactgaactcattccaaaccaagaaaaaggaccaaatgaaattttcagttattatcatacttgctccttgaataagaatgctagagtctggaggcagaagaagactaagttaaaaaaaaaacagcctgaaggaattctggagtgagttttgtaagtctaattgtcaaagaagataaatggtctcagtatctgtagtaatttctggttaagcctagagggatcactgagtgccaatccaagcaggtggcactagaggcagattgttctcctagcatagagtgagtttccagctgctcatgacacattttcttatgattttccctaaaagaaaaccaaattttctactccacctcttcctttcctatcattccacttattgttgctgctttgctaacagccagcttagtaagccatcacacaagttagtgtgaggcttggttttaaaatagataacagagaatcttgattaaatagtatccaactttgtagcataacacagctaattcaggcaatgacatagagatgataagaaacaacatggtttggtagagggaacatttgatttagactctgcccatttttagctgtatgacttacataagtcattttgtgtccaagcctcattttctcccatatgaaaagtgaaggggttggattaaatgactaaaatccccttccagccctatgagcccaatgtattatgatctctgctttgtttccttcttaagaggcttcctactataaaatgtgacctatttacattttaagttgaagtagcccacaataatgaataatcaatttagatttttctcatctcctttgggagaaattaaattcaagcctctattcatttgatgttttacaacaagcttcaaagttggccatgttcattcacagtttgatattttgagacaccaataaaagttttttaataaaagttcccttgacttaaactcaccttcctaatagaagtagtgatttggctcacggaaaaatgtttccagagtcaacatgagaggactggatgaacctacagcctcactcaagctgttgcatcattgctgctgtagcaacagagccctctctgaatacccaaaacacacaattttctccaacaattctaattgcccacccagtatgggaatttgagagcctttggtgaataaccttgatcactcttttgaaatttggtacaacacttgcacaatcacggcaactgtttgtaaatatcttttcttctccgccagtatgtagacatgcacacccattcacaagtaagcccgcaaattcattttcacattttcctcttggtttgtttttatcatgggtatcacattgcaggaagagatgctctaacttacaagaatggaattttctgactatcattgccctcttcaaggcctgattagtttgtagggtggatgggatacaatgcatggtctacaaggtccatgtcaccagccatgatctttaaacaacctcttgcactttctggcactgctgcaatggcccatggtggacacctctgctgtttgtccaaacttctgctaaatagagtagtgttggtatttgttgtgttgtgaactcctttgttgtcagagaagacttcagctcttcaggtttgcaagggcaagatgtaaagctaggactgaaaggattgggttttgtttttcggccggcttttttccattagtgcaaaaaacctgatgcaagggcagcaagataaacacaatttcttcattgacccagataagaacctgtagaaaagtgagagatgcccctaagttcctatttcatttatcctaaataatatcctgaataactactgatcagtttttttctatgtccagccttgcttcactttccaacctccaggccaaatattcattttgatattttacaaaatccttctggtttttacacagggcccttttgtgctgagaataaaaccagctattggaacagacctcactgctttgtagagtcagaagttgacctagagaatgggtagcaacaggtcctcagtttctctggagacacccccaatccttgggtgagtgttgaaacctgacaactgactgttagccttgtcatcatcctcactggagatggagatgttgcagtcggagcctcactccttctggggcactgtttcttctcatggcaaccattttgcctgcctggaaacagcctgttgcctttgctagggggcaaatacacacactagccaaggaagttggtccagcacatctctgaggtttctcccccatggacccatggagcgaattccctgagataaatgatcagaaagttggctgtctggtggtttaatactccataagagttacttcccttatagaaagtcatcctttggcatctagatttttctacaaatcaccttaactccctccctttctctttctcctggaaaacctcagcattgcatctccatgttgcacaacacagatcagattatctggtcactatagagatttgtatataaaaaaactacttttttgaggattttgtatattgtttttctatttgttttctacagcttgaggaaagagctggcaaactgtgaatctaacttgatcttgttgccagcagatatattttggcttcctggtaagagtctgtgttaccagggacaatatattgccctctgatcagtattgcaccctaaatccacaaattcctccagcccagtcttacatttttttaaacaaatcccctagcttgtttgctattatttataaagagcattagaaaatgtatttatagacctggatgttatatgtttaatattaatttagcctttaataatgttataggtttgtaactattcttcagaaattataaagaactcagtgtagactgaattaatctatttagtatctgtaattttgcagacatattttcttacagtattttctatgtaaccacacatgtagaattataactaattagagcacaagaagtttcttcagcaatttagagctaccaattgtttcttgactatatagtcacatttgacaaatttaagaacccagtctttagtgatgcaataaacaaaatgaaccattaagaacaaggaattgcttaaatcccttagctggtgaggatatacatctaaataattcatctttctaactcaaggaatggtgctgattttttaaatgtttgacaccaggccttgtttttccagctgagcattctcattttgcttttctctaagactatcaaagacaaggtattaatagtaggattattcctagatcagaatgtttcatacattcctaaaggtttatgtggaaattggcttaggaaaactttgagtagcagagactgaggatgagtgctagagatgaaatcaggacagatttgttgcagttaattcttgccaagcaaattagtggtaaatgtcacattgttatgtgaattgagcacatatttttaaagaaagtttacaaaaaatttttagaaccaactatgaggcaatactgtatcactgggggctgggagtgggggcttagaatcatactgaaattgtttaaaagcagcccaggtagtttctgtcctcaggtgaataacagactatataacttccccgaaaggtaaaacgatagccactgcagagacgaggtgtcttccttccaccaaatactttctgagatggtggtaggagtagtatttttaccgtggtttaaaaagtagtcagttacatagaaagtgtattggtatgtatttgaacctgctcttcattaaacaaacagattagatgtaccctcgactggcaataattgtatctattttcaagtacagctagctgtcaaagcatgaagctcttgtgtatacacactgacacttggttcacgcatgaagaacagtgcctatgcactttgtgtagctataatgtaggtatctaggtgtaatttcagtgaaatggtgtatagatgtattgtaatttaaatgtatatgttatttttggctattcatctaaatgcagtagacatgttgatcggtgttttgcaaacatttctttttccttcttagataactagtcgtgaatcatttctcctctttctcagtgtggcttgggaatatatatgagtgaagaatttatctgtgaatcctttgtactgatgattgtttgaaagtctgtgtgtgtccagcacctttgtaaatacacaattcagagcagggatgggctgggtgtgtgtcctggttcttagtgaaaggtcatctcatgtctgtttaatacatggtgaatgcaactgtggaacttttgattacctagacttaggtaggtttagaatgagaacatccatctacagtcctcctttgcttggtggattgggctcagaggaacaaaaagttagtctgactctgtgcatattagcatcatgtctttagagaaaggtcagcctctctggttgccaaatactcatcatgatgctcatgacttaaaggttctgaggagccttgtctcccttggatttttgagtcagggtacaggaaaaaacattgctgactaactaactgcaaatgcatctgcaggtgaaaccctacgaaagcacagttctggctataaacttcagagttctctgtaaaaaacttagagcactagaagcacaggaatagtgagtgtacagcttatgcggttgtagaggggcaactgatgaacacaggtcccacatatatgagggagtatgacgttctctacctaatatgttctgtgtgcatgttttgaatgattgaagatgggattaactaatgcaagtttacagttgcctcctaaaacacacattctgtataattatcgctaaatacaatgctgtgaggtctatagttcctgtaacccctttctcctccccaaggacagagaagaactagccatgtgctatagggaaccctgagtgccctactcttttcccaagaagggtaaagcctacaatatcatcagggggcatgaagcacattaatttgcagtggctgcttcatatgaggagatatggtggacaggctaatttttccttgaaaatgtggcttcttcaactcctttcaaatttaggatggaatacttcctgaaataaaactgggctttatgcaggattctctttgaaaattcttgtatgtccagaacaaaagataaaactaattgtattcctcacattcacaatccccattggtctgaagtcacgtagcacagagcatctatagcacatagtgtttaaagactaatgaatgcaaaaagataaaatcttcaactaatttttgaattgtttctcatatatgctactagaaaatgccttgttgatgaagcacattttgggtagttgaggtcttttgttttcgcctttagctttctaagctttcttacaatgtggactgattactgtaacatttcacgtgtaaaataactggatattctttatatactggaaataacctgtgaatccaatatttcactaagtgttttaacttttgtgtatatatctctcatcaataaatgtggatttcaatttattttggttgttgcctcttctttaattcccattttagactaattgttggttacatagtagtgttctttttgtagaaacatgaattgatggctacaatgttaaaatgagtattttctaggaagcctaaatatctattggaattacatcgtgcaatctaaagttagtaagttgaatgaaatggtatatagtcaatgaatcagctggtatggggtagccctcaaatctcagggccttaaaaccaaagtgtatttcttattcatgtgacatgtccattaccagttggctgggagactctgctctgtgctgtcctcactcaggatgtatgagggaggctccatctccatgcttttgcagctgccagtgcaggaagaggaacttggcaaatcttacatggactcttacagcttcccctgaatgtgtgtacctcacttctgctcatatttcaagggccaaatcaattcacatagctccatctaactatgaaaggaagtgcaacctcaccagattcacaggaagaaaactggaactagctggtgaatagctctaatgactatcaggccatggaaatcccttaaatcattcataaaggatagtatacaaacatatcatttctcgacaagttcaacatagcaagtttttcctccagtattggaaaaataatgactgtggaagtaaggggcaagccttaactggtgatgctgtagaaataaaatgcatgctcttcgacagtaggatcacacccagcatggtgagattctgatgcactgaaaggtatatgtccaggaacagagacccacagaaagagtggcagactcttgcgtcacactgtaggacacccactgttagatggcctggattagttgaattgttttctcttattctattttagggggaaatgaggcaaatatttgattttaagtaagtaaaatacatagatgtgatacaccacgatttttttcaccactgtcggtaatttattaaaatattgaaaatggacacttcatttgaaaagacatgttttgttcttcccttggagccaggtctacatcccatccacattcaaaatgttattaaaatcttaattacagaaaatatgctcattagtaaatctctgagctgccattttattttaagatagcagatagccacaaatcagagttaaggtaaacttcttaatgctttagtatgtatactcttaggtccaaatcagccactcctgccaaaggcaacacacccagagagagacttgactttgcttgctcagggaatgtgatttccctgctcttctggatcagaggtgtttaatccatcctttgtgagggcccactaagtgctgcttttaattaccactgcatgaaaaggaaaaataaaaaagaatttacaggggtaagtagggaaagagtaattgtggactgagagttttgacccaggaattctggtctccactcagtcactgaagggtcatacgaatgtggccaaatgtctatgcaatttggaagtcatcttggcatacataaaatgaggggtttcaagtagatcacttctacgcttttggactgtgaaatttgaattatcttacccaggtaagtcatcatgactacagatttacttttattttctaatcttactatcttaatataacatctcatacctacaaaagaatctctgtaacccatgtcttggtcttatgccacatgagatactagcccacaagcccactacccaatgcaagagctatagagcgtcgccaacagccttccttcacccggtgctcctcgcttgttctcgtgctcctcccttaccttgttctcatgctttactccccagaggaagctgctacttgcaattttgtgtctattgttcccctgttgatttttttttaaatagttctaccccccacaacatacgtgtacccaaaccagctttgcttatttttgagcttttttaaaaagagtgcatgtagtctttttgaactgttatttttctatttagcattgtgtttctcagtccatccatgttgtttcaagtaactgtggtttgttcattacacggttgtgtaataatatgatagcatgtgaaatatgtcatgctttgtttattcatttttttggacagtggacttgtgctcttttccaggtgtttttctatgtcgagcagggctgctatggacattgtcatctatgtctcctgtgtgtatgacccaggaggctttagtgcatgtggtcctaatttttaagaagtatgtgtatgtgactgaaaagttcctgttcaaatcttttacccatttgtccatagccccatcagtgagtccacttgttaaccatttggcacccctaataatccatgcactgctagtattccccaagtgattcacacactgctaataatcccctagtgatccatgcactgctagtaatcccctggtgatccatgcaccgctagtaatcccctggtgatccatgcactgctagtaatcccctggtgatccatgcaccactagtaatccccaggtgatccatgcactgctagtaatcctctagtgatccatgcactgctggacccctagtgatccatgcaccactagtaatccccaggtgatccatgcactgctagtaatcctctagtgatccatgcactgctggacccctagtgatccatgcaccactagtaatcccctagtgatccatgcactagtagtaattccctagtgatccatgcattgctagtaatctcctagtgatccatacatcgctggctgtgttatgggtccatcttgccaacatggatactgagacaagcaaaatgagaccatttttaggaagggagtgtaagatgaagggccgaggccttctttcctcaggctcaaatgatgaggcctttgagcacagatctaatgggagcaaaacagggcccacttcatctttgatctcttctttgaccgataatgtgtgaggcccagcaggctctacctgacatcagcgggctgtttgctttgatgtgaattgccaattaacagaggaagttacagaaagtcacaaaaaagtctttccacctaccacaagaactgccaggagccccttgagccacatccccaacgaagttctggctgtgagaaccctataggctgagtgctttatcaactacagaaatcaatgccttgcagttgaggaaggcttgcagtgtgagatcagtgtggcagcatggtgttttctggggagggcccccttctgggtttctccttatatcctcacatggcagaaagagggcaggggaactatctgaggtcatttttataagggctctcatcccattcgtgaggaatctatcctcatgatctaatcacttcccaaaggccccacctcttaatactatcaccttgagggtttggatttcaacttataaattttggggtaaaaacaaacattcagtccattgcagtgccctgccctgtgatggaggattgtagaaccacaaagggcaatacctgcaaagagcgtgaactgtgtggcctgccacctaaggcactggccctagtgtgggcacctccttccaggcacaatgtcataaacaggatgccagtgttctgtacgtcaaagaaccacaggtgacagcgggttcaggcacctccaggagagctttcatgagaagctttcctcacttgtcacctttcagcccagacaggaaggtgtgagtagagatgcccacacatctgacttgggttgagcaaggagagaagactgtggagtccctggcaacaacacaaatgtttttagctcaataattctttgtcctggtagtttttaaagttcaattaattcattcttccactgaggcagtgaaaggccatatttgattcccatattgtcctaagaaaaactgagccacagagtcaggctcaaattccagagtgtagactgggtccacacagcttgtccaaaaaaatataaaaagaataaagccatccaatgcaaatactgtttttactctcaaacgtttaaaagcagagacgttaaactctgaagaattccataaagcagataaataaaatattatttcatggttctccctttcctttttacaagctgaatgaatatgtaaaacctccacatctttttatgtctgttatttggggtaatcagattttagccttccaaatattgtctggaaaaatctagtggcttccagttaaggaaaaaaagacaaatttagaattgcagtcatctgttcctcactccttttgttgagtgacctgactcccctggaattctccaacagcttctgtcacttctcagatgttttccaggcctgaataacacactgctcacaaagggaggagccacagaatttcccaactgccttcctttgagtgaacagttccgttggaacaccatcttccttctccacctgatcccaaacttccctttcatcttggtgatgaggacagagatcattccagattgtaaagccagattgttagcccgtgcttttttgcagataaggaagaagataccctagtttaaatgaactagaggtaactcagttacaaaccaagcttaagtcctggctccatccctttcctagctatggatgattggattgttaacttagcctcaattgcttcatcagtagaatggggctaatcatgcctatgagatagagattttcatatgagaacattcataaagtagttagtccagtgcttggcacataatgagggctcagtcagtgatagttaccaccatcatcctcatcatcatcctcattatcactattttcatccttagcgttaccaatcaccacttctttgtgaccaagctggaagaagtcatgcctcctctctcccagtttggcctttaccccaaccatatcacatggacaccagcatgtaatccatagctcagctgccctcccccaaatctgagctttgttagtagaccatgagctttcctgacctagcctgggataaccccacctttagtctagaggagcttcatggtcattacgagtttgcattatctgatgttccaaatgtcttcagttacttgccaagtctctgaggcttagcagtgagagaaggcactgcatttcttcagggaaacgaagtgagtttcagcctggcccaagtgacctctcactgagatgggagcctgagctggcccttccaatgggaaacaggacatccagaaatgaagcaattcttttcctcactggaggagtccctcagggagtccccagctcacagccttggatgggctagttgagacaaatgtcatgagaaaggccatttctgtggaatgtacccacccagcatgactctccagaatgcccttagctgatcaattcccagcagctctccttcccatcatccctttattctttgccttgtgttctttcacaaatgttcttgctcttccaagagcagatctcaggaggaacttctgtgagcttttaggttgacggagcttccctgtggctatgctagaatcacctcaaaatggtgccctctatagttttcagcagctcagggcatcaccacaaccttaagagtctgctatttactattaatagtaaatcattaattaataataatattagtaataatacaattattaattgtcttaagtggggatcccagtgacaaaattcaaattcacaagattttcttgagggagtatttctcaggagggcctgtaagggcacgaggggagcaggacagggaagggaaagagctgagcaggaagatagtctcaggaaaagtctaactttgagttgtctccttgaggaaacgaggtttatctttgcgcactcatatcagtcagtcattggctatgggctacttacgggaaggaggcataacctccagggtgaggcagctcccatctgcagaaagccgtttgctggagccagctgcaagtttttagctgtcaacacagcagttaggctatgagtgcaccaatccaggaagggggtctgggcagagcaccaacagcatctcctaaatatcccattccccacatgcctgctatgtggcagactcttatgtaggttctttagtcttcaaaacaactctgtgaagtagttgctatcactctccccattttgaagataaggaaattgagattcagagaaggaaatatgcacacctaagaagaagctgacctgaaagtctttctagtttcaatgcttcctactatattccctctgttttctcaaataacccagagactatactgtcacattatctgtttcttatggtggttgaacctctgtgctgggggcaacttcccttgatatctaattttgaagtcctaattatgcttggggctttagggcattcaaagaagattgatcatgcttattatcccatagggtcctgcattatctacttgcctacctcctggaatcatgaaacccatgtacggtaaagaggagatctcaaaaaataactggagccgatagatgtacccatactggttggccccagtcagttagaacatattctcttccctaaagaatttgctaagtcaataggccaaggagtgtcatattgagactgagctttgatcaactaggagtgaggaagattcttagacactatctgggcagattaggaaagaatccagattgattataaatgattgcaaaggaagaaggaagggggagtgactaatatttgtcttatatctgccatccttgcaggtatcagtcaggatgggctgagttgtcctgcagtaacaaacaatatcaaaatctcaatggtctcaacaagataagtttattattgactttcatcacagtctcactgtaggtcaatagaaggtcctgctctctgtagttactcagggaccctagatgacaatcaactactgtttttaaacaggcttttgttgacgtgccaatggagaaaaagagctctaggaaagtccttacctgagcagttaaatgtcacctcagcttacaacccactagcctggtcaaatctagccacataatcccacccagcttcaagggataatgaaatgcaattccaccacattctcaaaatggggattgggaatgttggggggctggagagtagagagagagatccagaaacatttggtgaacagcacaaatatgataccacagtctacttctctggtcacctagtattcggtaactctgtttcccacacgcaaaattcttcaaagagaccacataaaggtttcatccagtcatgacatcaaggtcaaagtccaagaacttggcaagatgcatggaagttttcacacatggttcagatgtggcttccattgactcaaaaatttatgaacagaaaatacatgttttctgtagctccattccctccttttccctggcacacaaactccaatggtggaataggaacagttcagttaccataaatactcctgtctggaaaggtgacccctggaagacttacgagtcactgagccatagcatttcagaaatcctgatgggcagacattacagagcccttacactataataaggaattcttttgtttgtttgtttgtttgagaccaagtctcactgtcaaccaggctggagtgcaatctcggatcactacaacttccacctcctgggttcaagtgagtctcatgcctcagccttgagagtagttgagactacaggtgtgcaccaccacacccagctaattttttgtatttttagtagagacagggttttgtctgtctggtttgtctcaaattcctggcctcaagtgatcccttcacctgctttggcctcccaaagtgctgggattacaagagtgagccactgaacctagccaataaggaaaatgcttttattagattctggtctggccccctggggcagcttccccagtccatctccctgtcttcccccatggcccttaatattaccttctaggaagtccttctttttacattatactttgttgacgcatctaaagagaacactaggaaataatctcctcttcagcaacatcctctgctttatgctctcagaaagttaaggttcattttcggtcttgaacagttacagagttttctaattaaactccatagtttttttggcatcacaactcttaacatctctgctggcctttatctttttgactctaattagccatatatgccaaccaccataaccacagcccttttaaaaacatgttcctttttcttaattgtgggtaccttgagtcaatcaggcttaaggcagagaggcgcattcttagatttatttttcccttagccatttttttaaatgaaagaatatcctggatgccacattagttaatgcagaggctttaacaatggatgtaatgaccaagcacttgagttgattttgcctctgaggttgagttgggttttattgcataaagcatctctctcatttcatcttgtattgttgcgaattaagaagcaattgtctcttctagctccacaactgtttatatttcttaagttgctctttccttctggcaggtaatagagacatttttagatcacagttgtgccattagtcagggtctctgagtgactatgatgaaagaaattgtctgtggcctgtgaggagcatatagcaagaatgagcaataaacttttattattttaggccactgagagtttgcagttgtttgtactgcaaacaactgcctggtaacattaagcaaatctatctcttgctctggtatttcagcttagatgtgtcttctctggtgtaacctcagttgggaacaaaataaaacactccttatatgctagtaacaaattgtgcctatgaaaatgatgtttaactgtcctgaagagagaagactttgatcattaaagaagactttccaaacacaggatgaaggagatgacagaataggtaaagtcaatctctgaagatataatgttatgatagtttccctaagagtgaggctagagagtttcagaatgacaaaacattatttcttttttgcacctatttcaaattaaaagtgaggtttttaaatagctatgttattggaaattaaacaatggactggtagattagaaatgaccaaaaactaatgttacatgtttatttccacccccatgggatggatctccagttatcccctgaagagatgaatctctagctatcccctgaagagatggaaatctccattgtccagctgggttcttgcaatggggaaatgcctagtggaggatgctcttgttcaacagttattgaacatgtattaggtgccaggcattggtctatgtgtatttttatatatatttacataactttatatatatttctacaagtgaagaaactgaggtctaaatatatcaagtacaatgccctcaggcatgatgtccagtaagtaagcaaggatcagggcagaaaggctggcctgcctctatttttcttagatatgtagaggttaggaggcagattagttttgccaggatgcagccaccacagctgccattcagcagctatgccactcagcagctatgccactggaccacagccattgtgtcactacctctgtgaatctctcttcatctctcacttgtctgtgtgtgatttgctcaagattcaaagtcctggacaggagaatcctttgtgatcctcacccccgtctctgaccacttggtgcctccaaggcataagcatctccaagtttctgctggagcaactggctctctactcagaggctctcactctgctcacacttaggtgacatcttcctacacctgctagatcatgaattcctctgccatttactgttttccaaaatctcttgatatctttttctgctaaggtcccttcttccaatctctttgtgagtctacattattttgatgcatttgtgatcatttgagtaagtgttaggaaggagaatacataatgagtatattcaatctgttgactttaactggaattctgtgatggaatattcattctcaaatggaagcaacacttcacgctgcttcccagcaagcagctccaggtcaatgt

SEQ ID NO: 113 - DNA, 1970 bp, Homo sapiens
cagccgctcgactccgctggacctgggacccccagacgtgggaggatgggggtgacctagtgtcttccagtagggcaatctctggacatctttatctccccagtacctctccagatcctgaagcctggggccagggaggagaggttagatgtcagcagtggaaggacagtgccaacaatatgcccaagcaggtggaagtgcgaatgcacgacagtcatcttggctcagaggaacccaagcaccggcacctgggcctgcgcctgtgtgacaagctggggaagaatctgctgctcaccctgacggtgtttggtgtcatcctgggagcagtgtgtggagggcttcttcgcttggcatctcccatccaccctgatgtggttatgttaatagccttcccaggggatatactcatgaggatgctaaaaatgctcattctccctctaatcatctccagcttaatcacagggttgtcaggcctggatgctaaggctagtggccgcttgggcacgagagccatggtgtattacatgtccacgaccatcattgctgcagtactgggggtcattctggtcttggctatccatccaggcaatcccaagctcaagaagcagctggggcctgggaagaagaatgatgaagtgtccagcctggatgccttcctggaccttattcgaaatctcttccctgaaaaccttgtccaagcctgctttcaacagattcaaacagtgacgaagaaagtcctggttgcaccaccgccggacgaggaggccaacgcaaccagcgctgttgtctctctgttgaacgagactgtgactgaggtgccggaggagactaagatggttatcaagaagggcctggagttcaaggatgggatgaacgtcttaggtctgatagggtttttcattgcttttggcatcgctatggggaagatgggagatcaggccaagctgatggtggatttcttcaacattttgaatgagattgtaatgaagttagtgatcatgatcatgtggtactctcccctgggtatcgcctgcctgatctgtggaaagatcattgcaatcaaggacttagaagtggttgctaggcaactggggatgtacatggtaacagtgatcataggcctcatcatccacgggggcatctttctccccttgatttactttgtagtgaccaggaaaaaccccttctccttttttgctggcattttccaagcttggatcactgccctgggcaccgcttccagtgctggaactttgcctgtcacctttcgttgcctggaagaaaatctggggattgataagcgtgtgactagattcgtccttcctgttggagcaaccattaacatggatggtacagccctttatgaagcggtagccgccatctttatagcccaaatgaatggtgttgtcctggatggaggacagattgtgactgtaagcctcacagccaccctggcaagcgtcggcgcggccagtatccccagtgccgggctggtcaccatgctcctcattctgacagccgtgggcctgccaacagaggacatcagcctgctggtggctgtggactggctgctggacaggatgagaacttcagtcaatgttgtgggtgactcttttggggctgggatagtctatcacctctccaagtctgagctggataccattgactcccagcatcgagtgcatgaagatattgaaatgaccaagactcaatccatttatgatgacatgaagaaccacagggaaagcaactctaatcaatgtgtctatgctgcacacaactctgtcatagtagatgaatgcaaggtaactctggcagccaatggaaagtcagccgactgcagtgttgaggaagaaccttggaaacgtgagaaataaggatatgagtctcagcaaattcttgaataaactccccagcgtatcctatggtaactgatgatataaacaagctttctttaaaaaggaaaaaaa

SEQ ID NO: 114 - protein, 565 aa, Homo sapiens
MPKQVEVRMHDSHLGSEEPKHRHLGLRLCDKLGKNLLLTLTVFGVILGAVCGGLLRLASPIHPDVVMLIAFPGDILMRMLKMLILPLIISSLITGLSGLDAKASGRLGTRAMVYYMSTTIIAAVLGVILVLAIHPGNPKLKKQLGPGKKNDEVSSLDAFLDLIRNLFPENLVQACFQQIQTVTKKVLVAPPPDEEANATSAVVSLLNETVTEVPEETKMVIKKGLEFKDGMNVLGLIGFFIAFGIAMGKMGDQAKLMVDFFNILNEIVMKLVIMIMWYSPLGIACLICGKIIAIKDLEVVARQLGMYMVTVIIGLIIHGGIFLPLIYFVVTRKNPFSFFAGIFQAWITALGTASSAGTLPVTFRCLEENLGIDKRVTRFVLPVGATINMDGTALYEAVAAIFIAQMNGVVLDGGQIVTVSLTATLASVGAASIPSAGLVTMLLILTAVGLPTEDISLLVAVDWLLDRMRTSVNVVGDSFGAGIVYHLSKSELDTIDSQHRVHEDIEMTKTQSIYDDMKNHRESNSNQCVYAAHNSVIVDECKVTLAANGKSADCSVEEEPWKREK

SEQ ID NO: 115 - DNA, 40049 bp, Mus musculus
  misc_feature (1)...(40049): n = A,T,C or G
tgacatttagggaaggagtatgtgggcagaccactccaaatatgaagatatttgtgtctcatttagttgatcaccaatacttgcatcagccaaggattttaatagccaaatatataggttgactggtgagtgctaattcatttcctattccttcctcattattggctcatggggcacatgaccatacttgccatggtggcacagatgggaggtgcacatgggttcaacagcatggacttcttttcaccaagactgacctggtgcagttgctgctcggtgttaaatctggcaactatagagactatctctgtgttcctggtatcatgccattctgtagcatgatgagccagaagctaggtgataggtggattgcatcagttcacttctatagtaaagaatggtgaccaatcccttccggtccactccaacaatggggtgccttgtcctctgagtctccggacacccgcaaggacccacacaggatcccccatggcatcctaagacctctggtgagtggaacacaacttcagccaggaggcaggttcaaacaccagatatctgggcaccttccctgcaagaggagagcttgcttgcagagagtactctgatcactgaaactaaggagagacctagtctcccaggtctgctgctagaggctaacttaatcacccgaggaacaagctctaaccagagaaaactataacaactagcttcagagattaccagatagcgaaaggcaaaggtaagaatcctactaacagaaatcaagaccactcaccatcatcagaacacagcactcccaccccacctagtcctgggcaccccaacacacccaaaaagctagacccggatttaaaagcatatctcatgatgatggtagaggacatcaagtaggactttaataactcacttaaagaaatacaggagaacactgctaaacaggtaaaagaccttaaagaggaaccacaaaaattccttaaagaattgcaggaaaacacgaccaaacaggtgatggaattgaataaaaccatccaagacataaaaaggtaagtagacacaatagagaaaacccaaagtgaggcaaagctggagatagaaaccctaggaaagaaatctggaaccatagatgtgagaaaccctaggaaagaaatctggaaccatagatgggaacatcagcaacagaatacaagagatggaagagagaatctcaggtgcaaaagattccatagagaacatcggcacaacaatcaaaaaaaatacaaaacacaaaaagatcctaactcaaaacatccaggaaatccaggacacaatgagaagaccaaatctatggatactaggagttgatgagaatgaagattttcaacttaaagggccagcaaataacttcaacaaaattatagaagaaaacttcccaaacctaaagaatgacatgcccatgaacatacaagaagcttacagaactctaaatagactggaccaaaaaagaaattcctccggacacataataatcagaacaacaaatgcactaaataaagagagaatattaaaagcattaagggagaaaactcaagtaacatataaagtcaggcctattagaattacaccagacttttcactagagactatgaaagtcagaagagcctgggcagatgttatacagacactaagagaacacaaatgccagcccaggctactatacccggccaaactctcaattaccatagatggagaaaccaaagtattccacgacaaaaccaaatttacacattacctttccacgaatccagcccttcaaaggataataacagaaaaaaaccaatacaaggacggaaatcacgccttagaaaaagcaagaaagtaatccctcaacaaaccaaaaagaagacagccacaaaaacagaatgccaactctaaaaacaaaaatgataggaagcaacaattacttttccttaatatctcttaatatcaatggactcaattccccagtaaaaagacatagactaacagactggctacacacacaggacccaacattctgctgcttacaggaaacccatctcagggaaaaagacagacactacttcaaagtgaaagtctggaaaacaattttccaaggaaatggtctgaagaaacaagctggagtagccattctaatatctaataaaatcgacttccaacccaaagttatcaaaaaagacaaggagggacacttcatactcatcaaaggtaaaatcctccaagaggaactctcaattctgaatatctatgctccaaatgcaagggcagccacattcattaaagacactttagtaaagctcaaagcacatattgcacctcacacaataatagtgggagacttcaacacaccactttcatcaatggacagatcgtggaaacagaaactaaacagggacacagtgaaactaacagaagttatgaaacaaatggacttaacagatatctacagaacattttatcctaaaacaacaggatatacattcttctcagcacctcacggggccttctccaaaattgaccatataattggtcacaaaacaggcctcaacagatacaaaaatattgagattgtcccatgcatcctatcagaccactatggactaaggctgatcttcaataataacataaataatggaaagccaacattcatgtggaaactgaacaacactcttctcaatgttctcttctcaactgaacaacacttcttctcttcttccgtggtcaacgaaggaataaagaaagaaatcaaagactttttagagtttaatgaaaatgaagccacaacatacccaaacctatgggacactatgagagcatttctaagagggaaactcatagctctgagtgcctccaaaaagaaactagagagagcacacactagcagcttgacaacacatctaaaagcactagaaaaaaaggaagaaaattcacccaataagagtagacggcagaaaataatcaaactcaggggtgaaatcaaccaagtggaaacaagaagaactattcaaagaattaaccaaacgaggagttggttctttgagaaaatcaacaagatagataaacccttagctagactcactagaggccacaaggacagcatcctaattagcaaaatcagaaatgaaaagggagacataacaacagatcctgaagaaatccaaaacaccatcagatccttctacaaaaggctatactcaacaaaactggaaaacctggacgaaatggacaaatttctagacagatgccaggtaccaaagttaaatcaggatcaagtaaatgatataaatagtcacatatcctctaatgaaatagaagcagtcattaatagtctcccagccaaaaaagcccaggaccagattggtttagtgcagagttctaccagaccttcaaagaagatctaattccagttctgcacaaactattccaaaaatagaagtggaaggtactctacccaactcattctacgaagccacaattactctgatacctaaaccacagaaagatccaacaaagatagagaacttcagaccaatttcccttatgaatatcgatgcaaaaatacttaataaaattctcgctaaccgaatccatgaacacatgaaagcaatcatccatcctgatcaagtaggttttgttccagggatgcagggatggtttaatatatggaaatccatcaatgtaatccattatataaacaactcaaagacaaaaaccacatgatcatctcgttagatgcagaaaaagcatttgacaagatccaacacccattcatgataaaagtcttggaaagatcaggaattcaaggcccatacctaaacatgataaaagcaatctacagcaaaccaatagccaacatcaaagtaaatggagagaggctggaagcaatcccactaaaatcagggactagacaaggctgcccactttctccctacctattcaacatagtacttgaagtattagccagagcaattcgacaacaaaaggagatcaaggggatacaaattggaaaagatgaagtaaaaatatcactttttgaagatgatatgatagtatatataagtgaccctaaaaattccaccagagaactcctaaacctgataaatagcttcggtgaagtagctggatataaaattaactcaaacaagtcaatggactttctctacacaaagaataatcaggctgagaaagaaattagggaaacaacacccttctcaatagtcacaaaaaatataaaatatcttggcgtgactctaactaaggaagtgaaagatctgtataataaaaacttcaagtctctgaagaaagaaattaaagaagatctcagaatatggaaagatctcccatgctcatggattggcaggatcaacattgtaaaaatggctatcttgccaaaagcaatctacagattcaatgcaatccccatcaaaattccaactcaatttttccatgaattagaaagagcaatctgcaaattcatctggaataacaaaaaacctaggatagcaaaaactcttctcaaggataaaagaacttctggtggaatcaccatccctgacctaaagctttactacagatcaattgtgattaaaaactgcatggtactggtatagtgacatacaagtagaccaatggaatagaattgaagacccagaaatgaacccacacacctatggtcacttgatcttcctcagtggaagaaagacagcattttcaacaaatggtgctggcacaactggcggttatcatgtagaagaatgtgaattgatccatttctatctccttgtactaaggtcaaatctaagtggatcaaggaactccacataaaaccagagacactgaaacttatagaggagaaagtggggaaaagcctcgaagatatgggcacaggggaaaaattcctgaatagaacatcaatggcttgtgctgtaagatcgagaattgacaaatgggacctcatgaaactgcaaagcttctgcaaggcaaaagacattgtcaataagacaaaaaggccaccaacagattgggaaagaatctttacctatcctaaatcagataggggactaatatccaatatatataaagaactcaagaaggtgggctccagaaaatcaaataaccccattaaaaatggggctcagagctaaacaaagaattctcacctgagggataccgaatgcctgagaagcacctgaaaaaatgttcagcatccttaatcatcagggaaatgcaaatcaaaacaaccctgagattccatctcacaccagtcagaatggctaagatcaaaaattcaggtgacagcagatgctggcaaggatgtggagaaagaggaatactcctccattgttgctgggattgcaaggttatacaaccactctggaaatcagtctggcggatcctcagaaaattggacatagtactacgggaggatctcacaatacctctgaacctcagctctccctcaaggtggatcctgtcttccaacctttatatatgtacatttatgtagaagtaactgtgtaggtcccaggaaactagaaaggatcacgtgataaaggggaaaacggaatctttagtggaagtagaatgtctgtgattgaaaggggaatgctgggagtggagaggtgtgaggaagtgtggccaggacacagaggagaggagtcaacacaaactaaggatgcttgaaaacaccacacggaaacatgagttgtcataggggaacaaacataaagtaaacagtttaaatagacgaacctccagtaggtagaaaaagctgttaagtaaccctgagtcctgcaaaacacatgaaactgaagaagaatgaagaccaaagtgtggacactttgccccttcttagaattggaaataatcacccatggaaggagttacagagacaaagtttggagctgagacaaaaggatggatcatctagagactgccatatccagggatccatcccataattagcctccaaacgatgacaccattgcttacactagtaagcgtttgctgaaaggaccctgatatagctgtctcttgtgagactaggacagggcctagcaaatacataagtggatgctcacaatcagctattggatggatcacagggcccccaatggaggagctagagaaagtatccaaggagctaaagagatctgcaaccctgtaagtgcaacaacattatgaactaaccagtaccccggagctcttgactctagctgtgtatgtatcaaaagatggcctagtcggccatcactggaaagagaggcccattggacacccaaactttatatgccccagtacaggggaacgctatgggccaaaaagtgggaatgggtgggaaggtggttgggggggagggtatgggggacttttgggatagcattggaaatgtaattgaggaaaatacgtaataaaaaatattaaaagaaaaacaaaaaacttaagtatagattaatggaattataacatcaaaaataaattataatagtaaagttaaaaaaaaaaaagaatggcagtgatttgttcccattttaagagatacttcttctggtgatggatttgcctttcctgaaggtcaatgattcagacaaagtacaattttttggattaataagagcttttgtagtattccacatattgtttctgaccaaagaactcacttcatatagataaggaagtacaatgattgggttattagttacacttgtattgctgtgataaaataccatgaccagaagtaacttaaaagaaataaagtttatttttacttatggttacagagagctacatccagaatggcagggttggcatggtatcagacaggcatggcagcaggaacagggagctgggagctcacatagcaatcacacacagggagcagagagaaacaggaaattgggtgggggtgtaagccctcaaataccagccttgagatgtacttccttcagtaaggctgaacctagacattctatgatctccccaaactgcaccaccagctgttggtcgttgttgaaatgcacagacccatgaggaacatttctcattcaaaccaccatgttctccatcagcatgaagcaactgacttgaataaaaggtaggatggctttttgttgttgttgttgttgtttttgtttttttgagacagggtttctctgtgtcgccctggctgtcctggaattcactttgtagacaggctggccttgaactcagaaatctgcctgcctctacctcccaagtactgggattaaaggcatgcgccaccaccgcccagcaggatggctcttttttaaagaaatagatacagtgcaggaaaatgaataggaacagaaactatattgaggtaactgaacttcagctctccctcaaggtggatcctgtcttccaacatttatatatgtacatttatgtagaagtaactgtgtaggtcccaggaaactagaaaggatcacatgataaaggggaaaacggaatctttagtggaagtagaatgtctgtgattgaaaggggaatgctgggagtggagaggtgtgaggaagtgtggccaggacacagaggagaggagtcaacacaaactaaggatgcttgaaaacaccacacggaaacatgagttgtcataggggaacaaacataaagtaaacagtttaaatagacgaacctccagtaggtagaaaaagctgttaagtaaccctgagtcctgggttgtttaataaaaacctgtgtcagggataagattcttccctatgggttgttggtcaggagtctcatgggagggggcaagacctgcctctgctactgtttgctcaccaggactaggtagcaaaaccagattgctgaagatgccccatcttttgatcacaagacatagaaaaccaagttagaacttggctagaaatctcttccttgctggctatctcttccaaagccaaaaggtgctacgcaggctgttgggggagaattgttattcacactcttacttagctgtggaccctgtgcacaacaatactgacagactagataagataaacccaccagtacaatagtggttgtggttaggttttgtatcaaccaccaggaaggaattcacagttaaaggcctgtggttagggaggttagtttcccaatagggaagtactgctgttggtgtgctagatggacatgatgttcccattaagctgagtcctaataactgtttatgttcaggggataggagttatctgcttgggtcagtgagatttctttccacactggtcagtggtgtctgaagagatacaagtgctcaatgtactcaaaacaagtgaccacttatttattgtccagcaataaatgagacatctattaagtcatacaagactcagtgagtatcacagaaagagggtgggaagaatctctgagatggaggaagggtggtggtgatgttggtgatgctggttgggtgatgacttctgggaaagatatgactgctgcactctttgactcaccatagctatgattacctatgccagacgagtataacattagtcctgtacggtcaatattctatttagggaacaagagatacttgttgatcacacccctttctgagggtttatttatggtagttggtggttgatagggaaatgagacaactctacttcaggtatagatgttggcaaggtgctcatgaccctgtaaagaaaccttaatgaaattcactgggttgttaaaagaaaacaaacttgagacgtggaagtagaggagtggctagtttggaagagaaggaacattgttgggagtaggagacagaagaggatattagggctgaataggatcaaagttcattatgcacacccatgaaaaaataatgatttccatcctctgtttgtaattgatttatgttaataagaacatatctctggttctaccttgaaaaaaatgcagttatatagccagcaagctggctgcaggctggaatgctggggttctccagaaggtgcagtgtgctcaaatcagtgcccaatatatgctttttcccattactcaggcttcacaggtccaggatggagatgtggaaatggaaatggcacctcatcagcatcgccattgagccaccagccaaacttttgctttatgttccacaagcttatgctctgttggcctagaagttttgaccccagaagtgggggtgctttggtcaggagacatcccactgaagtggaagctaagactactctctagccacattggaagaaacaatacagttaggaggggtggttgacccagaccaaagggaaattggactctttccccacagtggaggtaaggaagatcatatcaaatgcaagagatctgcactgtgactaaagccaatgggaaactacaacaactcaacccaggtaggatgatacatcacccagacccttcaagagtgaaggcattggtcacctctccaagtaaaggaccaagaatgcctgatgtgcttgctgagggtggaaggactagggaatgggtgtagaagatagttctaactccagctaaggctatgaaatctgttatagaaatggggattgttagtgccaagaatgtttctgtcccaattgtgttcagactatgtttgagtagatagatgcatttattaagaaaatatctgtatttttattccttttgtgttcctttatccagtaatgtaatgactgagatgctatcagtcgttaaatgttcttaaatttatcttgtcatagttaaggcataggacaataaaagaccacattcctccagggaccttgccaattttctgaggaaaatacagtgcattttcactggtagtgagataactatatagcattggtctcaagtcagaaacatgttttgaagaagctcctcccctagagtgggtggcccttctcagtggtaaccacctacataaaaggaagtcttctgggggaaactctgctgtttgctggcctgcttcacttcctgctggtgagggtgttaatccttgctgcagctgtgcatcctcactgacatcagactccagtgtctccgggatccagtggacattgaagatcggtagctctccaggagtcttcaaagcaccaggtttggaagtgctgaggcttctggctttgtaacctgaacagctcccaggttccagccattgttggactgggctgtgtggacccatccagcacactgtaagtcattcttggaagccctctcttagatacacactctatgtgttcttttccttggagaaccttatctaaacaatctgttgatctgttgtttcccccaaacccccagcaatgctgggcacccagcacttcatcagctatcattttctctctcaatcttttccgcatagctcagtggggcctgttgtagaaaaaagataaagaacaatgctatatgacccttggtttgagagagtaagtgggttatatttcaacccaggtcctggggctctgggaggcccaacaattcattccaggtcctcccagacttcttgtttgtcatattgcctctttcctataatcatttacaacaagaaatcaaattctgcctttcactatttatcatattaatttgttgacaatctttctacttcttattcttaatggaagcatcagacttcttagacaggtcggttttgtgttttctgagaggatatggccgtaaaacttctcctttgcctcacatgactgacaaacaaatcagccagtgttagccttgagtttgtttttcagcaggtgataacaagatatggagaagtcaaagggaagaaagtctgtttcccaggccagagtggagaatggcatggagaacccaggcctggaactcatggtaattcactatggtggctgctgtgtggctcggctgctttctcagtctctagatcccctgacaggactctgcatggctgatctcatatttacctgctcttgtaggaaggcggaaatcttgaacaaagatacacacaggaggaagtgacacagggacacagcctggaggatggcttggggcattcctctctctggaggtaagggtggtctggattccagcttagttagcaaccaagaacctgggggtgggggccacgggaaaaaagtgactgagagagatcgaagctactcattcttagattgcttaactcacagacaccatcaggatcactgcatgttactacataagcatgtgtattttatagaattaactgaatgtcagcccatgacttagacaagcccatcagtgcctgctgggacaacattaagaaaagaatagcaaaggcaataacagtaaatggctaacattgattgagcactactatgatgaacaatggaccttgtacatttttgtagacacaaaatttcatccttttgttagcagtttaacagtcactaatgtaaattctatggtcagtctgcttagagccatagctgaactcggcccatgagtgtcctggttcgtttgttttgttttgtttttcttgtttgggtttggatctttgcttttctcttctttttctttcttctctttgctttttgataaaatgttactacatagttatagctggcttggtactcatttataagctagggtgccccgttggatttactggtatgctcttgcttcaaactcctgagggctgcgattaaattcttgctgttaagtacatgagtggaatttcatgctggtctagtgttacacaactgtcaactctgtaccttgaaggctgatacaggaagataagttctggtcttaatgagtgtaagaatagcctggatgctctttcacccctcccccccatcaaagttactttttcctctttaagcataatttagacatgaatgttattgatactttttgcttacctgccaaggatgattaccacttggcacactagtgtgctgatctgagacctccaccatcccacacagcaggactaatgatcctcaagggcttgaactctttatttttgtatgtgagtgcactgtcgcttcttcagacacaacagaagatgatatcagatctcattatagatgagtgtgagtcaccatgtggttcctggaattgaactcaggacctttggaagagtaatcagtgctcttatccactaagccatctttccagcccacgtttgaactctttaaattcttgttgagctttccacttcccactcaggcttattctcctctccttctgaacatgccttgcttgtcatccactgggataggtgtgggacttaagccctcagtctcctgttcctcagttattcaaatagcacctataattttccttgcaaaagaaataaacccaagggctcaggctgaaatgggcatggggcatagtcatgagagagaatagctttccttggaagactccactgcctgtcagaaacaaatgctacctccaatttcaggagagataagttctggaggaagaagctgagggtaggttagaaaacccactatgtaggttcttcatgtctgcctgtccatctacttatttatgtatctatatatcaatgtatctatgtgtttatttatgtatttatctatgtatctagtatctatgtatctatgtatttatttatatatgtatctattatttatgtacctatgtatttatgtatatatctattgatgtatatatgtatctatcatctatttatctatgtatctatctattcatctatcacctatctatctatctatctatctatctatctatctatctatctatctatctattgggacattcttattctgtcactcaggctggcctcaaaactcttctgggctcagctgggcatacagctgtgaatcatctcacctagcttggtgctttgtttctttagatttttggtattgcttctccacaacacagtaaagatcaaatactggctatcttctgtgagggctgtatcaagcaaggatgtgggtgttttgtggaggaaagtcttctcccagacaacacatctacggagactcggtagtggctatgttctggtttaggtcctttctcattgtatttggagtgagatgctttagaactagctatttccagctcctcatagctatcacctctgatttaaacgtgctggccttctctgatagactttgccctggctttctcctttttttggctttacacagtggttattagcctctggtttgtgtgtgagatgcagttgccattctcctttggatgctgtgtaaatttctctatttgctatgcaacaagataatccagctcttaggttcaaaaccagtcgtgtaaaaagaataactcatttgagctagcacagaatatctgtcagctgtgagagggctgtcctcccatatagacacttggaggtagaggcacagtgccagtgttcactcacctagcagttaaacgtctcaattcaatttctacttatagcaccgatacaagtgctcaaaccgtaccatcatgtaggtaagagcttggttctgttagcaaggtgctggaccaggcaagatacagagttcacggacccttgtgtgtgtgcttctgtgactgcttgtttagtttaaaaggttgcattgttttttctctttttcttttggatgtataatccatcatttttttttctttttcatactcagttccaacctggttttctaggattccattgttcatgggttttgcaaatatttaggtgatttctgaagtacttattgaacttcccaggaaatggtggtttgtggcgaggaggtaaaaccctaaggctttgctatctattgtctcttagactcatgcatgtcccctctcctttggagtggctttgcctaacaggtatgtatttgggcatagttttaagccagcttcaccatgtgaatcaggaaacaggtagcatatatattttttaaaagatttatttatttatttattatatgtaagtacactgtagctgtattcagacataccagaagagggcatcagctctcattaagtatggttgtgagctaccatgtggttcctgggatttgaactcaggacctttggaagagccgtcagtgctcttaacctctgagccatctctccagccccaggtagcatatttaaactagaataaccagaagagagtttactcataaagaggccattatgtgcaaataaagtataatgacaggtgtgtgaaaataccataataaaacccaatactgacctaaaaatagaattaagaaaaaacaaaaagaatggctagagaggtggctcagtggttaagtacatcactgctctttcagaggactctggatcagtactgagaggccacatccagtggcttacatctatctgtgatcttaactccataagctctggggcttcccctggcctctgcatgcacaatcctcacctccacaaatatacatgtaacaataacaaacaaagatggacatttgaaaatgttatgaagtagagctgagtcatgggaaggatggtacttgatctaaggtttgaaacagtgaacacaatctattcctagaccagaagggtatagtgcaacagaaccggtagtatagtcagatcagaatccctccctgcttagatgtgaactttatgtattgtgagctcttgtgaggtccgatgggcagaaactcactagacgagccaaggggtttggagctcagtggtatatcctcacagattgaactcccaggatcaaagcagggtagagtgaggacctggaggagcaactaaaagacctggatctcatggaaaaatctagagtcaaaagtgagagcattgctttgtgtactttgtgagtgatgttcagactgcaagagcagccacctccaggcttattagaggatcactgctgtcagctactgacattgtaaactttctgactcattacttttccactgcgcacagatggtgtcagaggccttgagatcccaaatatcctactgaattcatgggtttagataatccaagggtgatacagctttgctctttcttttacttccctgtatctgagcatgtacactctgttgaggcaagtcagggttagacttcctgcagaagataaggggagagaggtgagactgaagaaggaaggatataggggctatggttataacacgttcaagtgtaagttaagtgggataggcaccaatagaaaaggagtccaatactgtgtggaccaagaccccagaccatttagcagttggtcccaccagtgactaagcatcatacctttccaccatagtcagacaggtcacttctagctgggttcactttctttggagcttccaagagtatgggagtgggatgattttgcacacatagcttcagtgtgctaaggacacttaggttggcaaaggcagataatggggtcaggtaaggcacagcctcggatgatgatggagtgcttagattcaagagccaggctactcagagacaagctctcctcctgacaactactgtgaccttgggaaagttactcagcttcctggttttcagattgcaatagcaaccacctctaataaccagggttattagaggatcaatgttagtatttgcaactcctttgagcccaaacacatggaaaatactatacaaagcagtcttgagtagttcttgctgggcatcctctctcaggcctgtcaacctagagacccttgatgttagtgctgttttctctcctatccgccaaagtatgaagaactgctcaaagtgctagctctgtgtggtgttggggtgctgtgatagaatagcttctaagaaagacaggcagaatatgggaggcaagcaatgtctgtcctaggataaacacagaacatcatctatttctgtggtagaagacaccaatgacatagctactgtatgaggagtcagccttcctgacctgatgcacaggtgaaaagtcagagctggcctttggggaccccgttggagtactacaaacatctgcatctgattaattttctttattaactaagaacaatctttgcctggcccatcgagttcaaagaattgcacaaacaggatgaagtaatgctcacattttaattttggcttctcagcaggaggatttttcagcctttcacgaaggcgagaagtttctttgaaagacatgctggtttattcaaaaagatcctacttggtctcttgtgtttaggtgagatcatgagaattcatggaggggaaaacatgagcattttcacaactgttaactatgtcaaggctatggctgggtgaaaactaatcgtactcataagttaacctaaaggctctatgaggtacagatctaactgcctgtaggtaaaaataatttattgcctcagacccagaaggataagtgaaatccaaagataagctacagttcaaaatcacactatttgacaggtttaaattattaagaataaaaaaaaatcttttagttcacctcctttttagtgcttggatttgattcagggctcatatgtagtatttatgaacggcgcccttatgcataactcatttactgctttatatttaaaatcagtgctatacactatttttgaaagacagaaaaccttatttatgtatgctgtcaggggcatgtggagcattgattaggagtagctgggatggtgagatcacaaattatcctttggggtgaatctgaggcccagagggaagcatcatgtggcttttccttgtagtgctagtctccttacatggctttattcaagaaaaagttcaatcacttgacatctcaacattgctgcagtaaaaatcaaattaacaaagagatgtctaatttccagagtctgacagtggatgtggaccacatctaaggcagagactggggacaacagctaaaccagaatgggttgagactctcccaggagcagagaggaatggcttcattctgcatggaggctcggccttcctgacccccactcttccccttctcttcacagcatatactgcctacttcctggcagcgtgcatcctgaacttccagagggcactggccttgtttgtcatcacctgtcttgtgatcttcatcctggcttgccattttctgaaaaaattctttcctaaagaacaactaagatgcttgaagcctctggaaaacacccacctgaatctttgggcaaagcggtaagtgtgtcaatcagcttttgttgctgttcacaaagtacctaagaataatgcaaaagctatcctggctcccagtttcagaggcttagcgtacggttgcttagctccatcaatgttggctgctgatagggtagaatatcatggtgggaagtgaacaggtgaaataaactgttcacatcatggaggccaggaggcaaggatgtcagtagggtaagggtcctggcacaaggtgtcccagtaattgacctgcaccagttgggtctcaccttctatagtttcctccacctcctaacagtcctttaaattgtgaaagggtcagtggattaactcaccaatgagggctttcctttcccctccctttctctttcttgtcttttatttttctttatcatgagacaaggtctcttgtccagggtggtctcagaactctttatgtagccaaggatgtagcaaaggatgaccctggacttctgatatcctgccttcacctcttgagtgccaggattacacatgcactaccacactcagttcatggaatggtggggatttaagccaaggccttgtgcatcctagacaagagatggctgatcatcaaaaccatctcttgaataccttcttttgacagttcctgagtggcctccaggctcttacctatgcaaaggccaggttgcctcttcttgccctgtgatttagctccttcccctctagtcctccagagcccctctacctgtttttgtctttatagccccttagagcagtggctgtcaatattcctaatgctgtgacctctaaattaagttcttcatggtgtggtaacccccaaccagaaaatggtttcattgctaacctaattgcaattttgtcactgttatgtatcataattacatgatggttattataacgtaaatatctgatatgtatgttatctgatatatgactgcccgaaggcgtcttgtcgcacaggttgagaaacactcttagagtctaggcacaaacttgctcataaacataaatgaactgttttttcaattctatgtgtatgagtgttttgtctgcatgtatgcatgtgtgcctaatgcatgactggtaaccactgtgtacagaagagtgcatcagatccctttgggctcgagttacatacagatggctggtgaaccactgtgtgggtgctgggaattgatcctgagtccaccacaagcataagtattctcaggtgctcagccagttctccaatcccaaatcccaatcttaaaatcacattccttctgcctcctcttcctaaggtttgcagcacatgactgactccttatttatcttggtaagctagggattggacccagggtcttgtaacttctaggcgatgctctgctaagctatatctgcagcctctagtctatgtagtaaaggctttaagtccgtagatggtgtatttgatcctagcctttggagtggttaaaaaaggagtagcaatccacagggggaccagctcatcattttcttctgttttcagtatttggattagtcactggaagcaccttcatccttcatggatgagtctgtacatcacattttattgatatgtctgtatgagaaacgagaagttatgtggtttgtatcctcagatcagagacttatttatgtaaattgggagggggaagcagatgctagggagctaccagatgattctcaaggtccatctctgtctaacgaggaataagctcttgcattatctcagggattctctgactaggagcttctctgctgttcatcacctgagttggtgacagagtgttgtcattcctcctccagggtgtttataggactctctgttgttggcctcatcctctggctggctctcgacacagctcaaaggccagagcagctgatctcctttgcaggaatctgtatgttcatcctcatcctctttgcctgctccaaacaccacagtgcggtgagtttggggggggggggatttagcttgggcatagaaacacacagcaagggctatgtgattgtaaagtgtccgtgccaggtactcatgataaagacagagataaccaatattttctggaatcttcctctgacaggtttattcctatgcgagtttgaaagcttttagagacatttggtctgttaattgttactgtggtatatatgaatctagtcagcattaaagaaaaataaaatcaaataggaagaaaggaagaaagaaagaaaaagaaagaatggaagaaagaaaaaggaagaaagaaaggaaggcaggcaggcaggcaggaaggaaggaagaaaacagatcatgtcagagaatcatatggcattgtgcaggattgatgtttgcaaacgctatttgcatgtatgtgtctttactgtaatctaacttattttaaaaatcagtatggatatatttgcctatttacaatatcatcatactttttcttactcttcttcctgttccctgtgctatttttgtggtggaactccatggctgagagcgacttggagagtaaagggttttatttgtcttatgctttcccatcactgttcatcatcggaggaagtcagaacaggaactcaaacagggcgggatcctgaaggcaggagcggatgcagatgcaatggagtggtgctgctgactgtcttgctcaacatggcttgatcacgtgctttctcatagaacccaggactgccagcccaggagtggcatcactcacaatagactgggccctcttccatctaattaagaatgccatacagtcttgtttccagctcaatcttatggaggcatttctcaattgagattacttctccttagatgactttagtgtgtgtcaagttgacataaaactagccagcacagctacgttatctgagactgttaccaccctcactgagccccactcccagcacatggttgaattaggcaatggctgagcaaggtttgtaactcatgctggaatattttctttttggtcccaggtatgctggaggacggtgttttggggcctgggccttcagttcatctttggaattttggtcatcagaactgaacctggatttaatgcatttcaatggctgggagatcagatccaggtacagggagttgaatgtcagagtttttctttaccaggaaccccagagaaggttgattttagggaagcagagggctttggaactacaccgtaatgatggtgtggcagaatctggtcaggtaaagagagagagtaatggggttcaggtgagaatacagaatctagttgggtagagagaatagtggggttcaggtagtatataggatcttgttgggtaaagagagagagtgagttatggggttcaggtagtatacagaatgtggtcgggtaaagaaagagagtaatggggttcaggtgagaatgtaagtgtagagaagtgatttgctgagtctgtcatttcgtgaccaacttttgggacatggctcacaggtggtcacacctgagtccaatcccatctttctctgtggcccgcctgtcctaactcttgtcccttttcttcccacttcagattttcttggcttatactgtggaaggatccagttttgtttttggtgatacactggtccaaaatgtttttgcttttcaggtaaaacttgttttgtgggcaggaatgacaatgccagtgaaggacaggggaatagagatgggaacaatgtgtgtgttcacgagaccagaaagcatttaccaacttgatcctggagaggagtctactctttccccatgatccttaccattatgaaattggtttaaagtcgggtgcggggagaggctcaggaaatagtctgtgtttaatgctgatagtttgatagcctgtagtgcattctgagtttattcctaaactacactgcatccaattccctggtcattcccagagctctgtttagaagcctgcaagacctagctcatgacacactgagtacacacagtacaatctctcacatgctgcctctgttcttgttgcagtctctgccaatcattattttcttcggatgtgtgatgtctattctttactacctgggccttgtgcagtgggtgattcagaaggtgaggcatttggttttcacaaaaggaccttcagcttggatctttcagggggatgagtgagtttatacttacacgttgggggagaaagtaagtacataggatatggaaaatgagaaccaatttgaaaaggcaatctctctgaagcatcctggtatcaaatgattgcccaggcctgagataggctggaggcagaacatggtaagaagctctttcatactgggttgaatttgcttgttctagaagccccaaggcctgagctctggctaatatgtttgcaacttgttctgttactctgggccacactatttctccaggcttcagtttctttaacactaaatggaatagcagggaggggttttgttggacactattcaagactcctgctaatgttgaagatttatgtgtctggtttcttgtaggttgcctggttcctgcaaattaccatgggtaccactgctgcagagaccctggccgtggcaggaaacatctttgtggggatggtaagtaccctggagccttctgtttttctaatctctcaagaactgagagcttggcagagaacaaatttggaaagaggattttccctctcctgtccctcccaacctccttccttcctgtttttctaagacagggtctcatgtagtccaggctgacatcatactcactatgtagttgaggttgaacttgaattcttgattttcctgcttcccccgtctcaagtgctgaacatatacacatgtgtcatcacatggcttgaaaagctcatttttcttatggaagtcagataaatggagaacatggggcagtcagtctttatgaaagaatcctcagagggtcaaggagaactcgatgtctaatgcacagtccagacacactatccagcttcttatataggggaatgtcctagtctaagccttatccccctcaggagctgggaaggatggttgagctacctctggtttcttgctgtgattcaccgtgatttttctgaggtctctgaggaggcaatggcttgtcttgctcagaactgtcaggactcttcttcacacagcatctttctcagtgtatccatctgtgtggaagagcatgtgtttgtgtgcaatagacgtctttctctttgctgtgattaaataccttggaaaaaaaaggtgtattaagagaaaaaggattcattttgactcacggcttgagagtacagccaccctattgggaagagcttggtgacaggagcttaaggccactggtgcttgtgcccagcacccaggacccaagcctaggaaatgtcctaaccacttttagaatgggtctttctgctttaatctaattaaaataatctctcacaggctgacctatcaagataactcctcacaggcattcctagagtcattttgaggagattctatcaattattgataatcaacattaaccatttcagtgttaaatctgtgctattgactggtcaaatcaacattagggacaatagtttttcaaatgagtaagaagttaacaattggggtctttttctcccaaagccttgggctgtttatctgcttttgatctgttttcagagtacttttggattctcttatcatgaccttacattttgctaaaattatttataatcagttgaacttttccagctagacctaatcatctaagagcagggtccttgccttagtgctctactaagctaatccatcgttttgctgacactcattaaaggatacatgacctcatagattaagactaggtcatttcctccttgaatcttcctaattaataaaaattacagacatttcattaaaaaattatattttgtttaatgactctctctccctctctcatctctcctctcttctctgtctctctctctctgtctctctctctttcatatgtgtgtaagtagtcatgtatcatggctctcatatggaggtcagaggacaacttgtggatgccgggtttttctttccttatgggttctagatattgatatcaggtctccaggctgaactttgttgttggcttgacattattttcttattatttcatacagcattagcttagataagctattttcagttcctttaatacatgctctgtagacatctagtgtgtggtcagcaatggaactgtactctataatttactcactaagctcatggacttagacaccgaaaacaaagtaaatgaacaccagttgtctacagtattctataatatgctagaggaacacgtgaaaacaggacctcatggagatggttgggcaggtttttgtccactgactggaagggcatgtatctgatgggtccattctttgtctgggataagcactttgacttggggagtgataccctcttggtgtgtgactatttttctttgtttttagacagaggcgcctctgctcatccgtccctaccttgcagacatgaccatctctgaaatccatgcagtcatgactggaggctttgctaccatagcaggcacagtgttgggagccttcatatcctttggggtgaggcacggtcaacataattgctcatggtgcactcatgttgagccccacagtggtgctaatccccatctggcttcacagattgatgcatcatccttgatttctgcctcagtgatggctgccccttgtgcacttgccctgtccaaactggtatatccagaagtcgaagagtccaagttcaagagcaaggagggactgaagctgcctcgagggtgagctggggacagttcaggagatggtaaggtgtgctacctgaggaagcccagggtactagagacttccagcttccccaaagggaagaaggtctgtcactccatgtccccttttgctaccctgcttccagctaatcatttttagtctttgttttgtttggacttaaccttcccacctggcattagtgggatattatacaaatattctatgtccttggcatcagactttcatgcaataatatctgaatcacttcagagtaatctccactattataattacagaggattcccaacacccctcaaaatggctggctacccatttcttccattttacggtctatagggctgctcctctctgaggagctgagattaatgtagatagcatattctttctctgtgcccaataaccacagggaagagaggaatatcctggaagctgcaagcaatggagccacagatgccataagccttgttgctaatgttgcagccaacctgattgcctttctggctgtattggccttcatcaatgctaccctctcttggctgggggaaatggtggatatccatggactcagtttccaggtaaagtcttatatgtgttgggcatgttttcctgactctcagtaaactgaaagcctgaggaggagaaggaggtagaggaaggagaggcggctaagtgtctggagcagctcctggtgcctgacttctgttgtctactcttcctttcccttctttctcaggtcatctgctcctatgtcctaaggcccatggttttcatgatgggtgtacagtgggcagactgcccactggtggctgagatagtgggagtcaagttcttcataaatgaatttgtggcctaccagcaactgtctcagtacaagaacaaacgtctctctggagtagaagagtggatcaatggcgagaaacagtggatttctgtaagtgacaatccagcgaattacagagcgagaggtttgggccaggcatatctaagggaaggtacagcatgccacataaacattgtgggactgcaaatgtttctcagtgtcccagcctatgcatgagacaagcagaagcacatttgtcaggacccaagctcctgctccaggtctctgtgttagttctctcctgaaatctgacccaactttgatctatgagataattgttgcttccttacactaggacagtccaaagaacataccttctcctggatgtcctgatgaccctttatctacacattcaaacctctatgaaacaatttttctctcttagcatctctaggtcattttctctgtatctttaataagaaccctactgggcaaggagtctggtggtattaccatatcatgtcaatggttgtaagacaggggctggttgttttctgagtatcttttgtgcattctttagaatactgtaagaaagatttggtgtgccttggaacttctaacatggttctgagacccaccaggactaaatttatctacttgttttctcccctctaggtgaaagctgaaatcattacaacattttccctctgtggatttgccaatcttagttccataggaatcacactgggaggcttgagtgagttgttcaattccccaggtcctcaacatgccaggcagatccagcctttgctcactgcacagctgaggctagatagagaatctggagtgaagtggacctcgcaggccacctgtagctcagagctaatgcagtcagctcactatggcatatcctttacaaccaatgcttcatctgcctgctctcctttctgccaaggcacaaacaggttttatttttagtttcctacaaggaagaagctatgaacattatatttctatcttgctgttaaactgccaaaagttctttctgaaattaatcttcccaacagttttttcttttataagagtgatatttgcacaggaatttaaaaaagccaaaggaaaacaggagacaaagcagataagtggagtcagtgagcatcatatcttgctgggcaaaagctgagagtccagcagtacagagaagccattagtacgtgaagcagaggtgttcagggtgctgactgttagtgatggttgcaggaataccaggagaggggtggtggtcttggaggatgatctgtgtgtgggtgtgcatgtgtgcgtgcgtgtgtgtttgtgtgtgtctgtgtgtgtgtgtgtgtgtgtgtgtgtatgtggtggatctgtaggtgtgtttgtgtgtctctctgtgtgtatgtgtgtctcagaattccgagctgagcacttggaaaaacaaaattacaaagtctaagaagaaatataggaaaagagtgtgttaaaacgccacttctggcaataatatctggggtagattcactaaatttatgtccctgatagctaaggaagcaggtgaaacagtttcttttggtccttttcctctctgtaaaatactcatccacactgctgtatgtctgccaggtgttagctgtgactctggactgaggtgagatggatgctctcctgtccagtcctttggctcaaattctacatgtaattcctgaaacagtttctttttggtccttttcctctctataaaatactcatccacactgctgtatgtctgccacatgttagctgtgactctgggctgaagtgagatggatgctgtcctgtccagtcctttggctcaaattctacatgtaattccactctggacttactggtgtagacctcagctggctgacacaggcatctgtgcctatgggagcagctcagagtcctgcttgattgagatttatcttgaatgcattccagaaccactgaggtgagggtcagacatacaatccttgatccaggagaagtctgacttatgtgtcaagactaatgtatgtatgtatgcacctcttaaggaagctttagcaggcttaggtggtttgtcaaagaacactagtcatctggcctggttttttcattcttctaatggggactgatgtgtgaggaagacatcaattgctttctcttgttgtctacagcatccatgataccccagaggaagagtgacttgtgcaagattgtggtcagggccctcttcacaggtgcctgtgtttcctttatcagtgcctgcatggcaggtaggtgcctaagtattgtctctggcagagactacaggatctctctcagaatgtttatttaactaaccatctaccccacagacacctaatctacggcgttaccaactcccatccaagcaaaacagaacgttggagtgtatgtgtcaaatctgtctctttaaataactattatcttctccatgcaggaatcctctatgttcccagaggcgctgaaactgactgtgtctcattcctaaacacaaatttcaccaatagaacctatgagacatatgtgtgctgcagagagcttttccagaggtaggcaaacaccagggtttctgttccccccctagcatatcctcttatatgaagggaacttctggatgttgggagatggaggtcttgagtacagagtcttggaagctgtgtggagtgtatgagacacaacatggatgcttgtgattgatagtctggactcttttctcttagtaggttttatcttcattattagtcctactgtgtgtggcaggttccatttattggtgttgtatagcagaagggaaagaagtttggtctcttggttaagaagttcctgtgtttattgtgactgaaatgtatggagtagacaatgatgattttacagtcgtctaaaactcagattttttttccagatagaaataaagcagaccaggagaagacagattttaaattgaaaagataaacttgaattcagatagtgtgaaggttaccttgtttactatattctagaatatgaaaggaacctatcactgagcccaaggaacgagttttgggacacatagaaggaatgaggaagtagaatatttgatgtggtaaaagccaaaaaggtgcatgctggtagtagcctgcaggtgagtggggagagctctaggaagcaagactgaactgttatagaaaggccttgcatgaacacctcgaggagtccaattttgacctgcaggattctggaccccagcatggtgagctgtgctttatggaagggtgtttggtaacaaggagagcaaacacatcactgtaacagtcttagcaagagagtaagacacttaccagatacaggcaccacagaagggagagtcgataggagtgaccctcaacttcatagaagaaaggcccagggtgaagaggggaaagaatggtcttttctgacttgggtctgtgtgtccatcacaaggaggaacaagaaataggagagaaggctaaaggcatggcctcttctggttctggatatgttattttggaggtacctgagtgactggcatataaagtgagtcacaagtcaactggagtctgaggctcaggagagaggtcagatctggagcctgattaggaggcaatgtgtatgtccttgatgtgtccctgttcttaatcagatgttagctgtagaacaggttaagaaacaaagtaaaagtaagtgaattgcaaatttcatttattgttaaagcagaatttataaagtggctagattgtttgtctggtggagttctaatgtgtatattctcagtggattttctaaagacatattctaagaatggttggcatctagaagcccagagaaatattttcaggggctcaaataccatataaatccactcacaagtcagctggagtctggcttaagtagctgttcagatgcagctcttgcaggtggactaacaggctgctgtcctggagggcctgagttctatttccccatgcacactgagggcttccaaccacctacatctccagctccagagggtcccatgcttaagtcctctgcaggcacctgccctcacatgcacacacccacacctgcacatggaattagaatatgagaaaaataacagctggatttgtctttctttctgtctgtctgtctatatgtaatgataataaaaatagtggatattaacttgagagtagagtataatatgggagggattcaagagaggataaatgggaggggctggagggaggaacatgatggagagaagtgatataattctgtttcagtttgaatagaatgaaaatcaaaaattgagaaaaagagaaataactttgtctaattaatttgtagcaataaagtataaacagtatttctttctcaaaaggaaagtggccctagttatcagctttttttttttattaaattaaattctggatcatgtataaggtctaatttttttctcaactgtttggaaatgccagacatttgtaactgacctgaggttaggagctgggctctgggcagacaatggtcagggttctgttctagcgtcgactaaagcgtgagaagccaagttcgttcagttggatctcatgtcctggttatgacaacagatctatgcacagtaggtttgttctcagttatttggaaaacttgtcgattgttttgccttgtttgtgtctgacccctgtgcatctggttttatcatttcagtacttcgctgaatggcaccaacatgccttctttctcaggcccctggcaagacaacgtgtccagcctcaggaatcttgctagctgctgtgacctctataccagcactgtgtgtgcatgaggctggtgggccgctccaagacagttctcatagaacagattcatattaccaaatacattttcatgtacttcctattctctgagaaccccactaaactccacaaagtgaaatttctgagctcactatagctctgtataaaaatcagcccttacctttccagcggcatgacatgaaattccggttaccagacatgaaattcattatagaccctcttgagccaaagtatggtgggaatgtaactgaggggaaaatatgtgtgtggtgagggctaagatccaggttcaaccccgggcctggcccagagtggggagagtggggaaatcaaagtagatgcttagttttaacttgggaatggtggcaaaccccgtggtctcttacctgtaggctcacagctaaggggattacctcagattcaaggcaagcctggcccaaacatgacatgtcctcgtgtaggagtggatgtgaggggagatatttttaaagttatattggaaacgtgtgaatttaaagacacacattctttttgtattgccaaagacttataaacacaagagcttcttttattttcataaagaaataaaaatgattcctgtaataaagtgttgttttatttatttatttatttatttttttgaggcaaggtttctctgtgtagccctggctgtcctggaactcactctgtagaccaggctggtctcgaaatcagaaatctgcctgcctctgcctctcaagtgctgtgattaaaggcctgcaccaccactgcctggatataaagcattttttaaaaagtaagcatttttaaaattgtgcgtgtgagtacaggtgccagaggaatcctgagatgggagccacctggacctggaagtataggtggtcctgagacacccaatatgcatgctggggactacactcctgtctgctgcaggaacagtatacccttaaccactgaaccttcttgtaagccccaatacataaaatcctaaggaatatccataatttaccaggctcttattttgatttggtattctcattcagtgccagttacctgcagttcaggtttatctagaatcctttaaaatagttttggaccatctataagaattaccctacaaaaagctggccagatagcctgagttagaccccgggaggatttctctcaacagaaatgggtaaggggcacacatacaagggctacttaactttgtaactccagcaccctcactacagcactcacaccagggctatttaactgtctctccagcacctcactattcttggcttcagctcctcagtaaggggccaagtgtgggtgacatatgacttgaatctctgtgagcatgaggtcagattggtctacagggtgagcttcaggacagcctgggctacagagagagaccttgtctcaacaaatcagaaggaaaaacaaataaaaatgcaagagactctgctggatttatgatctggtgctggtgccatgctaaagaacccaggaacagcccagtggagggggtggcagaggcagtgccatagacagcaatgcttccacggagctacccagagcagtcacagatcacagagaggctgggtgtccaaaacatctaggaatgattgggtcatcatcaataggttagagggtaacctttctgtccaagtatgcaggcatgaatcagcaatcagaggcttgctgtgtcagaaatcaggtctgtactgccaccttttggaatctggagattggcctcaagtcttaaacctgtgtgctagcacctatacccattagtccatgttgtcaacccaagattgtttttctcatcactgtacactgtgtcatgccacctacccatgagcgtgatcattcagtcaccatacacaactactgagtttccttaaaaatccctaccttcctggtaagtgacccttcaaggtccctaccctctcaagtgaaaataactacagcttcatagaaggcttgctgtggaagatgcagtatctcctctctagcatcatcactgtgacacagagatgcatagcgagtgttggctctcatttctcctgccttcatttgattccatatctcctgtcctaagtttagcagtgctagaatgtggatgtttgtaccccacttcactcatgtattgagaccctgtccaggaagtgttagtattagaggtgagaacttagagtgtgtttaggtcatgtgggtggagctctcatgaatgggatccatgcaatgattgaagaatcagaaaacactttgtccttctgcctgttggtgagtgatgggcctgtatatggaatcgggtccttaaacaccaacctctgctgctctgatctgggatttctcagccttcagatttgtgaggaatacatttctattgtttaagtgcccttttgatttaaggtattttgtttctaatagatcaggcaaatgaaggcgaatactttttgcatatgtctaccatagacatattttactttctccaggggtacctggcaccctgccccacatatgcctaactcctctccttcctagtctcagaagggcaggattagaggatgggtccatttgggctggagtttgctgagggttacagactagaagtccttgctctggttaagatacaagtctaaagttcagaattgatggagccatatactgtcttaaataatgacggtaagccaaggagcaggggtaaccaggtcatcaaatggctccagtgggaatactagttccttggaatgacctgtcctggggatgagaggttggccaccaagggtgaagttgaggaagcatttcaagaagaagtagcaatttccaggattgcacgcagtgcaatttatccgagagatacctatggacagacacacatactgactgatagtgggacaggagtgttaatgcacctcaatcagaagcaagggtttaagtgagacaaaggtagacaacagcaaacaagaatgtgcccgtccgttctcagagaggattcttgtgtcagtcaagtaatagggtaggggctagcaacatggctcagtgtgtatcagtgctcgttacatttttttttttttttggtttttcgagacagggtttctctgtatagccctggctatcctggaactcactttgtagaccaggctggcctcgaactcagaaatccacctgcctctgcctcccgagtgctgggattaaaggcgtgcgccaccatgccttttttttgttttattatatgtaagtacactgtagctgtcctcagacactccagaagagggagtcagatctcgttatggatggttgtgagccaccatgtggttgctgggatttgaactcctgaccttcggaagagcagtcgggtgctcttacccactgagccatctcaccagccccatttttttttccattttttattaggtatttaactcatttacatttccaatgctatcccaaaagtcccccatatccacccaccccnnnnnnnnnnnnnnnnnnnnnnnnnnnnnnnnnnnnnnnnnnnnnnnnnnnnnnnnnnnnnnnnnnnnnnnnnnnnnnnnnnnnnnnnnnnnnnnnnnnnnnnnnnnnnnnnnnnnnnnnnnnnnnnnnnnnnnnnnnnnnnnnnnnnnnnnnnnnnnnnnnnnnnnnnnnnnnnnnnnnnnnnnnnnnnnnnnnnnnnnnnnnnnnnnnnnnnnnnnnnnnnnnnnnnnnnnnnnnnnnnnnnnnnnnnnnnnnnnnnnnnnnnnnnnnnnnnnnnnnnnnnnnnnnnnnnnnnnnnnnnnnnnnnnnnnnnnnnnnnnnnnnnnnnnnnnnnnnnnnnnnnnnnnnnnnnnnnnnnnnnnnnnnnnnnnnnnnnnnnnnnnnnnnnnnnnnnnnnnnnnnnnnnnnnnnnnnnnnnnnnnnnnnnnnnnnnnnnnnnnnnnnnnnnnnnnnnnnnnnnnnnnnnnnnnnnnnnnnnnnnnnnnnnnnnnnnnnnnnnnnnnnnnnnnnnnnnnnnnnnnnnnnnnnnnnnnnnnnnnnnnnnnnnnnnnnnnnnnnnnnnnnnnnnnnnnnnnnnnnnnnnnnnnnnnnnnnnnnnnnnnnnnnnnnnnnnnnnnnnnnnnnnnnnnnnnnnnnnnnnnnnnnnnnnnnnnnnnnnnnnnnnnnnnnnnnnnnnnnnnnnnnnnnnnnnnnnnnnnnnnnnnnnnnnnnnnnnnnnnnnnnnnnnnnnnnnnnnnnnnnnnnnnnnnnnnnnnnnnnnnnnnnnnnnnnnnnnnnnnnnnnnnnnnnnnnnnnnnnnnnnnnnnnnnnnnnnnnnnnnnnnnnnnnnnnnnnnnnnnnnnnnnnnnnnnnnnnnnnnnnnnnnnnnnnnnnnnnnnnnnnnnnnnnnnnnnnnnnnnnnnnnnnnnnnnnnnnnnnnnnnnnnnnnnnnnnnnnnnnnnnnnnnnnnnnnnnnnnnnnnnnnnnnnnnnnnnnnnnnnnnnnnnnnnnnnnnnnnnnnnnnnnnnnnnnnnnnnnnnnnnnnnnnnnnnnnnnnnnnnnnnnnnnnnnnnnnnnnnnnnnnnnnnnnnnnnnnnnnnnnnnnnnnnnnnnnnnnnnnnnnnnnnnnnnnnnnnnnnnnnnnnnnnnnnnnnnnnnnnnnnnnnnnnnnnnnnnnnnnnnnnnnnnnnnnnnnnnnnnnnnnnnnnnnnnnnnnnnnnnnnnnnnnnnnnnnnnnnnnnnnnnnnnnnnnnnnnnnnnnnnnnnnnnnnnnnnnnnnnnnnnnnnnnnnnnnnnnnnnnnnnnnnnnnnnnnnnnnnnnnnnnnnnnnnnnnnnnnnnnnnnnnnnnnnnnnnnnnnnnnnnnnnnnnnnnnnnnnnnnnnnnnnnnnnnnnnnnnnnnnnnnnnnnnnnnnnnnnnnnnnnnnnnnnnnnnnnnnnnnnnnnnnnnnnnnnnnnnnnnnnnnnnnnnnnnnnnnnnnnnnnnnnnnnnnnnnnnnnnnnnnnnnnnnnnnnnnnnnnnnnnnnnnnnnnnnnnnnnnnnnnnnnnnnnnnnnnnnnnnnnnnnnnnnnnnnnnnnnnnnnnnnnnnnnnnnnnnnnnnnnnnnnnnnnnnnnnnnnnnnnnnnnnnnnnnnnnnnnnnnnnnnnnnnnnnnnnnnnnnnnnnnnnnnnnnnnnnnnnnnnnnnnnnnnnnnnnnnnnnnnnnnnnnnnnnnnnnnnnnnnnnnnnnnnnnnnnnnnnnnnnnnnnnnnnnnnnnnnnnnnnnnnnnnnnnnnnnnnnnnnnnnnnnnnnnnnnnnnnnnnnnnnnnnnnnnnnnnnnnnnnnnnnnnnnnnnnnnnnnnnnnnnnnnnnnnnnnnnnnnnnnnnnnnnnnnnnnnnnnnnnnnnnnnnnnnnnnnnnnnnnnnnnnnnnnnnnnnnnnnnnnnnnnnnnnnnnnnnnnnnnnnnnnnnnnnnnnnnnnnnnnnnnnnnnnnnnnnnnnnnnnnnnnnnnnnnnnnnnnnnnnnnnnnnnnnnnnnnnnnnnnnnnnnnnnnnnnnnnnnnnnnnnnnnnnnnnnnnnnnnnnnnnnnnnnnnnnnnnnnnnnnnnnnnnnnnnnnnnnnnnnnnnnnnnnnnnnnnnnnnnnnnnnnnnnnnnnnnnnnnnnnnnnnnnnnnnnnnnnnnnnnnnnnnnnnnnnnnnnnnnnnnnnnnnnnnnnnnnnnnnnnnnnnnnnnnnnnnnnnnnnnnnnnnnnnnnnnnnnnnnnnnnnnnnnnnnnnnnnnnnnnnnnnnnnnnnnnnnnnnnnnnnnnnnnnnnnnnnnnnnnnnnnnnnnnnnnnnnnnnnnnnnnnnnnnnnnnnnnnnnnnnnnnnnnnnnnnnnnnnnnnnnnnnnnnnnnnnnnnnnnnnnnnnnnnnnnnnnnnnnnnnnnnnnnnnnnnnnnnnnnnnnnnnnnnnnnnnnnnnnnnnnnnnnnnnnnnnnnnnnnnnnnnnnnnnnnnnnnnnnnnnnnnnnnnnnnnnnnnnnnnnnnnnnnnnnnnnnnnnnnnnnnnnnnnnnnnnnnnnnnnnnnnnnnnnnnnnnnnnnnnnnnnnnnnnnnnnnnnnnnnnnnnnnnnnnnnnnnnnnnnnnnnnnnnnnnnnnnnnnnnnnnnnnnnnnnnnnnnnnnnnnnnnnnnnnnnnnnnnnnnnnnnnnnnnnnnnnnnnnnnnnnnnnnnnnnnnnnnnnnnnnnnnnnnnnnnnnnnnnnnnnnnnnnnnnnnnnnnnnnnnnnnnnnnnnnnnnnnnnnnnnnnnnnnnnnnnnnnnnnnnnnnnnnnnnnnnnnnnnnnnnnnnnnnnnnnnnnnnnnnnnnnnnnnnnnnnnnnnnnnnnnnnnnnnnnnnnnnnnnnnnnnnnnnnnnnnnnnnnnnnnnnnnnnnnnnnnnnnnnnnnnnnnnnnnnnnnnnnnnnnnnnnnnnnnnnnnnnnnnnnnnnnnnnnnnnnnnnnnnnnnnnnnnnnnnnnnnnnnnnnnnnnnnnnnnnnnnnnnnnnnnnnnnnnnnnnnnnnnnnnnnnnnnnnnnnnnnnnnnnnnnnnnnnnnnnnnnnnnnnnnnnnnnnnnnnnnnnnnnnnnnnnnnnnnnnnnnnnnnnnnnnnnnnnnnnnnnnnnnnnnnnnnnnnnnnnnnnnnnnnnnnnnnnnnnnnnnnnnnnnnnnnnnnnnnnnnnnnnnnnnnnnnnnnnnnnnnnnnnnnnnnnnnnnnnnnnnnnnnnnnnnnnnnnnnnnnnnnnnnnnnnnnnnnnnnnnnnnnnnnnnnnnnnnnnnnnnnnnnnnnnnnnnnnnnnnnnnnnnnnnnnnnnnnnnnnnnnnnnnnnnnnnnnnnnnnnnnnnnnnnnnnnnnnnnnnnnnnnnnnnnnnnnnnnnnnnnnnnnnnnnnnnnnnnnnnnnnnnnnnnnnnnnnnnnnnnnnnnnnnnnnnnnnnnnnnnnnnnnnnnnnnnnnnnnnnnnnnnnnnnnnnnnnnnnnnnnnnnnnnnnnnnnnnnnnnnnnnnnnnnnnnnnnnnnnnnnnnnnnnnnnnnnnnnnnnnnnnnnnnnnnnnnnnnnnnnnnnnnnnnnnnnnnnnnnnnnnnnnnnnnnnnnnnnnnnnnnnnnnnnnnnnnnnnnnnnnnnnnnnnnnnnnnnnnnnnnnnnnnnnnnnnnnnnnnnnnnnnnnnnnnnnnnnnnnnnnnnnnnnnnnnnnnnnnnnnnnnnnnnnnnnnnnnnnnnnnnnnnnnnnnnnnnnnnnnnnnnnnnnnnnnnnnnnnnnnnnnnnnnnnnnnnnnnnnnnnnnnnnnnnnnnnnnnnnnnnnnnnnnnnnnnnnnnnnnnnnnnnnnnnnnnnnnnnnnnnnnnnnnnnnnnnnnnnnnnnnnnnnnnnnnnnnnnnnnnnnnnnnnnnnnnnnnnnnnnnnnnnnnnnnnnnnnnnnnnnnnnnnnnnnnnnnnnnnnnnnnnnnnnnnnnnnnnnnnnnnnnnnnnnnnnnnnnnnnnnnnnnnnnnnnnnnnnnnnnnnnnnnnnnnnnnnnnnnnnnnnnnnnnnnnnnnnnnnnnnnnnnnnnnnnnnnnnnnnnnnnnnnnnnnnnnnnnnnnnnnnnnnnnnnnnnnnnnnnnnnnnnnnnnnnnnnnnnnnnnnnnnnnnnnnnnnnnnnnnnnnnnnnnnnnnnnnnnnnnnnnnnnnnnnnnnnnnnnnnnnnnnnnnnnnnnnnnnnnnnnnnnnnnnnnnnnnnnnnnnnnnnnnnnnnnnnnnnnnnnnnnnnnnnnnnnnnnnnnnnnnnnnnnnnnnnnnnnnnnnnnnnnnnnnnnnnnnnnnnnnnnnnnnnnnnnnnnnnnnnnnnnnnnnnnnnnnnnnnnnnnnnnnnnnnnnnnnnnnnnnnnnnnnnnnnnnnnnnnnnnnnnnnnnnnnnnnnnnnnnnnnnnnnnnnnnnnnnnnnnnnnnnnnnnnnnnnnnnnnnnnnnnnnnnnnnnnnnnnnnnnnnnnnnnnnnnnnnnnnnnnnnnnnnnnnnnnnnnnnnnnnnnnnnnnnnnnnnnnnnnnnnnnnnnnnnnnnnnnnnnnnnnnnnnnnnnnnnnnnnnnnnnnnnnnnnnnnnnnnnnnnnnnnnnnnnnnnnnnnnnnnnnnnnnnnnnnnnnnnnnnnnnnnnnnnnnnnnnnnnnnnnnnnnnnnnnnnnnnnnnnnnnnnnnnnnnnnnnnnnnnnnnnnnnnnnnnnnnnnnnnnnnnnnnnnnnnnnnnnnnnnnnnnnnnnnnnnnnnnnnnnnnnnnnnnnnnnnnnnnnnnnnnnnnnnnnnnnnnnnnnnnnnnnnnnnnnnnnnnnnnnnnnnnnnnnnnnnnnnnnnnnnnnnnnnnnnnnnnnnnnnnnnnnnnnnnnnnnnnnnnnnnnnnnnnnnnnnnnnnnnnncttgtattctgttgctgatgctcgcatctatggttccagatctctttcctagggtttctatctccagcgttgcctcgctttgggttttctttattgtgtctacttccccttttagttctagtatggttttgttcatttccatcacctgtttggctgtgttttcctgcttttctttaagagcctgtaactctttagcagtgctctcctgtaaatctttaagtgacttatgaaagtccttcttgatgtcctctatcatcatcatgagaaatgtttttaaatctgggtctagattttcggttgtgttggggtgcccaggactaggtggggtggggagtgctgcgttctgatgatggtgagtggtcttgatttctgttagtaggattcttacgtttgcctttcgccatctggtaatctctgaagctagctgttttagttgtcactgttaagagcttgttcttcaggtgactctgttagcctctatgagcagacctggagggtagcactctccttagtttcagtgggcagagtattctctgcaggcaagctctcttcttgcaaggcaggtacccagatatctggtgttcgaaccagactcctggcagaagttgtgttccactcactagaggtcttaggatcacgtgtggaatcctgtgtgggcccttgcgggtgtcaggcgactcagctggcaaggtagccggggctcaagtggagtggaaggggtttgtgccccagatcaagcccgggtagcctgcttccctatgtaccgcagtctcaagttccacgcgattggattggggtaggctctgtgttccactcaccagaggtcttagggtcccgtggggagtcccgtgtgggcccttgcgggtgttgggcaagactctgctggcaaggtagcccggggctcgagtctcgagtcgagcggaagggacttgtgccccagatcaggcccgggtagcctgcttccctatgtaccgcagtctcaagttccgcgcgattggattggggcaggcactgtggtccactcaccagaggtcttagggtcccgtggggagtcccgtgtgggcccttgcgggtgttgggcaaaactctgctggcaaggtagcccggggctcgagtctcgacccatttttttttaagagtaaatttttgtctctatctcaaggttggcctctgtggcagtcattgccagattagccatgactgtaagaattttccccacgtgtttggagaacgaaacaaaacaaaatacagcaaaatgtaaaacaagttaaaacaagttaagtttgcctattcatgtcagatagtctatggatgaataggtggtgttcaaaaccctcagagacctacggaagatgtcattaaaggatgttttattattttaaggatttttgggtatgagacatgtcacctccgtacatcacctccacttctacctcagagaagatgatgaacatcagagactccttatgtttgcttcaaatcgggcaggctgccaggaggcaaaattgttccttgattcaaccactgacaaaatgctgtccactatggacaaacatggacaaaaaatggacaaaatgaaggaaatatccttcattcaatgaggaattcaaatctgaatcatgttgccatggaaagctaatctttgccttgtgtttatgaagtactcagctccgtagacatgtttacctctcttgagggaacagcagctcctgacaagaagaaataggatttcagccaaattctcaggtctctatgctcattaaaaaatgcttcagctggacatggtggcacacgcctttaatcccagcactcgggaggcagaggcagaggcaggcagatttctgagttcgaagccagcttggtctacaaagtgagttccaggacagccagggctacacagagaaaccctgtctcgaaaaaaccaaaaaaaaaaaaaaaaaaaaaaaaaaacaaaacacacacacaaaaaaaccaaaccaaaccaaaccaaaaaacaaaacaaaacaaaacaaaaaaagagtagattcaataatctacctctttcccctattatttctatattattcctatctcttcctttctttctcttcaacccttttttccctccataagaaagaagtgatagagaaaagaaaaggaa

SEQ ID NO: 116 - DNA, 2653 bp, Mus musculus
ctgtgcatcctcactgacatcagactccagtgtctccgggatccagtggacattgaagatcggtagctctccaggagtcttcaaagcaccaggtttggaagtgctgaggcttctggctttgtaacctgaacagctcccaggttccagccattgttggactgggctgtgtggacccatccagcacactcaggtgataacaagatatggagaagtcaaagggaagaaagtctgtttcccaggccagagtggagaatggcatggagaacccaggcctggaactcatggaaggcggaaatcttgaacaaagatacacacaggaggaagtgacacagggacacagcctggaggatggcttggggcattcctctctctggagcaggaggatttttcagcctttcacgaaggcgagaagtttctttgaaagacatgctggtttattcaaaaagatcctacttggtctcttgtgtttagcatatactgcctacttcctggcagcgtgcatcctgaacttccagagggcactggccttgtttgtcatcacctgtcttgtgatcttcatcctggcttgccattttctgaaaaaattctttcctaaagaacaactaagatgcttgaagcctctggaaaacacccacctgaatctttgggcaaagcgggtgtttataggactctctgttgttggcctcatcctctggctggctctcgacacagctcaaaggccagagcagctgatctcctttgcaggaatctgtatgttcatcctcatcctctttgcctgctccaaacaccacagtgcggtatgctggaggacggtgttttggggcctgggccttcagttcatctttggaattttggtcatcagaactgaacctggatttaatgcatttcaatggctgggagatcagatccagattttcttggcttatactgtggaaggatccagttttgtttttggtgatacactggtccaaaatgtttttgcttttcagtctctgccaatcattattttcttcggatgtgtgatgtctattctttactacctgggccttgtgcagtgggtgattcagaaggttgcctggttcctgcaaattaccatgggtaccactgctgcagagaccctggccgtggcaggaaacatctttgtggggatgacagaggcgcctctgctcatccgtccctaccttgcagacatgaccatctctgaaatccatgcagtcatgactggaggctttgctaccatagcaggcacagtgttgggagccttcatatcctttgggattgatgcatcatccttgatttctgcctcagtgatggctgccccttgtgcacttgccctgtccaaactggtatatccagaagtcgaagagtccaagttcaagagcaaggagggactgaagctgcctcgaggggaagagaggaatatcctggaagctgcaagcaatggagccacagatgccataagccttgttgctaatgttgcagccaacctgattgcctttctggctgtattggccttcatcaatgctaccctctcttggctgggggaaatggtggatatccatggactcagtttccaggtcatctgctcctatgtcctaaggcccatggttttcatgatgggtgtacagtgggcagactgcccactggtggctgagatagtgggagtcaagttcttcataaatgaatttgtggcctaccagcaactgtctcagtacaagaacaaacgtctctctggagtagaagagtggatcaatggcgagaaacagtggatttctgtgaaagctgaaatcattacaacattttccctctgtggatttgccaatcttagttccataggaatcacactgggaggcttgacatccatgataccccagaggaagagtgacttgtgcaagattgtggtcagggccctcttcacaggtgcctgtgtttcctttatcagtgcctgcatggcaggaatcctctatgttcccagaggcgctgaaactgactgtgtctcattcctaaacacaaatttcaccaatagaacctatgagacatatgtgtgctgcagagagcttttccagagtacttcgctgaatggcaccaacatgccttctttctcaggcccctggcaagacaacgtgtccagcctcaggaatcttgctagctgctgtgacctctataccagcactgtgtgtgcatgaggctggtgggccgctccaagacagttctcatagaacagattcatattaccaaatacattttcatgtacttcctattctctgagaaccccactaaactccacaaagtgaaatttctgagctcactatagctctgtataaaaatcagcccttacctttccagcggcatgacatgaaattccggttaccagacatgaaattcattatagaccctcttgagccaaagtatggtgggaatgtaactgaggggaaaatatgtgtgtggtgagggctaagatccaggttcaaccccgggcctggcccagagtggggagagtggggaaatcaaagtagatgcttagttttaacttgggaatggtggcaaaccccgtggtctcttacctgtaggctcacagctaaggggattacctcagattcaaggcaagcctggcccaaacatgacatgtcctcgtgtaggagtggatgtgagg

SEQ ID NO: 117 - protein, 662 aa, Mus musculus
QDMEKSKGRKSVSQARVENGMENPGLELMEGGNLEQRYTQEEVTQGHSLEDGLGHSSLWSRRIFQPFTKARSFFERHAGLFKKILLGLLCLAYTAYFLAACILNFQRALALFVITCLVIFILACHFLKKFFPKEQLRCLKPLENTHLNLWAKRVFIGLSVVGLILWLALDTAQRPEQLISFAGICMFILILFACSKHHSAVCWRTVFWGLGLQFIFGILVIRTEPGFNAFQWLGDQIQIFLAYTVEGSSFVFGDTLVQNVFAFQSLPIIIFFGCVMSILYYLGLVQWVIQKVAWFLQITMGTTAAETLAVAGNIFVGMTEAPLLIRPYLADMTISEIHAVMTGGFATIAGTVLGAFISFGIDASSLISASVMAAPCALALSKLVYPEVEESKFKSKEGLKLPRGEERNILEAASNGATDAISLVANVAANLIAFLAVLAFINATLSWLGEMVDIHGLSFQVICSYVLRPMVFMMGVQWADCPLVAEIVGVKFFINEFVAYQQLSQYKNKRLSGVEEWINGEKQWISVKAEIITTFSLCGFANLSSIGITLGGLTSMIPQRKSDLCKIVVRALFTGACVSFISACMAGILYVPRGAETDCVSFLNTNFTNRTYETYVCCRELFQSTSLNGTNMPSFSGPWQDNVSSLRNLASCCDLYTSTVCA

SEQ ID NO: 118 - DNA, 43709 bp, Homo sapiens
tcacaattaccccccaccacggcacaataactgccgcaccaggcttaagtaattaacaaacttactttcagcctgacccatattttcctgaggttaccctggaattctccaagtgccctacttacccatagagcctgaagtaaaaacgtactcaggcatccttcatcagtcgtcctccactttccacactctggcgtttcttcactggattatttgtagagattatggggagccccatgttgggcgccagatgttggggaaaccagccccacatcacccagcgggtacactgagtctagaggaaacaaaggagttagaaagagacagaatagcgtttaaaaggcgggtccaggggactggagcatcggaggcttgctcacagcccagagctctcaggctctgccccaatttatcggtttacaagctctttgttcttagggcagatgggagggggaggaagggatgaggaaaaggattaatcagtgaaggagaactcatgagtcattcgataagatgtatagcagtggcggtttctgtgaatttccttgaacaaaggcgtgtgtctaaactacttaagatcttgaacttatcgggactgaaatgggttggagcaggtttcaggaggagccaagatgtttgattatactccactgcttcaagggagtgttatctccctgagcaacctgtggaatgccactgagcagttatgctcttcgggcataaagacatgaaggcaataaggagacttttctcctcagaggccgcccatggcttcccatgtgtgtctcacacaggggagtccaactcaactggcacctcagaaactctctttctcacaggtctcgaactcttgacctcaggtgatccaccttcctaggcctcccaaagtgttgggattacaggtgtgagccactgcacccagctaaaacaggtattttaatacatcccttatacattaacttatgttaaagaaggtagaggaagtaatgagcttgatggagatataaatgaaagacataaaaagagatttgaaatagaactctgggccaggtgtggtggctcatgcctataattctagcactttgggaggctgaggtgggtggattgtctcagctcaggagtccgagtccagcctgggcaacatagtgaaaccccatctctaaaaatacaaaaaattagctgggcatggcagtgtgtgcctgtaatcccagctacttgggaggctgagacaagagaatcacttgaatccagaggcaaaggttgcagtgagccgagatcatgccattacactctagcttggccgacagagtgagactccacctcaaaaaaaaaaaagaaagaaaaaaagaaatagaacctctgaatatgaaaaatacaacatctgaaatgaaaagtacactggataggattaatagcagcttagacatcatagaagaaaaatcaaactgaaagatacagagaaaaaaagactggaagaaacagcgagaacaccatattagagattcatgaaatatcattaagtggcctggtgtacatttaatttgagtcccagaaagaagagataaaaggggaagatagaactcctagggtcaaacaatcctcccacctcagcctccaaagtagctgagaatatagatgtgcaccatgacactgggatttgacttgtttttaagttcactgattctcttcttagttaagctgagtctgccaataagcctgtcagagctattcttcatatttgttaccatgtttttttatttttagcactttcatttggtcctttcttatagttttcttctctcctgacagtcctttttttttttttttttttttttttttttttttttttttgagatggagtctcactgtgttgcccaggctggagtgcagtggcacaatcctgactcactgcaacctccacctcccaggttcaagtgattctcctgcctcagtctcttaagtagctgaggctataggtacgtgccaccatgcctggctaatttttgtgtagttttagtagaggtgagctttcaccatgttggccaggctgatctcaaactcctgacctctagtgatctgcctgcctcggcctcctaaagtattgggattgcaggcatgagccatgtcgcccagtcagtcctcatctctttatgcatgttttcctccttttccactacagcctttaacatgttaatcttaattattttaaattctccatataataagtggattattttaaaggtcttcatcctcattgtcttcacatcaaataggctgaggaggagaaggaaggggaggggttggtcttgctatctgaggagcggcagaggcagaagaaaatctgcatgtaagcagacccacacaattcaaatccgtgctgttcaagggtcaactgtagttggaagctatgatgatggttttagtgtatacttttagtagaatgatgtagttaattttgtataattaactgcatttatgagtctttaaacttaaaaatgataaggaaaactatctccttagttttaaagttgctttaacaggcagggcaaggtggcttacacctgcaatcccagcactttgggaggccaaggtgggtgttcaggagttcaagaccagccttgaggtcaggagttcaagatcagcctggccaatatggcgaaaccccaactctactaaaaatacaaaaattagctgggtgtggtggtgggtgcctgtaatcccagctactggggggctgaggcaggagaatcgcttgaacctgggaggtggaggttgcagtgagccaaggctgtgccactgcattccagcctggatgagagagcaagatgccatctcaaataaataaaaataaataaataaagttgctttaacagtttataaaaataaaaatcacctactttttcagttaaaaataaataaatcttcccacgtaacagtcataacatatggattatatctgattccggttggtcattgcattatctcttgatagtgtggtttttgtttgtttttccttttttgtcataagtattttggttgtaggccagacatcttgtgtagaacagtagagactgggacaaattgcttttatgccagaaaatgggcatatgcttttgtgttagtccattcttgcattgctatggagaaatatctgagagtgggtaatttataaagagaagaggtttaattggctcatggttccgaagcttgtacaggaagcatgatgttagtcatctgttcagcttctaaggaggcctcaggaaacttacaatcatggcagaaggcaaaggggaagcaggctcatcttacatggccagagcaggagaaagagagagagggggaggtgctgcacaccagatctcatgagaattcactcacatacagtaccaagggaagatggtgctaaaccattcatgagaactctgtcctcacgagccaatcacccccaaccatgccccacctctagctttgaggattatatatatattttttgagacagagtttcactgtgtcacccaggctggagttcagtggctcgatcttggcctactgcaacctccgcctcctgggttcaagcaattctcctgcctcagccaccatgcccagctaatgtttgtatttttagtagagacaggttttgctatgttggccagactggtctcgaactcctgacctcaagtgatcctcccgcctcagcctcccaaagtgttgggattacaggtgtgagccactgagcctggcctggggataacatttcaacatgagatttgggtggggacacagatccaaatcatactagtttttttttttttttttttttttaagacagggtcttgctctatcacccagtctggagtgcagtgatacaaacctggctcactgcagcctggaattcctgggctcaaaggattttcccacttcaacctcctgagtagctagtactacaggcatatggcaccatgcctggcaaatgttagccttttttttctttttgtagaaacagggtctcactatattgcccaggttggtctcaaactcctgccctcgagtgatactactgcctcagtttcccaaagcactaagattacaggtttgagctaccatgctcagctaggcgtgtgctttctttagctaaatccttagtgtttggggttgagtcgatctagtgaaaagttgagctggatttgttgaattgagttggtggcttgtatgaagatttttctcaataactgcttgagcttcagctttaagtcttttctttgcacctatgccttagagaaggccctctccacacattcccccgcccgctttacagaagtaaatgcctgttactttctactcaactcttgctatcctggtgtggaaaaggagagtgccctctgttttacaggctcatcctcaatcttacacaggtgttatgtccctgggtcttaaaggtggggcattatcagcaatcgtccctccatcagcaataggaaatctctaatggccttggtccagggcagttttctgcctctctttcagaggtagaaatttttttttctgttcacttctctcagcaatgagtcttcacctgtggcccaagggtggcaaatttttttcccctctcccagtgatccaaggcagttttgcaggggagataaatgagaacaatccaggtagagctttgtgtctttcctgcagtgatagctgctcacctttcctaggcctgcaccatgaggggaactttcccaagtctcctgttttgcccatggtctttcttctttttttttttttcaacttgcattgcctctgacccaagtcagtagcaacctttattacttataaagatttttaaacatttccattgtatttacaacacaaattttaggcaacacactcctatgaatgtgatggttttaatggttaatacctatccaagtaaaaaaattatgctttaatgtggaaagaattttagcctgggcaacaaacatagtgagaccccatctctgctaaaaaaaaaaaaaaaaaaaaaaaaaaaaaaaactaaaaaattagccaggcatggtggctcacacctgtagcctcagctacttgagaggctgaggtgggaggattgcttgagcccagaagatcgaggctgcagtgagccaagattgtgcaccgtactccagcctgggcaacagagtgagaccctgtctcaaaaaaaaaaaaaaaaaaaagaacaaggtagagggatttgagaggtgtgtatttctgtattctggcttttttttttgagacagggtctcactctgtcacccaggctggcgtgcagtggcacagtttcggctcactgcaacctccacctcctgggttcaagtgattctcctgcctcagcctcccgagtagctgggattacaagcatgcaccactgcgcccagcttattttgtatttttagtagagacaaggttttgccatgttggccaggctggtctttaacccctgacctcaggtgatccacctgcctcaccctcccaaagtgctgggattacaggcgtgagccactgtgcccggcccgtctttttttggtgttgttttttaattcttttttttttttggagacagagtctcgctctgttgctcaggctggagtgcagtggcatgatctcagctcactgcaacctctgcctcccgggttcaagtgatcctcccaccccagcctcccaagtagttgggactacaggtgtgcatcaccacagctggctaattttttgaatttttagtagaggtggggtttcaccatgttggctaggctggtctcaaactcctgacctcaggtgattcacccacctcggcctctcaaagttctgggagtacaggcatgagccaccacacccggcccgtggttcttttctttttattattctcccaaaaagtgcagccattttggctgtcccaaatattgtttgtctgcattctgatttgaaaaataaagtgtcctcaaaataggagctaggatgaatgtggagctggagcacaaatcctttttttttttgaccgggtctccctctgttgccaaggttggagtgcagtggcatgatcacaactcactgcagccttgaactcctgggctcaagcgagcctcctgcctcagcctcctgagtagctgggactacaggcatgcaccgccacccccagccatgtttcccaggctggtctcaaattcctggactcaagagatccttgtgcctcggcctcccaaaatgctggggttacaggcctgagccagccctgccagagctcaactctcttgggcttctctcaaggattgtagacttctcaagtcctgctgctactggttgctctgcaatgccttcaaacttattttatatattttgtccagtctttttagttgttttcaacaggagggtgagttaaatgccagctactctattaagaccaaaattttaagtccctatactctccctagttctgcctgcttctacagtaattgaaggagatataaaagcagaaaggataaaaccatctattacttacatcgtatttatttcccagatgggttttggcaggccacctcattttccaggagtaacctctaggctttaggagagttacaacctttaggacagttgtaagtttcaacttccacagaaatgaccagagctagcctctcatcctggctctcccctaactaactgtatgactttaggcaaattcctcatcttctttgagtctatttttttttcttttgatctaaaataggattagtagctaacttgcttaccttacaggaatattacaaggatagtgaaagtatagaaaaatcttttgaaagactataaaatgctgtagaaacagaggatctcttatttatgtttaaccttgcagcccagaaatagcttagaactgggagtaagggactcaggatatagaattggcttagtcactaactaaggttttgactctgggtaaatcactttattcttcctgatctgtaatatgagaaagttcatccatcaaactatatgtgataaggcaaaaaacaaacaatggggcccaagtcagttaatcaaggggaggtacctgctaggttaaatcttttcctcttggcagttgggttatgtcaatatttgtgtttaaaaaaaaatctggatcccttgggaaagtgagaggagtactatggcctgcacttagaagatgaagatatgggtttttacatcttctataaggaaagaaaaagggaagtgggagggtgagagaagacagaggtgtgatcactggcatcatttcacctgaacagaatactaggatctgtgcctatcattatgcttggacttagccccggaagtggcaattatttaaggtaaaaactgttggggcgtggtgactggagcctgtatcccaacactttgggaggcctaggtgggaagattgcttgaggccaggagttcgaaaccagcctgggcaatatagtgagaatcctgggtctaccgaataaaaatttaaaaattagctggatgtggtggcacacacctatagtcctagctcctcaggaggctgaggcaggaggaccacttgagcccaggagtttcaggctgcagtaagctatgatctcaccactgaactccagcttggatgacaaagcaagaccctgtctctaaaataaatacatacatatgtacacaaataaggtaaaaataaaaaaaagatataagatatatatccttttgtaatcttatatatttttgtatacattctatcttatacatatatcttatatatatataagatttacaggtatatatgtatttaaaaatatacaaaaagatataagatacatgtataagatagaatgagcaagagacacttcacagtcatattgacatataggacaacagcttgaaaatatctgtaagcaggttcactttcaacactggtgtcttattttcctgaattaatataagatcttacaacagtgctccacaattgcaaagtcatgtaatatttttccaagttctttcttctgtattaaattacttaattttcatgataatcttatgagataggattaggcagggtgggaaagatggaagaggcccagaaaggtaaagtgagttgctctcgatccagaatacaacacacatctactctgtgagggattctgtgtacgtctgcgcacatacacatgcagaactggggaaacagaaatatgtccttactttggtgattggaatccgcatctacataccaaataatctaagccagaatctgtggtggtgatgttgttttcacgtattttacaaatatttattgattgcctaataatattgtggtgggccttgagcctagggatacagtgaagaacaagatagagaacctggccaggagcagtggctcacacccataatcccagtactttgagaggccaaggcaggaggatggcttgagcccaggagtttgagaccagactgggcaacatattgagacccctatccccacagaaaattaaaaaaagacttagccaggtgtggtggtacacgcctgtggtcccagctactccagaggctgagatgggaggatcacctgagcccagaagttagaggctgcaatgagccatgatagtgccattgcactctagtctgggtgacagagcaagaccttgtctaaggaaaaaaaaaaaaaaaagacagagagcttgtgcttgaggagatcactgtctagtaggcgatggtatgtgctctatagggttcagcaacaacatggtgcaatcagagtgcagggaggggtcctaagttttatccagagggcgtcataggaagctttctttctttctttccaggccaggataagtgttaccagctctgtaaagtctttctctccctcttttttttttttttttttttttttgagatggagtctcgctcacccaggctggagtgcagtggcatgatcatggctcactgcaacctctgcctcctgggttcaaatgattctcctgcctcagcctcctgagtagctgagattacaagcctgcaccaccatgcccggataatttttgtatttttagtagagatggagtttcgccatgttggccagggtggtctcgagcgcctgacctcaaatgatccgcctgcctctgcctcccagtgtgctgggattacaagcgtgattcaccgcgctcgacctgcaaagcctttcttgacacatccgtctttcctcactgatctgttcgttttttgatggcagagaccttgtctcactcatttttatgtcctcacacggaaaacggtggctggctaatagtggttactcaataagtatttgttgaatggattaataaaataattcctagcagtcatttggcatggaatcatgtacagtcgtgctgtttattgttttctagggcatgtctttccagcacaaaatgatggtaaattttctgggtgcagagacggctcttactgtattttacaggctacccagtgcctagtccagtggtgggtaatgcttacaggaatgtacctgttagaagttcttacagaattcttttgttttgttttgttttctgacagggtctcactctgtcgcccaggctggagtgcagtggcgcaatcacagctcactgcaacctccacctccagaggctcaagggatccttccacctccgcctgccgagtaactggaaccacagtcgtgtgccaccgcgcccagctaatttttgtatttgttgtagagatgtggtttcgccatgttatcctggctggtctcaagcgatccgcccgtctcggcctcccgaagtgctgggattacgggcgggcgccacctctgcataagtcttaggcctgcaaaacagtcttaaaaacatataatatttaacttgagaggtgcagtcctcctctacagtgagggcaggctcagcgaaggagggcccaagacataaaactaaccaatggcaggaaagcccccatgccccacccaagctgcccctcctccctcgcagctgagcttttctttcagtccttcactgaggagccagagggaatcaattccacaagctggggtaagtaaaggtgtttgggggagggcaggtgcctaatttacaaatttttaaagagatcatatttaaactaaatgcaggtagttttgtgcctagtcaggaaggccctaatttacacaatataagttggttatgtgtgtttaatgaaattatacttcaaatgcttgaagagatcacattttcaaaagcaattccatggggaagggaattttctgcaaagtaaataaatatctcagaatgaacttatattctaattgtgaatgtccatgtattaaatttgcttattctgaggcccaaatgtttgcttattttgtttaaaaactttacttgggatcattaacattcatactaattattttaaatgtaagttttgttaatttcactgatgagttctctctggggcataaaaaaccaattcttatgctacattatagtcaggaatttgaaggcctgtaaattgttatctgttcagcaatactttagggtccgggtcttcccaactgccttcctccctgtttccttcttactcagcaagctcagtggggcctccctggggctaaaaggagtagttaccctgtgactctttctttgagggtccaagtaggaacctttatagcccagatcctggggccctgggcggcccactgattcatttcaattccactgcctttcatttctcttctcctatcttactgcctcttctttagctattcacaagaggaaataggattttatttttcattatttattatataaaaattacacatccaatcttctcaattctcagttcttaaagaaatcaactaagccttcaaagacttttagttttgcgttttccatgggtaactggtcctaaaaattctccccatccccacagaacagaatgaccaatctttcaggcttggcctgaatttgtttttcagttgaggagaacaggagatggagaaagcaagtggaagacagtccattgctctgtccacagtggagactggcacagtgaacctggggctggagctcatggtaatcaccagtttagtttctctctgcagagctgtgggctgctgcatgggctcctgtagggtatttggctgctctcaatccccatcatccctggcagggctccatgactgatcccaatgctctctgtgcttgtaggaaaaagaagtagagcctgagggaagcaagaggactgacgcacaaggacacagcctgggggatggactgggcccttccacttaccagaggtactggtgttttggaatcttgttcagttaggaaaggatctagggtgggctgccccttcaggcagcttgtggtattatcacaaccgctccaccttaccatgtgtacatatatatatgtatcttacataattaattaacttaaacatgtgccataaactccataaaaaaaaaggagttcagcagtatcagtgttggttggactgaaaataaaaataataacaatggtaataatggctaacagattttgagtgtatacttactattttgcagattgctttatgttatacatttattttcattacaacaggtaggtattcattttaatccctttagaaattaatttaccatatcattaaaaaaacagtagctcttctggaatactcagatttgggaatggtggagaggaagggaaacctggggagaaaacacagaaggacttattataaggataataaagacagtaaaaaagatcttagaagtcaaaagagaagagtctcaagaatgaagaaggtacagtccacagtgctatgtgaacaggggtctaggaaggaggagtgagaaaaatctttgaatttgtttgtggatctggtcccagaagtaatgtcaaagaaaattgtttgagtaaaatagatcatatggaaagaagcaatgttccatggcctggaaaacagtgggtatttataaaagagtgcagaagtcatacactaaaagctgagaagagaggacattggatagcttctaaagggaatacggtcatgagctacataatgatgtttcagtcaatgatggaccgcattatacaatggtgtataatcatgtatatcaacggtgtatatcattacacaacggtggtcccataaaattataatactgtatttttactgtaccttttctatgtttagatatgtttagatacacaaatacttaccattgtgctatagttacctacagtattaagtacagaaacatgctgaacagatttgcagcctaagaataataggatccaccatatagcttggatgtgtcgtaagctataccatctaggtttgcataagtacactgtaagatgttagcataattatgaaattgactaatgttgaatttatcagaatgtatccctgttgttaagtaacacatgactatatatggagatgattcagagcagcttccaaacaaaaggttatttttatattttcttctctttatttttgaaagttacctcagtgacttcttaaaatttttaattgttttattcacaatttgcttctctctaaaaatttttatattatcatgttttatatatactgaattgacagtaaactctttgtaagtttttcatgcttacatgatatttcatattttacttagcagtgtggtcgttaatcatgtgagtcacactgcttgggtctatatttgaacagtggtatgctagtaaatgtttaagaattgactctccaccgggctagtggctcatgcctgtaatcccagcacttcgtgaggctgaggtgagaggatcacttgagccaaggaattcaagaccagcctgagcaacatagtgagacccgcctctacaaaaatttttaaaaattagcagggcatggtggtgcatgcctgtagtcccagctattccaggaggccgaggtgggaggatcacttgagcccaggaggttaaggctgcagtgggccatgatcgtgccactgtactccagcctaggggacagagtgagaccgtcttgaaaaaaaaaaaaagaagaaagaaccggctgtccacatgtagttttgcaatgaatgttggttaatatttttgctcaccttaatgaggagtaagaccaggggttggcaaacttttcctgtaaaagataaggtagtaaatattattggttttgtggctgatgtggtctctgttgcaattattaaactctaccattttcgtaggaaagcagccacaggtgatactaaacaaatgagcatggctgtgttttgataaaacttaatttttaaaaagaaggtgagatgaacttggcccacagaccacagcttgctaatctttagtctagatgaaataataaattaagaccttatttacagtattcgcctgtaacgtaaaaactctcaacatggctgatttcaagtaaccaaagggttacttgaacaaggagttgggaagagatgtatcattatataaaatttccaccatacacatacagcagacatgaataacttcatgagctcacatgacagaaaaatgtagcaaaataattagaaaatgatgagtttttagtatttattacctttgtctttaatgtaatttaattatacatttatatagttttaatttttagtaatggcttgcacaattcctgaaaatgtaacaatcacttctctcaagccagcgcaggccagcttcccctgcaccactgactctagcacttaccagattttgggcaagttatttaccctctctaaacctcagttttcaccctgtaaaacaagaataatattagtacttagctgaaaggatcttggtaatttttttttgccagactgttgttggcaccttaaactgctctgatatataacatgtccagttcccttcaagtcttatcgaccttatattttctcatataaaccatgttaactagttacatagatataaaatcatgccttaaagttctaacttgcatttatttttattttttgagaaatgaggtcttacttcattacccaggctggtcttgaattgctgggcccaaacaatcctcatgtctcagcctcccaaagtgctgagattacaggtgtgagccatgtgcctgaccttaacttgcatttctttaaatttttgtaaagctacacattttcctccatttgccttactttccatatttctacgtgtgattttcttttctttttttttggaaatggagtctcactctgtcatccaggctggagtgcagtggtgtgatcactgcaacctccacctcccgggttcaagcgattctcctgtctcagcctcccgagtagctgggattacacgtgctaccacacccagctaattttttttttgtatttttagtagagatggtgtttcaccatcttggccaggctggtcttgaactcctgacctcaggtgatctgcccacctcagcctcccaaagtgctgggattataggcgtgaaccactgtggccggcctacttttctttatcaactaaagtaagttctggattttgaacctcatttccttcctcctgaccaactctaatagaacccacatagatttcttgtttccagttctccccacctcctgccaatctatcctatatagcttctaccaaaactacctaaagtatgtctgaactcccttatatcacaaacctctgtagctctccagttgctcctgaacaaagccaaactccacagcctggtattcaattctccccaaaacctcttccccacaaccaggatctgtatccaacttgactttccaacattaactcttgcaattccctttctaatgccaccctatgctctagtgaaagtcaactatcaattgttccttatatgtaatccccagtttcctgcctccatgtcatgcatgtcattacatcattgcttatgagtgtactgtcttcattttttgtctttgtgcccaaatacaacacatattttaaggctcaactcaagagcaatcatgtccatgaaactttctctgatgctgcctctcctcacctcaacctcactggccccagtactaaaaggtcccttctttctccaaacttccataacattctatctgaccctctcttataacactttaagcttttgacattttgttatagacttacatgtatattatatcccctatactggactgtaaatacattgagagcaagatcaatgtctatttcatccttttgtctcctataacactggaaacaatgctttacccatagtttatacttaaaatgccataacattcaaaattcaataaatacatgttaataagttatgtatataatctagataacagactttgtaatttcttcatgtgtacatttttcaattctgttttgtttctgtattgatttttaagtatttatttctttttcttcttgttcttttgtttgattaactctgatgatctgggatgctttgtagggagtaatctgacatgtagctttaagctgatgcttttccatactgatacccacttttctagcaagttattaaattgtgagttctttctctattctgatgttgcttcgactttattaagttaatgtgatgatttggatttatttttaaatcttttgtttcactgacacagttctgagtacttaacacgatatcattgtttacaatgtacattaaaacttgatggctcatgtatttgcattagtttttcctttaaaaaatattccttggggctgggcatggtggctcatgcctgtaatcccagcattttgggaggccaaggcaggcagatcacttgaggtcagaagtttgagaccagcctggccaacatggtgaaacctagtctctactaaaaatacaaaaatatgtgggcatggtggtgggcacctgttctcctagctactcgggaggctgaggcaggagaatttcttgaacctgggaggcggaggttgcaatgagccaagatcatgtcattgcactccagcctgggcaacagtgagactccgtctcaaaaatatatatactatatattttttttgtcaaattttattttattattattattaatttatgtttttgggactgcatgccatagtttaactggtacagttttttttgcctttttagtgtaatgtttaataaagcatagcatgcatacagaaaaataaacataagccttaatgaattttcacaaagtgaatacaaccatatgaccatcgaccagatgaagaaccaaaacattatccgtacccaagaaccattttatgtttcctttcagtcagcctccctaagggtaatcattatcctgacttttagcatcatagattaattttgcctgtgtttggactttatatgggaagtctaatttatactttaaataaaaatataccatatatatacttttgcttcttttgctttacattgtgttttggagattcttccatattattgcatatattgtactttgtacatttttaattgctgtatagtattccattgtaagaatctaccacagtttatctgctcattttactgtgggtctgaattttagtagtttctatgcttttgctatcatagtgcagctatgaacatttttgtgcatgtcttttagtaaagataaatacacctttctattgggtatatattttggagtggaattgccatgctatagggtatgtgtaggtttatgtagctttaacagatgctaaacatatttttagcaaatttcgctcccctggcagtgttatgagagcatgtcttttttcattgtctccattgtatgtgtgtagtattatcacattgtagctttggtttgtatttccctaatggctaaggaacttgtgcatcttttcagctttttctggccactgaatattctcttttgtgaagtgcctgttcaggtctttaattggcagtgtttttctttcttagtgtataaaaatagtagtacattttataaatgatgaaatacaaacaagagtacattttaagcacttgccattaaaaaaactggtatgtaaggtaatacatgtgttaattagcttgatgtagccattccacaatttatatatattttaaggcatcatgttgtataccataaacatatacaatttttgtcaattttattttaaattttttttagagatggggtctcacaatattgcccatgctaatcttgaattattgggctcaagtgatcctccctccttggcctcccaaagtgctaggattacaggtgtgagccactgcacccagccaatttttgtcaattttaaaaagaagtacaaaattaataccctgaatgatgttgctaccactgtaaatgatactttcatactttctagttatctgtcacaagtatataggcaaatcatttttgtgagtttatctatctacctattcttttattcagcaaacacttattgaacatgtattatgggccgggcacttgttagcgacctaaagcaataatagtatgtgctaggtactaatttaggcaccaagaatacaaagataaaaacagaaatgctcctttccctgatatgctcaaaacctaataaagacaggtaaacagaaaaatgacaatatcatgctatatggtaagtgctatatggtaagtgagttgtggtcaggaggtgatggaagaaatcttttctaggcatgcaatttatatctactcttggactagtccagcctgcctcttactttgcaggaggcttactcaactggcatttgactgcatataattttaaactagctttatctagtacatcggtttaggtcccaacaggaaacagatggcatacttaaattaagataattataggagaatttatttacaaagagaccattacaaagatatgtatgaggtatggtgacaccataagaaaggataatgcaagaagcaaaagtcttgaagcagtgaacagttactattcgtaggcctgaaggaataagatgtaagagcacctggcaggagagtcagataaaaagacctcctcaacacactgacctgtcttttcatacactctgatcatctgtggaggtcccagtagcagaacccaacctgataagccagaggacatgggagtacattgatgtagtttacatgagttaaattcccagggcacagagtggagtggagagtggtgctggaggagcacaccaaagatatctggcacacatgggaaggccaggattgaaattaaattcattccttgatatactttgcaaatgatgttccaaagataatgatgtcctcaggtatgctggcccttttactcactactttctctattaagcatggaaaaatgaggaaggatcacttgagcccaggagtttgagaccagcctggggaacatagcaagacctcatctctacaaaaatttaaaaaagaaaattagctgggcgtggtggtgcacacctgtagtcctagctactcggaaggctgaggcaggagggtcacttgagcctgggagttcaaggttgcagtgagccatgatcatgccataccactgcactctagcctgggcaacaaagtgagaccttgtctcttaaagagaagaaaagcaaagcaaagcaaagcagagttcttgagatcctaaagaatcatcttgagttgatccagtcagatggtgataagcattgtttcctcctttctcagcttacctgtatctcatagtacacactctgctcagctaacacagggttgggcttcctgcagaagggacaggaggggatgggggcaggaatgaaaaggaagactaggaactgggagtgtgttagatgggaggggcagccatggaactccatgggccaaagccccagggcattaggagttaatggctggtcctaaccctggctaagctgccctgcctcagcatgactgccagactgggaccttcttgctgggatcaccttctctggagctcccaagattttggaaattagagcttttggctcagatggctgcagcatgctgagcatacttaggagtggaaaagacaggcaaccctggaatctagggaagatgtggcatagaatgatggttaagagctcagatgctgaagccagagtgtatattctgtgttcgctccttacagcctgtatgactttgggaaagttatttaacttctctgtttttcagtttccatactgtaaaatgggaatgctaatagtaacagctccaggggtcttaagaggagtcaatgagttagtatttgctaagttcttagaaagagctcagcatagagaaagcactatatacatgtttgttaaatcaaacttgaatatccctacttgctgggcctcttctctcaggcctgcacatccagagcaattcttgaggttggtagcattttccttcctgtctgtcaatgcacatttggctgactgttcaaggccataggtttgtttggtttttagggagggatggccaaattgcctctaagaagaacaggccctcttgtgaatatggaagcttagcaatcctctgtcctttcagaatgggaaaggaaagtagtagacccctgacatgagcagtacccacttctatggtaggagactaccaaggatattgctagttcgggctgagtagggtattctgacctgctgcccaccagcaaggtttgatttgccctttttggcattgcaggacactacctaacttcctcctggctgaagaatattcttcattgactaagagctaattctgccttgtgttaggtaatctgaattctgagagttgaattaatagaaatgggatggagtaattcttgtatcttaacttttgggttcttattaggaggagtcggtggcctttcagcaaagcaagaagtttctgcaaaacacacgccagattgttcaagaagatcctgttgggcctgttgtgtttgggtgagatattgagaattcatgaaagtgagaaacacagttattttagaaatttgccttgtgtcaaggtgattaccaggtggaaggcatttttattcaaaactgatctaaaaagctatttgatgtatcaatcttaactacttgtaggtgcaccataatgtattgaattgcacttgtaggaacaagtgaaatctgagaataaactatttttcaaaagtgtactatttgatggatttaaaatatttcagagaatgggggcttatcctttttttagtggcttgatttggtggagtgcatgattcttacagccttgatgacagaagcctgtattataccttacttatttgctggtttactactatatcattggatataaaatattcttaaaagacagcagatctctgtttaaaacatactgtcagtggtatatggggctttaatgtcaaaataggaggcacctgggatggtgggagcaaaaattatattttgggatgagtaagagagccatgggatgaggtccacatggctgcacttcccagtggtagctttgtttacatggtttgttccagaggcaaggttaaagtgactggggtaataaagtttcaaggggagatgactgacttttgaagagtctaatggtgaacactgatcaaatctactccaagggacagagagaggatattagataaaatagaagggaatgagatttcattagggaccagtgaaaatatgcagtctttgcattaagtcagactgtccttgggaatcctcaagaagaggacagttagacatctatcctggcctcaagaagtgcagttctgtctgacagtagggctgggtggcaaggtctctggagggtttttcttgctctaagtcccaggcattcatgactggagtttcatttgcccattggaagcactgccttgctgatctttactctgcttcttctctttttagcctatgctgcctatctcctggcagcttgcatcttgaatttccagagggcactggccttgtttgtcatcacctgcttggtgatctttgtcctggttcactcgtttttgaaaaagctcctgggcaaaaaattaacaagatgtctgaagccctttgaaaactcccgcctgaggctttggacgaaatggtaagataagaatctcaatacctggcctcacagcttatcccagcccacctccttttttctcttttgatagttgctgagcaggctctcagacctgcacataggcttttcagaaccaaagcgcagagaaaaataacaataggcctctgagcacaggacctcagtccagattcttgtagccttgggtctcaacattgctggggggcaggaggagtttagtttcagagaagagttttagtctgattgtcatcagagccagtgtcagaaatgagaaaaatcatactcctcttcagtgaagtaatcagaacagagccttgcagctacattaagctatcaaattgatttggtggtcattggtgtctcccttagttccctgatactttttatgctttttttctctctagtctcctagacttcctgcacccactggtgccttttaaaattccttagagtttaaagagaaaacttacagtcgtgtatattctgaactggcgtctacagcagccacagctctaacaatggcacatgcatggcctttgatcacaggccaggagtgagagaataactttcagactctctgtaagttatttgtttttcattcactgggttgatgacatggtcttggcattccttcttcagggtgtttgcaggagtctccttggttggccttatactgtggttggctttagacacagcccaaaggccagagcagctgatcccctttgcaggaatctgcatgttcatccttatcctctttgcctgctccaaacaccacagcgcagtgagttttgggtatttgggttgggtatagcaacacatggccaagggccaagtgctaatcataaagcgtatgcatcaagtgttaattacaagggcatagaactagttcataacaacccctagaatttgcctctttgataattttgtttctaagataagtttaaaaaattctcaaaggccctagaccacttattttcaaactgtagattgtgatccattaatgaatcttgataccaattttgcgaatctaggccagtgttaaagaaagaacaaaagaaaaaaaataaggaaggagagaaaaatagaatacagtagaaaatcaacacgcagtgcagatagtactgttaaaatattgatttataaaacttttatttgtatgtatgcatgcatatatgtgtgtataagtgtcatctaacctctagacacattttttaaaaaccttatgaacatatgtggctttttgtatattactgccctgtttctccctaccattgcccctgctccctatgccatcagaccctagacttactgttaatattctaggttggttccacccagagtacatgtttaaaactccaaccaggtaatggactagcagaactcacattggaataatattcttattgatcctaggtgtcctggaggacagtgttttcgggcctaggtcttcaatttgtctttgggatcttggtcatcagaactgatcttggatatactgtatttcagtggctgggagagcaggtccaggtatgagaaattaaatgcgagggcttttctcttttagaaccctagagaaaggagatttgagaggagcatgagaagattaggctgtatcttgttaatgatgtggtggaagatctggttgggaaaggagagagtgtactaggatacagctaagaatatgaataaagagctcatggggacatagcctgcccctgggctgtcaaagggaggccaacctcagtagcaacagtaggtcctcaggacgcatggggctggtctcgtcttcctgtgtgtccttttgggtttcattcttattctctgtctttttctttttttcccttcagattttcctgaactacactgtggccggctccagttttgtctttggggatacactggtcaaggatgtctttgcttttcaggtgatacctattttatgggcaggaatgatggtctatggaggggtagaggaataaagcagaggatgaaagtgtgtgtccaagagatcagcgcacctgtataccagtttgaccctaacaagagggtttaaccccatcagtaaaggaaatggcatctatcttcttccctgtggtcattgccatcataaaattagatgaaatgagaattgggggaaaagggtcagaaaacagcttgtggtttagtactggtgggacaatgggtttaatacattttaaatgtatccctaaactagtttgtgtaggtactgaatacctacactgtatgagatacccttggaatgctaagagcttaacttagaagcctaaaacacagagtatgcaatgtaacatctcaccacctgctaccattctcattacaggccttaccaatcatcattttctttggatgtgtggtgtccattctctactacctgggccttgtgcaatgggtagttcagaaggtgagtcgttctcttacaccagtcaggagacaggccttcatcctgtcatcagtcagctttggaaaaatgcccatagctaaggtctagagtgttagaaacaatgggaaaaggcaggccctctcaagcatgcctgatagcaaactgtcagccgaggccctaggtaggctgagggcagagcagagagaagatgagctggactgcctttgatactgagttttaatatacttgttctaaaggcaacgagtcctgagttctggtcaaggctctgtttctaagttggtttttggccctaggcttgctgctctacttctctaggcctcagtttccttatcagtaaagtggaggaggaggagttttgcgagatgttctccaagattcctgctaacattaatggtttaggtttctgtattcttctaggtcgcctggtttttacaaatcactatgggcaccactgctacagagaccctggctgtggcaggaaacatctttgtgggtatggtaagcaccttgaggacttttggtcttcttccctctgaggaactgagaatttggcacaaaacaagagtatgctttccttctgaaaagtcaaataaatgaagactgtggggcagccaatcttggatgagagataactcagcagctcaaagaagactctgctcattgcgttcaccctttgcgcctaataatacttccctggtaatacttaatctggagggatagccttcaccacttctaatgaacacttcctacgtaggaatgtagggaatgtcctcgtccaattcatatcccctttcggaggctatgaagggtgtttgatcctcattctggtttctccctgtgactccctgcagtacttggtttccagggtctctaaggaggaaatcacttatcttgctcatcgctaacgcccaggctcttccccataatacttgcttggtacattcgtctgtatggagtaggtgctccatatgtgctactgactgatcagctcaatgttggggacaatgacttgtcacattcgcagggagttagtactgaggtctttctctcccaaggctctaggctgcttctgaaatgttctcagagtacttctggatactttaccatagcactccacattttgctgaaattatccataatcagcctagtttcctatgtgagactataagcttctaagagtaaggactttgccttacctatatcaatgtccttagcatctagtgcagtgctaggcacatagttggtacttgttaaataatagataccattatcttaggtcagtgctggatatggcttacatagatggcccttcataatttcataacattttcacaaacattatttcttttgatccataagcagggggtttggatcatctatttgtatttcatttaatgagtactgttgaagcatctaatatgttctcattaagtgcactgcattccgtaagttcagtaagtgtgtggctttagacattgagaatatacaaacaaaatataccatttctcttctataacattttaacatgtcaatagatgaaacaagcatgtatagaaacaggtgagaactatgccagccaggacatgattgggtgccagaggaagtaaggcagaagctggatgggcctgacagccgggctccgtgctcactaagtgaagctgtggctcacttaacagtgctcacactggatggatgtgtatctagtgggtccagcccctggggctggggtgggcacactggcatggggagttacaccttcttggaatctgactgttttctccgtgtttgtagacagaggcacctctgctcatccgtccctaccttggggacatgacactctctgaaatccatgcggtgatgactggagggtttgccaccatttctggcactgtgctgggagccttcatagcctttggggtaggcatagtctgcttgatcactcctgggtgaactcgagttgggtttgatagaaacactgatgcctaagtctggcgcctcacaggttgatgcatcatccctgatttctgcctctgtgatggccgccccttgtgctctcgcctcatcaaagctagcgtatccggaagtggaggagtccaagttcaagagtgaggagggggtaaagctgccccgtgggtgagtccaaggaggcatatactttgggagatggtgagctgtagttaagagtggcactgtggtggcagagacttcaagtctccctgagggggaataatgtgattccatattccttcttgcctatctctggtgcttgctaatcatgctggttttcttcatttaaccctcccacctggcactagcttctgcatgccagtaccctctgtccttgccatccatgcaattacatgacaattatatctgatattgcttcagagtaatttccactaatagggtcactgaggaacccctgtcaccttctacattggccttgcaccctcctcctgcacgatagggacagtgggatttctcttctctgaggggctgagactgctgtagacaccctactcttgccctctgcccaataaccacaggaaggagaggaatgtcctggaagctgccagcaacggagccgtagatgccataggccttgctactaatgtagcagccaacctgattgcctttttggctgtgttggccttcatcaatgctgccctctcctggctgggggaattggtggacatacaggggctcactttccaggtaaaggattacatttgttgggctgtccctctgggatgtggttaggtagcccttcaaacatgcatgtccaaatcaaaaccacaatgagataccatctcacaccagttagaatggcaatcattaaaaagtcaggaaacaacaggtgctggagaggatgtggagaaataggaacacttttacactgttggtaggactgtaaactagttcaactattgtggaagtcagtgtggtgactcctcagggatctagaactagaaataccatttgacccagccatcccattactgggtatatacccaaaggactataaatcatgctgctataaagacacatgcacacgtatgtttattgcggcactattcacattagcaaagacttggaaccaatccaaatgtccaacaatgatagactggattaagaaaatgtggcatatatacaccatggaatactatgcagccataaaaaatgatgagttcacgtcctttgtagggacatggatgaaattggaaatcatcattctcagtaaactattgcaaggacaaaaaaccaaacaccacatgttctcactcataggtgggaattgaacaatgggaacacatggacacaggaaagggaacatcacactctggggactgttgtggggtggggggaggggggagggatggcattaggagatatacctaatgctaaatgacgagttgatgggtgcagcacaccagcatgccacatgtatacatatgtaactaacctgcacattgtgcacatgtaccctaagacttaaagtataataataataaaaaaaaaacaaccatgcatgtccttctgacccacagtaagccaagagagagcatgaatagaagggtggaagagattgggccaaggctccagagaaggtccttggcacctgacctttgttatattagtccttccttttcctgtgatatctctctttcactcaggtcatctgctcctatctcctaaggcccatggttttcatgatgggtgtagagtggacagactgtccaatggtggctgagatggtgggaatcaagttcttcataaatgagtttgtggcttatcagcaactgtctcaatacaagaacaaacgtctctctggaatggaggagtggattgagggagagaaacagtggatttctgtaagtgacaatccaaaaagcataaacaccgtgaggtctcagccatggttatctgagggtagacagaaagtgccaaacaggtttgttgcagacctgcagatgcctttctggggtcgcaggcctaactacaaagcaagcagaacagcctacctagcagcctcatctgcagcgcctgagctattatgggtctgcatgctattttccccctgccacccccaccactgccccaactgtgacccaacttctctctgtaatgtaattgctgggtctttacagctggggcagtccagggcagacactatcttttgatggtctaaggtccccttcttcacttataagtttaaattgctccaaattaatattctttttctttccctttgcctctctcctcctccttcgcaatccttctcattcccaggccttctcgttattcatagccttcaacaggaacagcgttgggcaatgaggcccatggtggtttccatgtcattatccctatagtaactcagggaacagttgttttctgagcatcctttcatgttccttgggaaaccatggaaaagactgggggctgtcagtactctggaacttctattgtgattataagaccgcacgcatgggactgaatttatttgcttatttatttttgttttccctaggtgagagctgaaatcattacaacattttcactctgtggatttgccaatcttagttccataggaatcacacttggaggcttgagtgagttcatccattttcccagctccccagtaagacagccagatcccagcttctgtagtgggcagtcctggtgcttcagtacaagctgggatcagatagagaagccattgtgaaatgggcccatttcttaggctgcagttaacttggacctaaggcagtcatgcccacctggctaatgcatacagccctttataatctcaacttcagttacttctttttcctttggattggaggccccaaaaactaattttattttaattttctctatgaggaagaaaatataatgatattatttcaattttgccattaaattggaatagtgcatatataaataaagatatttatttatttatttatttaattttttttgaaacagagtctcactctgttgcgcaggctggagtgcagtggtgtgatctcagctcacttaaacctccacctcctgggtttaagtgattctcatgcctcagcctcccgagctgggattacaagtgtgtgccactatgcccattattattattattattttttttgtatttttagaagagacggggtttcaccatgttggccaagctggtcttgaattcctggcctcaagtgatctgctgccttggcctcccaaaatgttgggataacaggcgtgagccaccacacctggtcttgtattttattcagtagtgaagacactttttgaaattaggctgctcactagtcatcctcatggaaacacaaagaattaaaacaaataaaagcagcaggcacataaggcagatagacagtaagagagagtggtgtaaagtgttggatttaaatatgcaagtaccaaatgttaaaggagtgggtctttgaagcagacacagatatatttagactgttggagatactgctgcatgggggtgattgttggaggaataatatgaggaaagtggaattgtccttgagtgcaggggcacaggggtgactagcagatcccaagtttggaagatccaagttagaaatggatcttaggctggatgtggtggctcatgcctgtaatcccaacactttgggccaaggcaggaagattgcttgctataggagtttgagagcagcctggggcaacatggtgagattctgtctctacgaagaatttgaaagttagctgggcatatttgcacatatgcctgtagtcctatctactcgggaggctgaggtgggaggattgcttgaactcagatcgagcctccagtaagctgtgattgcaccactgcactccggcatgggtgacatggggaggtcctgtagaaagaaaaaaagaagaaaaggaaggaaggaaggaaggaaggaaggaaggaaggaaggaaggaaggaatcttagaaggagtagattataataagaaatatagctcagtgtgtccctttttaaaggcaattatattctggggtagagtcatttaattcatgtacttggtagccaatttaattgaaaggtgaaataattccctttcagtttaccttttccccttctgtcaaacacctgactgtattgttctagtcttgatgcctgattactgtccgattatgagactgccatctagtagtgggatatgcattgtgtggctaagtcttaggccacacaatgagtgttgctttccttagccctctgtctcaaaatagtccatctaattctggtccaggcttaagagtgcgtatctcaagcagtgaacgccaggcatttgtacctgtctggagaaacccagagccttgctttatccagatacatcttgggtatgttcacagaaccattaaagtgagggtcagacactcaatacttgatctgaggaaagtctaagttagtgatccctcaggactaatgtatacacacacttcttagggcaacactggccagtctcaggtggatggtaataaggatgctcttcatcggctgtgttttgtttctctgcgttcttctaagtgggggcccatgggatatacctgattgccttggtggggaaaagctgaagttattttattttattgtctgcagcatcaatagtacctcaccggaagagtgacttgtccaaggttgtggtcagggccctcttcacaggggcctgtgtatcccttatcagtgcctgtatggcaggtaggtgcctcagctctgatggagatactgctgcatgagggtgatggttggaggaataatatgaggaaggtagaattgtccttgagtacaggggcaacaaagattacttccctagatcatgacaggctgtctttcagaatattgatttacccatgcattccacagatacatggcaaaggcacctaatcaagagtgtccacaattcgtgccaaaagaataaagagccttgagaagcacgtgtcagatcttccccttagtacctctgtctcctttatccaggaatcctctatgtccccaggggagctgaagctgactgtgtctccttcccaaacacaagtttcaccaatagaacctatgagacctacatgtgctgcagagggctctttcagaggtgagcaccaggaccccattcctttctctcacacacggccctcaggtctccacggtaatgctgttgaggttgcatagagtgtataagggctgtgagtattggtaatggcctagatcagtgttcttttctcttattgggtgcatcttcattattagcttagtatgctccagcgacagggtctacctgtgttagtgggctactgagaagtagagcagcaaaggaagaagaaaaatggtttccctgataagaaattactctactggctgggcatggtggctcacacccacaatcccacactttgggaggccaaagtgggaggatggtttgagcccaggagttcgagacaagcctgggcaacatagcgagaccctgtctctattttatattaattaaaaaaaagaaattacttattgtgattggaatacaggtaggttatacgtagacttagcaatggttataagtggctaaaatattataggcttcttcagacagaaatgaagaaaactgagagaggataaagttgaatttataaaatcatgatgagttcaggtagtgtaaaaatgaacttgtttaccaaaatctagaatatgaaaagaagaggatatgtcattaagctaaaagaactagttttggaacacacaaaaggaaagatttgaggaactagaatgtttggtgccttcaaatcaaaaggtgtgtgtgtattggtggtgatatatgcgtgagtgaagggagttgtgggaaaaaaggctgagagatcataagaagccttgtatgaaatactaaagaatttaggttttgacctgctgaattctgaacactggcatgatcaactatgctgtttcaaaatatcattttggtagccatttgaatggcaaggagaccaacaaacaccctgctgtaatagtcctagtgagagatggtaagaattgatactaagtggttgtgaggttggagatacactagatccagtagaatcaataggattgatcattggctagataggaggaagaggtggggtgaagaagaggaaggagtctcaagtgactatctcttttccggcataagcaagtgggtctaaggagtgccattcattcacagaagaggaggactagtttcaggaatgggagtaaaagggagagattatggcttaattcagtttttgttttttatatttattgatttattgtattgagatggggtctcactatgttgctcaggcttgtcttgaactcctggactcaagggatcctcccatcttggcttcccaaaatgctgggattataggcctgagccatcatgcccagccttaattcagtttttgatgtgttaacttggaggtagttgcaggaccaccctgtgaaggtactcaaaagccacctcaggtcgggcttcaagagagaaatcagagctggagatagatttaaaagttatgggctagacacagtggctcacacctataatcccagcactttgggaggccaaggcaggaggatcacttaagctcaggagttcaagaccagcctgggcaacatggcgaaaccccatctctactaaaacaaaacaaaacaaaacaaaactagccaggcatggtggtgtgtgcctgtagtcccagctacctggggaggctgaggtggcaggatcacttcagcccaggaattagagactgtagtgagccgtgatccgtatcactgcagtccagtctgggtgacagggtgcaaacaaacaaacaaacaaataaagatttggaagttattaagtggtctgttcactacatagctagatattcaggtgctggctgcttaaaaggttactgggccaagtgaatgaatgttgcccctcctgtgtttggaggttatcatcagagaaggcaactaacatatttttttaaaaattcttttgatgcactattaaagatgaggtatgagctggattcatcattgctctggcatcgttttgattcttctttttttttttttttgagacacaggctcactctgttgccccggctggggtgcagtggcacaatcttggcccaggctcaagcaatcctcttacctcagcctcctgagtagctgggaccacaggccaggcatgtgtcaccatgcctggttaatttttactttttgtagacatgggcgttcatcatgttgcctgattcttatgttcttgtggcattttggtggattttctaaagccacatactgaagatcattgaaagacaacgtttttgtccaattaatttatactaattaagtgtaagctgttttcaagaggaaggtggccttggaataccaccttacttttcagaatcaattcaatactaaatcattataagccatacatttgcctcagggatatctggaaatttccaaatggactatggttaggagttgcgcaaaggaacagacacacatggtttatggtttcttgctagtattatcttgggaatgaatgagaaaagaaacataattgggttctatttggtcatggctgatgggtcaatttacaggtttttgtttttgttttcagctgcttagtataacttattgatatgttttgttgctttgttcctgtctgaccccttatgtacctctctggtttttcactgcagtacttctctgaatggcaccaaccctccttctttttctggtccctgggaagataaggagttcagtgctatggcccttactaactgctgtggattctacaacaataccgtctgtgcctaaggctgcttgatctatttctataacagttttgatcttaaaagctttgtgattgcaaaggtgtttatgtactcagggtgcccacaactcactcaccaagatgtttaacagtaagtaacagtaaatgtaaaagattcattttgggccgggctcagtggctcacgcctgtaatcccagcactttgggaggccgaggcgggcggatcacaaggtcaggagatcgagaccatcctggctaacacagtgaaaccccgtctctactaaaaatacaaaaaattagccgggagtggtgtcgggcgactgtagtcccagctactcgcgaggctgaggcaggagaatggcgtgaatccgggaggcggagcttgcagcgagccaagatcgcgccactgcactccagcctgggtgacagagcgagactctgtctcaaaaaaaaaaaaaaaaaaagattcattttggttcgctgtatcccaataacgaaaaatagcttttgtttttccattatttggctgaaccaaaaaatggcattcctcatgggccctgcctgaacttttatttgaaaaaataagtattactgtccaacaatgatagactggattaagaaaatgtggcacatatacaccatggaatactatgcagccataaaaaatgatgaactcatgtcctttgcagggacatggatgaaattggaaatcatcattctcagtaaactatcgcaaggacaaaaaaccaaacaccacatgttctcactcatagatgggaattgaacaatgagaacacatggacacaggaaggggaacatcacactctggggactgttgtggggtgaggggaagggggagggatagcattaggagatatacctaatgctaaatgacgagttaatgggtgcagcacactagcatggcacatgtatacatatgtaactaacctgcatattgtgcacatgtaccctaaaacttaaagtataataataataataaaagaaaaaacttcataaaataaagtgaagcacccaccaaaaaataaaataaaataaataaataaaagaaaaaataagtattactatgtcaaaaaagtcttacaaatcatgcttctagttgccatcttaaaaattatgtgatgcagtgtgctataaatgtgatttagtatgtaatttgcctgggacgggggagaagctacatttattggcattgtggatgagctggatttatattactgatgttacctttgaaaggtatatgaatatttaatgataagatttttctggttgtcaaacatttgtaaatctgcaaacttcttaacaacattacacagtaaacaaaaaatacttcctgtatactaaggaagacttctaaggaatatccatttcttaaaggccattacttcgttgtagtattctgctttagtgctagccacatttgctccaagtttatggggaagcctttaaaacagtaattttcagtgggaagggggccaattttgcttttcagaggacatctgacagtgtgtctccagacattattggtgattaaagtgggaggatgctactgacatctagtgagtagaggccaatattgctactaaaattcctataaccaaaggtcagctctcccacaacgaagaattacctggtcccaaacgtcaattgtgctgagactcagaaactctgattcaaaatattttagatatttattatatttaatattatttattatattaatattatagccctaaggaagggtttcaaaaggatacaggagttcctcaaaaagttaaacacagaattaccatagagccccacaattccactcctacatacacattcaaaagaatcaaaactaagttctcaaacaagtacatgtacatgcatgttcacagtagcactattcaaaatagccaaaaattggaaacagtctaaatgtccatcaatggataaattgtgttacatacacacaatggaattttattcacccattaaaaaaagaagtactgatttatgctatgtagaggcaccccgaaaacatgctaaacgaaagaagctagacacaaaagtcttattattgcatgattccatttagatgaaatattcagaatatataaatccatagagacagaagggagatggtggttgccagggcctggggaaggagggattagagagtgactccttaacgagtttggggttttcctttggggtgatgggaatgttttttttttttttttttttttttgagacggagtctcgctctgtcgcccaggctggagtgcagtggcgggatctcggctcactgcaagctccgcctcccgggttcacgccattctcctgcctcagcctcccaagtagctgggactacaggcgcccgccactacgcccggctaattttttgtatttttagtagagacggggtttcgccgttttagccgggatggtctcgatctcctgacctcgtgatccgcccgcctcggcctcccaaagtgctgggattacaggcgtgagccaccgcgcccggccgggaatgttttggaactagatagaggtggtggttgtgcaacattgtgaatattatgtcactgaattgttcactttaaaatggctgtttatgttatgtgaatttcacctcaataaaaaaaatttttagaaggattcaggtacttgtatcttcccttagctaatctacgtccttcaatttcccagttctctcagctcagaaccacttggtcgtcttctcagtctcgattcctatcttctctcccgttttccaaacttgacagaaaaaggaagcttcaataaattgtttcttgaactacagatgaattttactctatgcctggtttatttctgagaggcagcagaatgcaatggttagtggtattggacatgacgccagattacttgaattctgattcaagctctgccagttatcactaaggtgattttggacaagttccttaacttctctgtgccttggcatcctcatctataaaataaagatagtgagacccaccttataggtaaagacagtgacactgctgtaaggggattatctgttttctgttgctcataacggaatacgtgaaactgggtaatttataaagaaaaggagtttatgtcttaggaggctgagaagtccaaggtcaagaggccacacccggtgagagcttcttgccagtggggactctgcggagtgcaggggcagtgtaaggcatcgcatggtgagggggctcagtgtgctatctcaggtctcctcttataaagccaccagtccctctccgtgataacccattaactcatgaatggattggtccattccggacggcagagccctcatgacccaatcacctcttcaagaccccattctcaatattgccacactggggaacaggtttcaacatgagtttccgaggaggcattcaaatcacagcagggaacaaaacagtgactgctcgctccaagtctaatgtaaggttagctattactattagctgttactaatagcattactatacttactataataccatagttaatagtattatagattatagtagtaataataccattactatcatttaggaacctgagttcatggctatcgatttgttgagtaatgtatgaaattcagttcacacaaggaagcatgagagaaggggactctatctccgtccagggcgggggccaactttttaattcggtttttaaattctcaggttcctacttaaagtaaacctggcctaaactctccctcttagagggcttcgctgtaaatgcgggaagcatgccaatctcaacaccagtgtctgcagaacactgtcaaatgcaggagggaacaggaaaaacaggaactcactgtgtcctcgataaacgcgacggggcgagaggcgctcccaggcgagggcggaagtgatgtgagagggtgtagaccgccctggttgggtggaagggccagtcaatcctgggaggcccaaaacggggaccaatcgctcttgggctccgccctggaggcggggaaaacacgcccaccacgcgttgtgggcggtgccacggcgcacgcgcattcctcccacagctagtctatccgggtcctgatccgggactctgagatgaagagctgttggagcagaagagtcctgagagaaaaagacggaaaatcgtggaaaggcgctgtggaaaggagtagtgtggaaaggagaccgcggggatgaggagaggagagaggcaggctgcatcaccgaatgggcagcatgtcttaaagtacactgtttgtcttaaagtacaccgtaaagcctctcttgtgcctgttgtttagagcctgccctttttgcttaatgtgtatggacatctttctaggccagtacttatagagctacctcattcattttatttatttatttgtttgtttgagacagggtctggctctgttgcctaggctggagtgcagtagcacgatctgggctcactgcagcctccacatcccaggttcaagcaatccccctgccttagcctccacagttgctgggaccacaggcatgtgctaatttttttatgttttgtagagacagggtctcgctatgaacgtttgtgtctcctgaagttcatatgttgaaattctactcccccaggaggctgaacaagagggtaaagctcttataggagggattaggttattagggtgaaaccctcatgagtggaattagtgctcttattcaaaaggcctgagagaggtcccttgtcccttctgccatgtgaggttacagtgagatgatggctgtgagatgatgatgaggaactggccctcatcaaacaccagatcttctagtgccttgatcttggacttcctatttccacaactgtgagaaatgaatttcttttgtttaaaagacgcctagtcaaaggtattttatcacagtagcctgcacagactaagacaaatagtttctccatatctctaccataaatttcttatatttcttttcagtggcacctggctccatgtcctgtgtatgtctgactcccagaggccagaggtaggctcagaagggtggggttaggggatgggttaggtccagctggtagttgatgagggtggcctgagggatccagacaggaagctccatgccatgtttctggtataaggccaaagatcagaactgatggagccaaatctgttctcaggtaatggaagtgaggtaaatccaggaacggggggaactaggtaatcaaatcatgttgtttttgtttttgtttttgagatggggactcactctgttacccaggctggagtgcagtggtgccatctcagctcactgtaacctccaccttccaggctcaagtggtcctcccacctcagcctcctgagtagctgggaccacaggtgcatgccaccatgcctggctaatttttgtatttttggtagagacggaatttcgccatgttgcccaggctggtcttgaactcctgagctcaagcgatccatctgccttggccttccaaggccaccgcgtccggccatgtcatcaaatagtttcaacacaattgccagacactcatgataaatatctgtcatcaacaggaaagcatagttcaggaaattgattcaaaattacctaaataaaatatgttaccacttatattttcattagactgattaactttgatcagtttctgtttttaaaaactcagctcttgcttccagacaagcaaatggtgtatttctttcaagccccaaatttactttgtcactgtctcaaggttcatgcctctcacattcatcagtagatttcccttgactataaaaatcctttccataaattcgaagcaggaatcaaaacataatattgaagcagtttaacaaatatagagtgggaactttttttgctgaaatcatatttccacttgtcaagagctgttgttccatgaagggaggtaaacattacgactgtgacattgagtgcctcattaagaaaaatgggaggagagagccctgttttccatggcgacaagactcagatttgaattattcattaaatgaagaatatttctttatgattaaccaaactcagaggacagtgtcacaaatttcccacagaaaagatattcttcagacacttgacagttgagggctcctgtattcatggttttggaagcaaatgtatgactctgtgaatgggcaaactgtctttgaactatgtgactataatttatagaacaaaaaccagtatcaatttatttccttggtagatttcagagacaagctaaatatttaaaagaatgttttaggatggctagagaatggaagacattatcactagtcatatgtttataaaagcaaaacactccattgcataactctttgctgcctagatggtggtcgccattcttgtggactaactgaaagccatttgctgcctggctgccccatgctactgcagaccacagctcacggcactgttgagctgcttagatttggctgactgtgtcagcgtgtgcgactgagcacagtggcacttaacaaaggcttagaaggggtggggaacatgctcctaccagccatatcgtgtaagaatcacacacaaaaaattcactcaattactattcataataatagctaacatttactgagtgcctactaactgccaggcgttggatattacttgaccaaattctcacaaaaactctatgaggtatctcacagtcataaagccacagccacagcccctggtgctaacatgcccccatacacccccatacactgagtactgactcaggaggaaagactgaagcatattggccaaaatgggctgcagaggctctttcttcctgagaagctggctggaggagtgggtactaccacccagaagtgtgagagagttcatgtctagggtagggtaaaccttgaccactgagagacaggagacaaaaagaagccagcattgttcacccttcctcccgtgagaggcagtggcttcatatgtactccgtggagatgccctggaaggccaggcaaacatctctgttcgcagtgaagctatggccatcttggtagcacatctctttgtttttacatctcccctacctcacttcttttttctcgtcatactttcttccctgcaatttcaccaatcaataaagcatccatcacaaaaatgtgcatatttttgctctaagcttttcttgagactgtaggctcaaaaatgctagtaccaggagtagtctttaaaagcagacctttaaaagtgtgattttagagactagcccacctatctaaaggcaatcagaactgtttccccagtggtaaacaggatagtataaccctgccatgcaggggcatgcatgacaattactaaggctttcacctccagttgactgggatgaggtgcagatagaagataaggaattaggatattatgtggctgctgtatttgatcagtatgggagcaataataacggcacagagtggagaatagactggctgctcttgagagcattggaagtcttggaaaaagaaaatgatagttcaaagcagcatattgccaactaagtaacaatatgaaagccagaggagttctgtggcagccataaaggagactcatctcttgcagcagtaggttagacactgttgaaaacaatgagaacacttggacacagggtggggaacatcacacaccggggcctgtagtggggttgggggaggggggagggatagcattaggagatatacctaatgtaaatgatgagttaatgggttcagcacaccaacatggcacatgtaagcatatgtaacaaacctgcacattgtgcacatgtaccctagaacttaaagtataattttaaaaaatttaaaaaaattaggttcagggctgggtgcagtggctcacacctgtaatcccagcactttgggaggtcgaggtgggtggatcacctgaggtcaggagtttaagagcaacctggccaacatggcaaaaccctgtctctactaaaaatacaaaactagctgaacatgatggtgcacacctgtaatcccagctgttggggaggctgaggcaggagaatcacctgaaccgggagacagagattgcagtgagccaagattgtgccattgcaccccagcctgggctacaggagggaaactctgactcaaaaaaaaaaacaataaataaaaagaaaagaaaagaaattaggttcaggatccagaatggcaaagctgctaaaggtattgaatgcatagcttcaacagctttcccatgtggaggtattttccagaaaagaaaaatgtgaggcgttaagacctgaataagaaatatgtgagtggcagagtgaccagtgaacccaaggcatcagcatcacctgctagacatgcagagtctcaggcctcgccccagacccactgaatcagaatatgcatgttaacaagattccctggccgggcaccgtggctcacgcctgtaatctcagcactttgggaggcagaggcaggaggattgcttgagcctacaagttcagggccagcctgggcaacatagtggaccccgtctgtacaaaaaaattaaaaaaaaaaaatagccgggtgtgatcccagctgcttgggaggctgaggcaggaggatcgcttgaagccgggaggttggggctgcagtgagccatgatcatgccactgcactccagcctgggtgacagagcaagacgctatctcaaaaataaataaataaataaataaataaataaataaataaataaataaataaaatatgtgagtggatgagcctcaaaatctggagctcctaattgtccctaaatcttcctggccagcagaagcagtcccttttctttcttatttatttatttataatgctgtcagcaaaacccttttctcttgactaaggaaaacagcctccccttgcccatccaaaataggtcattgcagaataactttcgttcttcccaagataagcctccattctctgccttttttgcctccagtctggtaatctgtgccagagctcagcacagcctgagcagggaagtacaggtcctgctccagaaggagttagcctccattccaaaggaactgtaggacctggagaatatgtaagaactgaggactaaactctaatttttttatctgcccaaattcctacctaaggggtctagggagtcatgtcctacaaaccataaattctcatcagatgggttttgtttgaccctatatatcgtgacttacttttcaatcactctggcataacattgagacaaggaagaaatatttaaccccaaaatatatttccttgctataccttgaaattgccctacaaagtctcttgtgggaaaaatacatatcctgtagagaatccccttccccctttgttttctttcctttctttccagatccaggagataatcaactaagagccagacacccttttaggtctgataagaaacattttataacctgctctctctctgaagtctgctatctgcacaataaaacttggtctctccataatcctctttcttaacctgaacattcctttccattaatcccaggtcttcagataaactcaaccaattgtcaaccagaaaatgtttaaatctacctataccctgaagcccccggtttgagttgtcccaccattctgaaccaaaccaatgtattttattttattttctttctttcttttttttttttttttgagatggagttttgctctgtcacccaggctggagtgcagtggcgtgatcacagctcactgcagcctcagcctcctgggttcaagcgattctcctgcctcagcctcccaagtagctgggattacaggtgcacgccaccaagcctggctaatttttgtatatttagtagagctggggttttgccatgttggtcaggctggtctcaaactcctgacctcaggtgttctgcccgcctcagcctcccatagtgttgggattacaggcatgagccaccatgcccagcccaatatatttcttaaatgtatttgattgatgtatcatgcccccctaaaaatatataaaaccaagctgtaccccaaccaccttgggtacgtgttcttaggacctcctgagggctgtgtcacaggccatgatcactcatatttggctcagaataaacctcttaaaatattttacagagtttgactctttgtcaacagaatcagggtaatgtaggtgggagtagatcttgaaaatgtaagactggggagagagagagagtgagtgcataaaataaggttttataagagagaattcattacatgagggcatacattcatgagtggttatccagtgttttggcaagagcacttgaggtcactataaatagtttgttgtgctgtttccttgaagcttggacacaccagaaataatcttggcattgtactggagaagggatcaaaagtcataggaaaatgagaac

SEQ ID NO: 119 - DNA, 2458 bp, Homo sapiens
tccttcactgaggagccagagggaatcaattccacaagctgggttgaggagaacaggagatggagaaagcaagtggaagacagtccattgctctgtccacagtggagactggcacagtgaacctggggctggagctcatggaaaaagaagtagagcctgagggaagcaagaggactgacgcacaaggacacagcctgggggatggactgggcccttccacttaccagaggaggagtcggtggcctttcagcaaagcaagaagtttctgcaaaacacacgccagattgttcaagaagatcctgttgggcctgttgtgtttggcctatgctgcctatctcctggcagcttgcatcttgaatttccagagggcactggccttgtttgtcatcacctgcttggtgatctttgtcctggttcactcgtttttgaaaaagctcctgggcaaaaaattaacaagatgtctgaagccctttgaaaactcccgcctgaggctttggacgaaatgggtgtttgcaggagtctccttggttggccttatactgtggttggctttagacacagcccaaaggccagagcagctgatcccctttgcaggaatctgcatgttcatccttatcctctttgcctgctccaaacaccacagcgcagtgtcctggaggacagtgttttcgggcctaggtcttcaatttgtctttgggatcttggtcatcagaactgatcttggatatactgtatttcagtggctgggagagcaggtccagattttcctgaactacactgtggccggctccagttttgtctttggggatacactggtcaaggatgtctttgcttttcaggccttaccaatcatcattttctttggatgtgtggtgtccattctctactacctgggccttgtgcaatgggtagttcagaaggtcgcctggtttttacaaatcactatgggcaccactgctacagagaccctggctgtggcaggaaacatctttgtgggtatgacagaggcacctctgctcatccgtccctaccttggggacatgacactctctgaaatccatgcggtgatgactggagggtttgccaccatttctggcactgtgctgggagccttcatagcctttggggttgatgcatcatccctgatttctgcctctgtgatggccgccccttgtgctctcgcctcatcaaagctagcgtatccggaagtggaggagtccaagttcaagagtgaggagggggtaaagctgccccgtgggaaggagaggaatgtcctggaagctgccagcaacggagccgtagatgccataggccttgctactaatgtagcagccaacctgattgcctttttggctgtgttggccttcatcaatgctgccctctcctggctgggggaattggtggacatacaggggctcactttccaggtcatctgctcctatctcctaaggcccatggttttcatgatgggtgtagagtggacagactgtccaatggtggctgagatggtgggaatcaagttcttcataaatgagtttgtggcttatcagcaactgtctcaatacaagaacaaacgtctctctggaatggaggagtggattgagggagagaaacagtggatttctgtgagagctgaaatcattacaacattttcactctgtggatttgccaatcttagttccataggaatcacacttggaggcttgacatcaatagtacctcaccggaagagtgacttgtccaaggttgtggtcagggccctcttcacaggggcctgtgtatcccttatcagtgcctgtatggcaggaatcctctatgtccccaggggagctgaagctgactgtgtctccttcccaaacacaagtttcaccaatagaacctatgagacctacatgtgctgcagagggctctttcagagtacttctctgaatggcaccaaccctccttctttttctggtccctgggaagataaggagttcagtgctatggcccttactaactgctgtggattctacaacaataccgtctgtgcctaaggctgcttgatctatttctataacagttttgatcttaaaagctttgtgattgcaaaggtgtttatgtactcagggtgcccacaactcactcaccaagatgtttaacagtaagtaacagtaaatgtaaaagattcattttgggccgggctcagtggctcacgcctgtaatcccagcactttgggaggccgaggcgggcggatcacaaggtcaggagatcgagaccatcctggctaacacagtgaaaccccgtctctactaaaaatacaaaaaattagccgggagtggtgtcgggcgactgtagtcccagctactcgcgaggctgaggcaggagaatggcgtgaatccgggaggcggagcttgcagcgagccaagatcgcgccactgcactccagcctgggtgacagagcgagactctgtctca

SEQ ID NO: 120 - protein, 658 aa, Homo sapiens [sequence omitted]

SEQ ID NO: 121 - DNA, 38692 bp, Mus musculus
atgtgaagttggtcatcctaggaggcataaaagagagaggatgggaggaaaagaattagagattttatacacacacacacacatatgtatttgtgtgtaaatatataagacattggtatatatattatatacattatagacagattatatatgatatataatatatgtattttatatagggaaggtatatacaacatagagatttttatgatatatatattatatgtaatatatgcatagttatatgatatattatatgtaatatatggagagattatatatggtatatatgctaaatactatatatattatatagagagaattttttttttttttgttaatcaagacatagtctcaatatatagctctgcttggcccagaactcttttgtagattttggcttaaagagatccacctatctctgccaactgaatgctgggattaatcaccaggttcggtgagtatgggtggagttttttttttttaaataattgtgtatttgttgagcttatagtataattgcatcatctcccattatccttttctcatgccaaaacctttcgtgtatccattttctgcaaataagcaataccctacctgtccttggctcggaagtttaactgtagagataaacttaacaaatgtgttagggaggtgaagagatggctgttcttccagaagcccagagttcagttcccagcgcccacaagggggctcacagccagcggggattcctgtcccagcagatgtgatgtgatgctctctgctggccacctccagtactgcatgactatggtacacagacatacgtgtagacaaaacactcacagtcaatatttttgttaaagaatagttttaatctatagaacgccttgagaactgtggaggcagcatgcggtcttcatcctctgagcgtctctctcaacgcagatgcacctgtgtgatgaattgttagagctccagagtattttttttttaacatttcctcgttttcccccaatattatatgagtctatccaggacttattcctgtgtctccttagactcttccagaatgtttccatgaccttccttttcttcctgatagccttggtcacttaaaatttacatttatttatttatttatttatttatttatttatttattgtgtgtgtctgtgggggtacatgtattctagggtgcacaagtagaggtcagaggacagtttgtgggaatccattctctctttcatttccactgtgtgagctccagggcttaaactcaggttatcaagtttgtttgtttgtttgtttgtttgtttgttgagacagggtttctctgtgtagccctggctgtcctggaactcactctgtagaccaggctggcctcgaactcagaaatccgcctgcctctgcctcccaagtgctgggattaaaagtgtgtgctaccatgctgggttatgtcatcaagtcttgttggcaagtgtcttcatccacggagctatctctctggcctgactttgataattttggagagtgtaagttaggtgctttctaggttatttgttaactggggtccacataatgtttttcatggttaaaaatgggatataaatttttgcgaggtagaccaggggcggtgaatgcactattacaagaggtagcttgaaaactttgtgctaggtggtactggggctaaaggacaagtgttaggagaagtttgagaccccgtacaacactctagtcacactaactctacctgaggggcatccaagtgatgtggaagagcactgatctccacaaaccaaggaaggaaagggaagaagaggtaaacctgggcttcgatgggcttcctcttagagcagtgtccagcctttgctgacaccggctctgggtacaggggtgagtcttcaactttttctgttttccactttgttcttattggcctcttgaggtgtttattatattccaggaaccaaggtcaccaacggaacagagagaacacaacacttacgcaggggtgtgcagtttcaaagcagtgagatcaagccggggtagtctgtcttcacagaagatcagcgtgcctcagagtgtccattgtggtctccgatctgcagatgtattaaagggaggtgggaaaaggggaagggacttgtttggggacacaactggcaagtgacaaagtaagacctagacttgaggcaagtgtaaatcaagcttagagtccttgccaccactggaaagatgctcaagtctgccatacatatttactagtgtgtgctagggagtatctacttggtgagtgttctcagccctcaggtatgaggcctggagtctgttctctgtccttcctgctattaatgcacacagacaaaccagttagtcactgagaacgacactaagtccctttctgacatacggatgagagtgagcttattactgtatttttcttggaaaatggtttttccataagcattaagaaacttacatcttgggctagagcgatggctcagtggttaagaacactgactgctcttccagaggttccaagttcaattcccagcaaccacatggtggctcacaaccatctgcgatgggatccaagtccctcttctggtgtgtttgaagacagctatagtgtactcatgtacacaaaataaatagataaattaagaaaagagaaagaaacttacatctcagccaggcagtggtggtgcacgcctttaatcccagcacttgggaggcagaggcaggtggatctctgtgagtttgaggtcagcctggtctacagagtgagtgccaggatagccaaggctacacagagaaatcctgttttgaaataacaaaaccaaaagagaaaaacaaaacagaaaagtaagaaaaaaatctttacatttttcatttctgaacacatctactctgggaactatgggctaatgaataaatataaaacagaggagatgtttgtattttaacaatatatgaagaacagctacaagtcaatcatgtgaagataaaacagacacacagctcaagactaactaaggactatataggaagggcctatacaggaggagaaaatatcattgatcatcagaaaacacaaattcaatccacaataagatatcgcttcatgcccactggagagtttaagatgtaacactgtgaagtgtccatacgactgtggaaaacatttcctttttatgcagttatggggataaaatccagggcctcacacatgtgtggcaagcacactgagccctgcaagtgggccctgatcctcctgcctcagcctctccagagctgggattaccagtgtgtgccaccatgtctagttcctggaactcttgcacacagctaacgatacactaggctcaccattctttgcatatgttgcagagtagtacagttactttggaaaacatttggtagtttacaataaaggttaaatatgtgcccactctctggccagcaattcatttcaggtgtgtatgttcaaggacgtacatcgacttttattaaacctgaactcagaatattcgaggcaggaaaaatccatgcgtccactaatgagaattgtatgtacacactgtggaatattatgtaggattaaaagtagcagtcttgccgggcgtgggcctttaatcccagttctcgggaggcagaggcaggcggatttctgagttcgaggccagcctggtctacaaagtgagttccaggacagccagggctatacagagaaaccctgtctcaacccccccgcccctcaaaaaagtagcagtctttcaagccaggcaacacaaattagcctcagcaatgtgttaagtataagaactatggataaaaatttatatagaatgtgattctatggatctgaaattttagcagtgacaaagtgggtgtgaagtgggagaaagcaggacgtctttaggactggggtcataggactggtgatgatggaacacagcaggaaatgacgtaagggcaatggaaacactaagtttgttattgggaaaagaaacttaagtatgtatttgcttgccgaagctcatcagatggtacactatactctgtgcatttggctgaggtcaatcattcattctgacagaagcatcgaacacgacttatggtaaatgcttccgagagtccctgccttgacccaagtctttcttgggggtaacatgtggttctaactgacagatgcttgattttcggtgagacttcttttaggtcagtgattctcaaccttcctactgctgcgactccttaatatggatctcatggtgtagtgaacgcctccatgcaattatttttgttgctgtgtcataactgtaattttgctactgttataaatgtaatgtaagatataaagtaaacatctgtgtttttacaatgcatggtcttaggcgacccttgtgaaaaaattgtttggccctcaagggagtcgtgactcacaggttgagaaatgttgttttaggtcttgccgggcttccaaaaatcagctaactgtgacaagctcgtgctccttccactaaagactcaattaaatgaaatgttctcccaagtccatgagggacttctggaaaggcccaggtagatttcatcataggttgtatctggagtggcttttggtgggggtgggaaggcattcgagctcccccagtgtgggctgccccatccaactcctcccatagaagcagagcttgtctgtctctgtccaagattctggttcccatctcccctgagacccaagcacccctgtggatgctctgctttgggagagaagcgcacctgtcccagcctacaaagatcatagcccggaaaggctcgccttctggaaaaaagtcaaaagtgtaaatcaggaatggctcaatcgtgggaagcccggacaaggagtggctgacctggaagagtcctctgtgtgggaagagactttggttatcagtgaggacttagaacaaacttgactgttcctgttttaacctcttgccgcttcctccattgtctttctcactcagcttagcggaagtgttttcaccagcgtgagggcgtggtgtgtgtgtgtgcatacttggtgtgcatgtatgatgtgtgtgtgcatgtgtgatgtatgtgtgtgatatgtgtggtgtgtctgtgtgtacacacttggtgagcatgtatgatatgtgtgtgtatgcatgtgtggtatgatgtgtgcatacacgtgtgaatgatttgtgtgtgtggtgtgtgtgtgtgtgatgtctgtatgcggtgtatatgttctctccttccaatgactctggccactaacttttgacctcagtgtctgcaggaatgagcagatctggagaggaagatgaccttctatgggtgtgatctcccattcattccttcattcaacatattttctaccatttttaaagaacaatatttttattgattctttgggaatttcacatcttgcacccctatcatattcatacccaagccctcccatgctggccccccaactcttatggaacccccctcaccttccctccccccaaaaaagaagaaaagaaaggagaaataaaagaccaagtccaattagagttatccatatccttctggagcatggttaaactctcagcggcttgtcccttaaatagagctgagacctccccctcctgcacccctgccagaagccatcgattgtggagagctaacttcaacatccctatcacatttttttcttgtttgtttgtttgtttttgagacagggtttctctgtgtagatctggctgtcctggaactcactctgtagaccaggctggcctcgaactcagaaatccgcctgcctctgcctcccaagtgctgggattaaaggtgtgtgccaccacgcctggtccaatcacactttttaaagtgttctctttgatggcttcctgttcaggctgctactcttttgggggtagggtgaggctcagagttggggtgggggtaggggtagtcacagaagcttccatgtcccttttattcaactatctgtcttccatcagcaaaaggagcttccttgctcttcatggttagtgggagcatggtcacgggctggtgacagcacagaccacagacacagcccttggcttctcacatcaatatagcccttgaccatggacatccaagtggccttcggtgtcaacctagacatcaacacagaccaagggttcagacacggcccctggaggcagcccagatgtggacatcaccatgaactcaggagcagggcaggtcactcacatcagcctggtccccatggctgttgtgtctccagttccacatctctctgcacgtaccactctgtttttctctttttcttgtctttccaccacatatttattcattgtagtggtgcccactgtctgcactgtgaggcagggtggcctagctggcttccgccaccagcgccttagggcaggtggccttcttattttctacctttaagtttattgaacactgggtgtcagtcttgcttcttgtagctaaagtaaaaaaaaaaaatgagtggagtggacctttgtgttggggatagcataccaatgacagagactgcctgcagcaggccaggatggacacatctcacaagctccttgttaaaaaaaaaagaaagaaaagaaaaaggttgttcccatttctcctaaccttagccccagacaacagttgtattgattttatttgtccgtgactgcttttcagttggccttggtgtgcataattattctattatatctgactttcttacttctttcttctgctctggtgaatgctgtgaatctagatgttccttgagtaatgattcttaaacaattaaaatttgaggcatggggcacagtcctaggtgtaggctgtgtgttctcatcttggaaacaatgcaataactgcacaatggtagttccagattaatgtttgacttgcaaggaaagtttgaagaaatcatgtttagaaatattagaaaatgtaacagaaccacgtactgctagagtcgtatagagtccatcaccagaaagtgaaggaatttataggaattatgaaaaagcataagtacaagagacacaatcatgacataagggaacacaaacacaggatactttaattcagaaaggaaaaatactattgaagttataaaatgagttttgcacatttgagagtggttcttggataagcaagtatagactatacaaaatctcctactagtaaaatgaagtcacaacactgggactcttagaagagtcattgtgtgcaatgtgcagaagcagaagccagcagaacggctgagttaagggttaacttgattctttcgggccactgcctggcagctttgcccatgtcatttatcattagagcttcacaggaaaacacatatagctgacctcggagctctgaagtgtaataagtcaaaacttaaagtgtaaataatgataagtttgcaattattattattttggccacaggcctgggaatagggaaagcttgaagctttggggagcaattgtaattcttgattctttgtgggatgtggatattctttggaatttgatttggcaatgattattctaagcctttttcctacctacttttggagtatcattaaaagactggggcaagttaaaggagagagaatgaatgaagagaaaaactgtggagagagtgtggagagtgcgaggagagagaatgtgtgtgaggacagagtgtatgtggagtgtgtatgtggaagaagaaggagaagaagaggaagaggtagaggaagaggaagaagaggaagaggaagaagaagaggaggaggaagaagaagaagaacaacaacaacaacattatttggagtgagagtgtgagaaagggagcgaacgagagagcacaacccccagcccaaggagggagcaaaagtatgtgcagcttcaagctaagagagagagagagagagagagagagagagagagagagagagagagagagagaactttaagccttgaaaaattgcctgccagtttgtacctgaaaagttgtctgtgtgtgtttattgtgcaccttgaagatatgcctgcttccagctgagaactccgatcccctacacctttgtgttctcgggaactcccatcctcagccattgactaagtactgcatactggtgtgtactaggtttctgagaatatagaggtgaagaaggcttgtaaaactcctgattttaagggcatcttagtctagtacaggggaatgcacgttaatggggaatgtatagctctgagcaaaacacaagcgaaagttcgaggaagaccagagaatcacccagcacagaaaaggaaatgagaagccaagagacacaaactagatttcaagggattgggcttcaacctttttgtgtctgaatcactttctaattcttatggactcatctgaaaatctcacatagcacttgatccttcgttcctgagatttagggatctgggaggaactctggaacccatctaaagaaggttctgtcagagacaggagcgatggctcaacggttaagggtgagaactgtgtttgcagaggactaacacttggtctccagaactcacactgggtgacccacagggtgaccctcaattgcttgcaaccccaccccaggggagctggcaccctctttctgaaccccacgggcaccacactcatgtgcacacatatctcacacaggtatacacatattaaaaataaaaacatcctaaaacagaagatctggcaaagggatagagccttagaactgagaaggagcagagattgtgataatgttgctgtttcagaagaagacttcctgtcctctaagaagcaagcctggggctggaggtgggggcatagaccaacgatcataagggctcactctcattggcaggttggtggccctgattggctaagggggtacagacagaactcccaggagtgcccagggatgccattgctgggacaggcttcatctttagctaaccccacagaagtctttgtttagataggtaagttgaggctcacaatggggcaatacccaggtaagacaacagcgtccctaatgttcagatctcggggatgccagttaaaggaggatgttgggttccctaggattggaataatagatggttgtaaacaagcatgtgggtgtgggggattgaaccttggtcctctggaagagcagccagggctctgagccactgagccatctctccagtctctctgtagtagctttgttcttaaagaagggagggagtccttgcaacacttcctaatcccttagtgcagacatgattggctgtggtgaaacctattttgatatctctgtcctccccgaggcaggtcctactggcacacccttctctgctctggaggtttaaacaaacagccagctggcatgagtggttcccatggtaatttgtaatcactttatgttctatttgttacaacacgtaagatttatgtttctgaaaaatgcatgctgatctcggtataacctgcttgcttgttaacactctcctcgttttcaagtcaacagagacaaatacttttttcttttttctttttgatgagtgttaggagggtcgggacttcgaaaagacaattagagtaagcacttgaaaggacagccaataaactttaagaacaaggagactcaagataagttagttgctagcagcctaattctaattttataacacttgaggggctaggagtactaacttacacacacacacacacacacttagaataaaaggttgttaccatctatacaagaagatgtttggcattggttatgcgcccatggcactgcttagaagaagccagaagatgaccacagttactggttgcattgccaggggaagtgggttggctaacagggagattgcattttcctgagggcagttctctggctgtgttgccccaaccggaggaagtggtgaggcaagagcttagagcatcctgtggccatttgttatccttttgttattaatgatctggaagcaccagaggccagtttgggatgccaaacccctacctaaccagaagaagagaagaaaggccactgccgaggtcacttccagtacttggaggtaagggatgcaagggaaggcatgcatttcaactgtgaagagttccccacccccctctgagaatcagtgggaagtcacctgcctagtcatgccgggaaggcaactgcctggcacttctattttcaacagtttcgttcaccatccatctctctctttaacttaaacagaatttatcacttctttaaaatgtgtatgagagttttgccctcagaggtcagaagaaggcatcaggtcccctgggattgaagttacagttaatcaccgtatgagtgcagggaactgaagcagagtccttggtatgcttcacgagtaatgagtactcctaactgcggagccatctctcatcatctctatggttcggttcgccccatgccctatggttgtgatgcaggagaaacttgaagcatcaaaattgaagccataagaaaaatcaccaataaacttgtctaggaaatattgctatgcaaagtagaattacctttgttttggctcaagactgtgagaggataacttagagttaagcctgaatcgcagccctccctagcttcaaggggtctggacaatgatttttaacattcttatctctactacagagatgtggttgaaatgggtgttttgtgaattaatatataaattctgccacaatctttgcttttcattgaagttatgattttgtgccagcagtaatggtaatattgtaatgataatatcataaaacatttacttattgtaaaacaatattattcacagtcctattttcagctttacactacaaattgccccatgtaatgttatcaattcattcttttaattctccctttgcccaaagttgtgagtcgactatggcaaaaaactaattaaacactactcttaaaatgtctgcaacctgtcatctatttagcttttctttatccagtacatttaatgatcttcggatacaatcaaggcccagggcaaagatttgcaagtcttgctctttacttaaaactagaatgatgtttatctttcagggaaataatatgtttgtctaaagaattgtgggcatgagtcatttcaagtgtattttaggggaagagagaggaaaatctcaaacgtagatgatgaaagctgcagccagcgtggagcctttcttcccattgtcctgagcctccttttcttagccatgaaaactcttgttttggagttctctgacatggtcttgccctggtgatgatagccttcctccatctccctaggttctggttcttgaacaaagtgatttctttcctaccagctctcatctcctaaggatgcattcattggctttcaaatatcgaactaatgaactcaggtccagtgccttgcaggcataccaagtacattgggaatggatgtgagatttctacatagagtcaagctgagtcttaagtctttttagaagttgtctagaaagtgctttgtatacccactgatgtctgtatttctttctttcctagtggccgatctttcataagactttattggtatgaagtgaaattcgtgttgtacataacttcgttgcccatgatctggggtgggatgtggaggacagggggatgagggaagaagtgtgagcaaggtaccaggatctgtggccttccttccttagcatgtggaaggagagggtagagggatgcttcggtcacttttcctgttgtgataaaacatcctacaaaaacatctaaagagacaaaaggtttcttgtggctcacaggtaagggttagtccttcctgttggggaagtcgaggcagtagaataggaagcagctgatcatgttgcagccatagtcaagaaatggaagaacggctgggcggcggtggcgcacgcctttaatcccagcacttgggaggcagaggcaggcggatttctgagttcgaggccagcctggtctacaaagtgagttccaagacagccaggactacacagagaaaccctgtcttgaaaagacaaacaaacaaacaaacaaacaaaaaaaaaaaaaaaagaaagaaagaaaaagaaagagagaaatgggagaatgggtgttgttcattcattttctccgcttgtatactgtgtcacccggggaatcattccccctcgttttaagatgggtcttctgaagtcagttaacgtaattaagatagtccctgatatttatgcccagaggtcaactaatcccctgtaggcgtgcagggggcaagtccagatcttgtcaaatagtcaccacgatcacagccagagtccttgtctatttgacaacagaacacgccacttttgaaccgtaattcaccatctcttgatttcataggctcgtgaaaaatgcattcagtcaaatatacagagagattatagccatcaacaatttaaaagtcccaagtctcttaaatgtgagcacctctaaaataaagataaattacagactcccaacatttagtggcatggaataaacatcctcactccaaaatggagagatctgggtgtggcaaagagcaattggaacaaagcaagcacggaatcctgctacttcctgtctaaatggggcctcctttcaggggctctgacaccgcagcacattgcctggcccggccttctctttgaactatggagcgggccaccaagactcctcagtcttgcgtgcatagtgtcttcatagccgatgctacgtggacaattctgccaggttttgctcccagcttgaattgtggactgccgtcctcgcatcagtttctgtgtgctgtgtctagggaaccgccttcctaggcagatgcttggaggagcaagacgctactcaccttaggctattttcctttcaaacaatttggagctttgaaggttagggcctccaaacggtgaacatttgttctcgagacacatttttctcccctcattttttactagttgaggatttaaagcaaaatggatttgatcctttgcactccccccaccccagttctccccagaatcatccttacccattcacttaattttgcattctcttcttaacgcccctccccccgaaaccttaagtacattttgtgccgcccataaacgattggatgtgttattttccattggagtatggtcaacttaccaggggcctctcctttaagaataatgattctctcttttagcggctattggttgccggtagctccttccctagggagtgagactttggtcccatcttcggttaccattctgggatttatctgccttgatattgtgcaggtcttacacacgctgtcataagtactctgagtccgtacgtacagctagagaatgacagttaactagctccttacttaccccaaggcagtcaaagtccaccactgtgttagttcattagtcaactcaactagtggttgactcaaggacttctagaccttttatttaaaaaggcaaacaggtttgccttactcataggattcatgttaaacaatgtaactttttactattcctttatcttttttaaaaaaatatttatttatttatttttactatccctttatctaaaggaagtcactttacaagcgactgtttccagtaatcaaccacctgtgtctcgttggtggtaaataattgaataggaaaaagatataagacttatgtaaggcctgcggatacagaagcctaagttatgaggacttagggaagtgctttaggatctaggaaggtattttaaggttggtgaaggcaagtgaaaacctaaatggtggtcagaagtcgaattaacctatataaaagaagtgacaacttaaggagaaaactagtcatgcaattgggagcattacagacgtcctcttgagttgctcttctaagttggcaggtgtttcctgttggtaaatatcctccagagagttctatttaaaattgagctattaataaaagtgggtgcccctgtcaaaaaaaaaaaaaaaaagaagtgataaacgcatctggtttcttcccctcactgtgctattgttctcttggattgagacttctaagttcagagtcctaacactgaccgatggagcgttgataaattattgatttaattctggtaaagcctttcactatttgatccactatcatggtctcgagttcaatattttaaatttcctttggttgtcttttttctttaaacaatttttttattagatattttcatcatttacatttcaaatgctatcccaaaagttccctatactccccacccccaccctgctccccaacccacccactcccacttcctggccctgggattcccctggactggggcatataatttttgcaagaccaagggcctctcctcccaatgatggctgactaggccaccttctgctacatatgcagctagagacatgaactctgggggtactggttagttcatattgttattcctcctatagggttacagaccccttcagctccttgggtactttctctagctcctctattgggggtcctgtgttccatccagatgactgtgagcatccatttcagtatttgccaggcactggcatagcctcacaagggacagctatatcagggtcatgtcagcaaaattttgctggcatatgcaatagtgtctgtgtttggtggctgattatgggatggatccccgggtggggtagtctctggatggtccttccttccatctcagctctgaactttgtctctgtaactccttccatgggtattttgttccccattctaaggaggaacgaagactcacatgatatgcactcactgataagtggatattagcctagaagcttagaatacccgagatacaatttgcaaaacacatgaaactcaagtagaaggaagaccaaagtgtggttgtcttttaagtacagacttaaaagtgtttcttcctgtgctaaatctatatatacccagtatacccagtgttctggaaagagggaagaagcccctttttcatgatctgtagtcacactgacaagccagatcaagcaagctttttgccctcctgccccgtagaaggttccggttgggcctgagctcacctcagagagcgttcatgcttttcactcaagaccgttaacccagaaaagatgtgtgtctactgcctttttttacaatgtggatttcagtatagattacaaacagtggtgctgctaacacgtctaaaatgtatctttttgtaaacttcgaaagcttacttgtaagcttcagagaatccacttgagcccacttctcaagggtcaaatggactccagagaagcacccctgtcaatcaacagtccacgtttcccacttcatgccattccagagggagaattccttcccctgtccctggttctgggactcaagtttcaaatgtgcccttatttatttatttattttttctccttaacctgcttaactttatcctctgctgcaaatgtagacctgttccaacatcctgccaagtccaggtgcttactcaaattctgcatccaggacagctacaaagcagacatacactctggtccaccctcacagacggtttcaaccggaagcactgaagtagccagctctcgggagacttggccagcatcctagttttcttagggtccccaaagacatcacccccagtcagcaggaagtagtctaaagaacacagtgacctcactcctgcctgccatcaccccttccaagtttctcattcttaattaaatttttaattaaacagaaagggaggaatgttagcttacagaagattttggctcctccccagggccctagcaacggcttatgtcatcttctaccactgctgccgaagccaggtgtggactgcctataaaaggacttcccgccatcccagttctctctctctctctctctctctctctctctctctctctctctctctctctctctgtgtgtgtgtgtgtatgtgtgtgtcaattccccaccctttctctcctgccccttctctctctgccctcttggttcacttactacctctatcctttcccaggtcctcatgcctctcccttcatccaataaactcccctttataccagatctgttgtttggtgtaatttctcaggggtacaccttagcatgggccggccaggtgcccccttgctccgtcatatttcataacaatgaggaatcagttcaacatggagaaaggaatttttactcccctgatagacttattcatacgggctagcttccatagtgccagaaggtgctgtgcccaagttcagactgggagctacgcaacaactggcctagcaagccatgcccacaggtttactaatagtggcacgcggatgtcatgggagtaccaagactttttcattggatttaaagcatcttccatatggggtaaataaagtggctctcataggctcataatcttaaatatttgatacagaattggtggagctgttgggaagatattgtggtgcttttgggggtgtggtgggagtgggggtgtccccatttgtggcttgtgcctgttgttctgccccagctccagctcccagctttattgctcaaacgtcacatttcttatacaaaaagctattagcataatgggagataaaccccaccccccatggcaatgtgcctttctttggggaaggtgaggaagtgacaaacatttacatatcctgctagcctggcaccacaggcacagcaattaacaattgagaatggaaggacacccctccatagccagtcaatagtgtctgtgtaggttacaccagccaaaggattaggaggtatatatggccttgttggagaagctgggtcattgaggatggcggtttgaggtttcaaaaccccacactatccccagtgagccttctgtctctctttgactcctgcgttcagatcagatggaagctctcagctgttgctccggtgccacacctgcctgcctgcctgatgttccaggccacacctgcctacctgcttgcctgccaccatgctccctgacacagtgattacggactctaactttctggaaccatgagccccagtaaatggtttccttttttaatgctttggtcatgttatcttatcatgtcaatagaaaagtgactaagacatctcataatttgataccaatatttgacaaagttcttggggccaagaacacatgactagataggataaaggtcctaggaccctttccttattggtttactacagcccagggtgtttctctccagtggcgtttatgtctgggacaattacatttggcttcgcagcacaagtctgacagctctgctctcctggcactggagaggccgagagatggttaccttctcctagtttaatgtaaaaaataaatctatttttcctcccctgcccctgctcccaaaatgatgactctgaagttaattatttattaataaatgcctaagccacaagctttggcttattccccgactagctcataacttatgcaatcattcaaactattttatatcttctacatggttagttacctctcctcagcatcatgtgtccatgtctggggtgaatctcctctccattctatctcgagttcagctacttggctggtttacatcggtctccctagcattcctgactaagattatggagttaggcagtgataaggaaaagctctagagggctggagagatggctcagaggttaagagcactggctacccttccagaggtcctgagttcaattcccagcacccacatggtggcttgcaatcatctatagtgaaatcttgggacctcttgtggcatgcagatgtacatgcagatactcatacgttaaataaaaaacttttaaaaaagaaaaagaaaaagaaaagctctggactctacaaatagacagttgtaatggttacctggaccgagtaatgttttttgagatgcaataatttgagttggcagatatctttttgtgagtgtgagtgtgtgtctgtgtgagtgtgtgtctgtgtacctgtgtatgagagtgtgagtgtgtacgtatgtgtgtgtgcacgtgtatgaatgtgtatgtatgagtgtatgtatgtgagagtgtgaatgtgtgtctgtgtatgtgtgtatgagagtgtgagtgtttgtatgtgcacatgtgtgtgtgtgtgtgtatgagtgagtgtatgtatgtgagagagtgtgtaagagtgttagtgtgtgtctgtgcacatatgtgtataagagtgtgagtgttcctgtatgcacatgtgtgtgcatgtgtgtgtgtttgaatttgtgtgtattagtatatgtgtgtgcgagtgtgtgtgtctatgcacgagtgtgtaggagagtgtgagtatttgtgtgtgcacatgtgtgtgcatgtctgtacacatgtgtgtgagagtgttagtgtttgtgtgtgcacatatgtgtgtgtctatgcacatgtgtgtatgagagcatgtgtgtgcacatgtgtggtgtgagtgtatgtctgtacacatgtgtttatgacagtgtgagtgtttgtgtgtgcacatgtatgtgtgtgagtgtatgtgtgagtatgagtgtatgtctgtgagagtgtgagtgtgtgtgcatgtgtgtgagtgtgaatgcttaggttacaggatatactcaacgatgcatttttgagtaattgaatggagaaatgtttcaagatagatggaagagatggagttagaatttgagttctgacttagttaaggagaggtgtggccaaacagaaggtagcttgggttactccggagttactgggttcagagaaacctaagctcacaaaggcaatttacttactatgtaattttaggtgggtattcccagtggagtgagtcattctaaacctcttctgaagtacatttgtagtgtaagcagtttacgatttttaatcatgagagccaattctaattaggctgtagatggcagacagtaagtcccattctattttctatgtacgtggatgactaatcaaatacagtctttctcacgagttctccaaagaagttccggaagccattgccaatcagttgtttggtgtcagagaattcagagtgtctaagactgtacactatcagaggtctttctgagaagcagccgcataaacaactcaagacaatgagttgtacctgagtctcttgggaggctggggatgagtagttctcgagtcagcagggatgcagttagagggcttctggtcctcactcccagggagagacaggagaaccaggaagtatggccaactcatgtcccctccccctccactcacacccacgccacccactccccacaggaatggaaggaagaggatggagatgcctcctcctcacttcctgtgtgaaattggctcacagactgtgctttcttccttctgcaaccatatataatgtatgcattcttactgtgtggaatgccgcttgattagccgcctgattggggaagatgccaaaatattttcacatggaaatatcactggttgagaattttattcttaatcacaggaggaagaataacaccaaacataaaagccaccatcaggggcaggtcttcatcattatctccttctcctccttctcctcctctcctcctccttttcctccttctcctcttttcctcctcctcctccttctctttcttctccttcttcctcttcttccccttccttctcctttttctcctcctcctccttctctttcttctccttcttcctcttcttccccttccttctcctttttctcctcctcttcctcctcctccttctcctcctctttctcctcctccttctcctcctcttctcccccttctcctccttctcctcttcctcttcctcctcctcttcctcctcctcctcctcctcctcctcctccttcttcttcttcttcttcttcttcttcttcttcttcttcttcttctcctttttctcctcctcttcctcctcctccttctcctcctctttctcctcctccttctcctcctcttctcccccttctcctccttctcctcttcctcttcctcctcctcttcctcctcctcctcctcctcctcctcctcctcctcctcctcctcctcctccttcttcttcttcttcttcttcttcttcttcttcttcttcttcttcttcctctcttccttcctgcccccttcctccttttcccccctcttcctcatctttctctcctcctcctcctcctcctccttctttttcattttaatacctttccaggtcattcctacctctcctgtgagatactttacacatgatcaaatggttctcttagatgaggtatgagccacagacagattctgaaacatgggcaaatgcacaaacctcaaaggcattccagcaacaggagcttgacaatattctaaaggcatagccatgcccctggacatgtgaatgggggatgactgaagaaacaggtacaggtgactagggaggactgcagagacttatgccaggagtctcagcactggggagactgagacaggaggataaactatgtatgttaaaaagaatgagtggagtatggtcacccatgcctttgatcccagaatttgggaagaagaatcagggaaatctctatgagtttaatctacaatagtgagttctagatgagccgaggctgcatagtgagactctgtctcaaaaatataaagcagaaaaaagaaacaaagaaacaataaacaaggaggctgaattttcaaggcataagtattcctaacaattggtcaaacgattgttagtcttaattcattaaaaagaattagtagagagatacatattattaaaaattgccaagttgatattaagaattgtggaaacagggttggagagatggctcagtggttaagagcactgactgctcttccagaggtcctgagttcaattcccagcaaccacatggtggctcacaaccatctgtaatggaacccaatggcctattctggtgtatctgaagacagctacagtatactcatatataaataaaataaataaactttaaaaaaagaattgtgtaaacaaatgaaaagaaatcttgactagattaagttgaaagcacaattagtgaattggaagctaatactgagaaactcactggggtccataacacctagagatgaagaagaaaaccttacaaggacagacaggacaaggacaacagaaatagaagagctaatacgtagccactggagctttcagaaagagaacaaagaaaacagctgagaagcaatttccaagagataagggaagatgcacacctccaggttagaagtgcgcattcatactcaaagatgatgaaataccgaaacctgactcagcacaatttcggaccgtggctgcttagctcatgctttacttgaattaaactgaccaggttccaacttaacaagcaattcaagcttcgccaagagctgctccggattgctcccagcgtttcctaggtcctactcatccctgggaaggcagctcctgaaaagatgcactcttgcctgccgctctcaacaaaggtgcattgctgcactcggagatgtgaccagagaaggcggtgtgtaggcaagggagaggcttccaagagcagaactggactttccagattgccatgaccaggaagtgcctcctctgtcaccagggagggagtgctcacatccttgacttaccaggataaaatgtgttcccggggctggggatccctatgcggattgcttgtcacacttccatttgggacatcagagttttcattgcagtttttctgttgacattttttttttacatttcgcactgggcatactggaagtggttcaacttctaggtgtaacctcatctataaagataaggtcctttatttgaatttaacagagagaaccactcatatccagttcctcaaatttttatatttcctttcagcgtctgagctcaactaggactgccagtgtctttgggggcagagcctgctctgaaatttgcttcggatcagggattgactcttcagtgtgacatttactccactccattgctggcttctgtgctggcaccttgggtggtcgtcccttcaaagagttccttgtggcgggggcgtggcttcgtctatctcctacccagggtttccgcaaccacctcagcacttcaaaccacaggcctttctcattgtcaccttttgttctaaaaccacagagatgcacaaaagaacacgctccctccctcattcatattcattgacaaataacatcctgggatccaggcaaaaatgtgtcaaaatgctagtgatttgggaagttgcttcaccaggtcaagcttctagtttgtcccagagattaatcgttcagttttgatttcccctgttttctttcgctggtactcacgtgatttatctttgattgacacgtcagtgtcagtcttgatctgtggtggttgaggcgtgagaattttcacataaatgaaatgcttttctttatccataagtcctttcactggcttcttaatttgcaacagcaacacctggtgtaaaacgaacaggtgacactgtcaaaaaaaggtgtcagtcgaagtattgcgttttctatttagctctatttacttactgaaacaacgtttcactctgtagctctaacctgaaacttactatgcagcttgtgactggtcagtttgtggtaatcctcctgcctcagcctcccacgtgttgagattacagggttgagccacccggattatttattttcttggatacagagtcttgttatagaactcaggctgatccactgctcactaccacccctcctgactgagattgcagactgtgtcgccagagccggccctaccgtggatctttaaaagtacacgtagtgttgcttcccccaaaggcatgtgaacactttcagaagagaaggcctcaggatgacctcctttgaccccaggcaccactctgctgccaggttcctcttcctgccctggcattgatagaccatgaggaagaaccaattgattgacccctgacatattctttttaagccagtgttttgaatcccaatggataatgtctcatgaggagtgtgtgtgtgtgtgtgtgtatacattgctactagaaactatggagccataacggttgtgacagtcagggttctctggagagacagaaccagagcactgatagaaccagatactgtcaagcatctaatggtcagagcaagatggactactgtctcaaagcctatgcctgagtatcgagtctctccttagaaactgagagcttcccatgtgcctagtgtccacagaccctcagctataaagcaatgtctcctgctgtgggctttcagctcctcatcacatctttcccacacaggagaaagcaacgttcccatttacagctgagtaacaggagccacaaggtatgtctgactcaaaagttcaggctctcgatgactgtgcggtgctgcccagtgtgtcttcttcaatgtaacctcaggacctagaacagcaccttgcatgtggtaagcaattgttgagtaatttttgcacaaatgaatggatggatcgacagagttgaatggatgccaagacagtgtggaagtcaatttagtgaatcatttgtaggttaggataggattgtgaggatgagcctgtcattaagcaggctctggggttgactccagtgctttagaaaagctgtcttaagttctcgagttgactcatgatgtaacttgtgctttatcccctctcctatttcttttactacaagctgagagtttgacctgcatcagaggctagaaaacattttctgtgaagtgccaaacattaggtattttagattttgtagtaaatgtttcaggattctgttgcaactatttcacactgttgttacagtggatgaatagacaatataaatattccaataaatcccatacacacacacacacatatatacatacacacacatacacacacacacacatatatatatatgtatgtatatatgtatatgtgtatgtatatgtgtgtgtgtgtgtatgtgtatgtgtatgtgtatgtgtatgtgtatgtgtatgtgtatgtgtatgtgtatatgtatatgtatataaagaaaaaagagcctatactggctgctcttccagaggacccgagtttatgtctcagcactcacacactggcccttaactgggaacttcagttccaggaaatctgctgccctcttctggcctcctcaggtaccaggcacacaagctgtgtacagacatatatgcaggcaacatacccattaaaagaaatatatctaaacaaacaagcaaacaaacaaacaaaaaaaaaacctctcagccttctggatcaggctccgggactgtagttatgctccttggtccagacaacttcagcgtctccctctaaccctaacgctgtatgatttaaagatttagaatccatgatgttgagagtagcgatttaccattcatcattatcttgttccagctgctcataagaaatattgttggttacagggttctttctgatgaaaagagctgttttcaaatagtcagtcaaccaaccattaatcacaaacagaaagatctaggtgtggagttctcatctcgactctttaagaaacaaatatttagaaaattcttggcacggaggaagataggaaggaacacagagtggaaaggagtggagaggagtgggaggaagcgagaacaaacccttatccaaccagtaagcctgcccaaggtgggaagccagaccttccatttctctcctacaacctctacaagtttgctagttagcagccagtccacaccactggctgtagtaactcagtacatactgatttttttcttcccttttctttggcaccaaaattgaaaccatggaataatttctgcataaaaggctctgctaacagctggctcctggcttagagaataccttgtggagcccagtacttaacacatagcctttttgtgtctgtttcaatgtctacaaacttcctttgaggaacaagtgggaaaattacaaggaccatgacatctcaacatccatcatggctgcctcaataagacctggataccagttgacatgccatggtggaagggggaatctctcggagcttcacccctagatgataaaatacaggtacttaaagattgccaagagagggggtctttcctaaggatgagcccagttggctatctaatatcaagtgatcagccctaaaagacatacacacatgagcagcactaacctgactcagtaggttgtatcagtatatctattcatatacacgcagaacagtaataattaaagaaagagaggccaagagaggccgagaacttgagaaggaggagggtggggggtgagattggagggggtagacagaggaggcaaatggtataaatgcacaaatatggaatctacagagatggtgccacgatgctgacgtaaggctcaggatttgcaggaaggctcgggatttgtaggaagggaatcttgggttgaagtctacagagaacgatatctcttctgatcattggatgcaatcaacacacaccagggagcatccatagtgggcggaatgcatggcagccatagtttttggctgacatctgaagcctgtggaggatttaggggtaggaagaatgaattcctttaacaagtcaaaggacaccacagctccacgctgattgcagcgatgagtaagaggccctgtctctttcctccagtccgcatcagtgatctctattagccattgatgcaattcattcattactttaagggtcattttaagcccttaatcttaaaaccagtcccaagttgtttcacgactaagagactgagctccaacaaggttggctgaaggcaaggcccttctgtgtgtaactttcatttgtttagggattgctttccaggttccagtcatggaatgggcaccgggcaaacagcggtgcaaatgatttggcagaaatcaacatcagttggttgagccatgcgtcatcttcatctcgagaaggaatttgtattgagcaataggttagagtttcaaaatcccagaaagtccaggaacattaaaaaaaaaaaaaatagaggtgtatggcagagtttcagccgagagtccacgtgtgatgtctcagcttcaggttagggtaacccttttgtgactggttcttctctactagtgagagcaatagtcttgggatttcacaatgctcagggctcaggtgatcacttgcaatgtccctctgctgataacttccaagacagcttctgtcattttcagctctcaggtggttactctgatggcctcatggtcctgcctgaaacagaaagtctgccacctacttctgtagcagcaagactcctgttctgtggctaagcttcctgcctgtgcaagagccacagggaggggccaaatgcatgccactggggccacgcctcctggtaaagacataaatagtgatcctcgggactggtcatcagagctcccctgccttcaccatgaagtcctgcggccttttacctttcacggtgctccttgctctggggatcctggcaccctggactgtggaaggaggcaaaaatggtgagttggagttgctttggtccaacattgcctggagtatcagaggtgggggctcctgatggtttgggctgtttttcagtttactctgacctcagggcgacatctgtgtctcgctggggtctgaggtcttgatgaagtttcaaggcatgtagaggtgctcctcttatgcagccatcctgtcagctcaggtctcacacagctctgtccctgccctttagcctttctgtttgtttctgtctctggctttagttctcagcatctcacatattagttcccttcctatttatttctcttggtctccattattcctgctcccaccttctgtctttgtgagatcttgcttagccctgaggtagaaaaccttgactgggagcccggtaccttttatcctcagtctgatttttcctggtcacatgtcttggttgaccaagtctgacttttcctccctaggtcagcccggtatttctctttgaagttgtgggccactggaatgagggtctatattctgagatgtggaccttcgtctaggaatgatgatagtccgtaccctcctaacatcttgagcttctctttagatgctatcaaaatcggagcctgccctgctaaaaagcctgcccagtgccttaagcttgagaagccacaatgccgtactgactgggagtgcccgggaaagcagaggtgctgccaagatgcttgcggttccaagtgcgtgaatcctgttcccattcgcaaaccaggtgagccagcagagaaaacagagaggggacaatcaacgtcaagagccacccagagtgaatgaagagtccctcccaggcatccttgtttctaagagctgttgggtccaacatgtcagttagtcaaggcctcttgctgccattggcaggaagagccatttgcctgcagttgccactctgtgaggatgatggctttacaaccattcggccctttcggggctggagagctggtcccctgcattggctggaggctagatggtagcgaggaagcaggtcctctttcaggaggcgtgtttgggaggaggtgacaaaggtgatgggtggatggggacgaacttcctcgctcaggaaggagatgttgggttaaagacatggagatgtgttgcctgagccctaagacatcggccctgtgaatcctttctcaacagtgtggaggaagcctgggaggtgcgtcaaaactcaggcaagatgtatgatgcttaaccctcccaatgtctgccagagggacgggcagtgtgacggcaaatacaagtgctgtgagggtatatgtgggaaagtctgcctgcccccgatgtgaggtaaggagtgggctggggtaggcagagctcatttctctccagcccttttctgcttcaaggttctggagctcgaagcacatgcgccaggagattctattctaatcaggagcccctgtctgtttgccgtttaagggaactgtcccctgtttcttagggcaaagcttagcattgcctgaggctttgatcctgtggcagcctgtcagggtaagggcctcgggtgaatggctctcagagtctctgcctgcacaatagaaataccgaagttgaagttttgcgaggcacagtatacgttatttgcttcccatgttatttacttcatggtgtctctctggtcagagcacaaaggataggtataatgtgaggaatgtctagctcagtgctctgcgttttgagttttacaacgacaacgagatttgaacctgttctcctgaaaccccagatcctctcaagtccagccccactttaccctttgaccgttctcagcatgctcccttacaagggctggataggaatgatctagctggttcctatgttgaaggtctttccttactttctcttgtagcctgatccctgacattggcgccggctctggactcgtgctcggtgtgctctggaaactacttccctgctcccaggcgtccctgctccgggttccatggctcccggctccctgtatcccaggcttggatcctgtggaccagggttactgttttaccactaacatctccttttggctcagcattcaccgatctttagggaaatgctgttggagagcaaataaataaacgcattcatttctctatgcacaccgtgactctgattcactgaggggatgagatgggtgtggtaggaaccaataaaggaaggatgggaacgaggcctccctcttacattccgggaggagaaggatgagaattccaggcttgggcatgcttgaaccttccaaatatcatgtttttatctgcaaagtggcaacagggaccgctttcttacaacgtgtagtgcaccagaggttgcagaatggtgcaaagtgtgtgtgtgctatacagctgtgctttaccagagtgccttcacacaccacggccacttattgctacccggcgttatgaaaatgcggtgcatgtgtgtgcacgcacacacatgtgcagtgtgcttacttgtatgtgtttttgaaggacagagtaggacaccaggtgtcttcctctgtcactttctggttattaccttgagtcaggatctctgtgctgaaccaaaagccgaccaatcagggctgggttcgctggtctgcccatccccttcctccggttactggggttacaggaaaatgcaccacacccggctttttatgtgggttccggggatttgaactgagttctgcttgtgcagtgaacgacgtgttcactacccatctccccagtgccccgccccacttcacagttctactaaacatacactgcagaagaagagacgggttccagtcagtgtgtgctccgagggtagctgcaatgatggcaagtaaaatgtgaaaaatgagaaatcacccattttgggagtatctccaacactttgttgtgagtgtgactgctggaggaatggctcagcagttagagcactggctgctcttccagagttcattcaattcccagcaaccacatggccactcacaaccatctataatgagatatagcgccctcttctgtcatgcaggtgcacatgcaggtagagcactcgttagacataaagtacacttaaataacaatcgaaaaaagaaaaaagagtaagactagaaataaacatgaagggaaacgcacctgaaatgatgtttctaaaacacatattaagttgaatttccaatagacttctcactgaggtcagaaacagcaggggaaacactgttctccaacaatgtacaagatatctaaagcaacacaggatgctacgccaatggagtgtgtaagatagggacagacgctttcccagcagctgacaagatgcctaaagcaacacaggatgctgcactaacagagtatgtataagataggaaaccatacaaaatggtcatgtttgatttctatttttaagtgtaagtgtgtgtgtgtgtgtgtgtgtgtgtgtgtgtgtaacaaagtcttatgtagctgagactggcctcaaactttttatgctcctgcctctacctcctaagtgctgggattatgggtgtgtgcctgccaccatttttgcctatcttaaatattatcattttatatggcaattttataacactcaataacattagtaagccaagattcatcaaagttgctgggcatacagcctacacagaattctagaacattccaattaacaataagaaataacacacatggagctagagaaagtacccaaggagctaaagggatctgcaaccctataggtggaacaacattatgaactaaccagtaccccggagctcttgactctagctgcatatgtatcaaaagatggcctagttggccatcactggaaagagaggcccattggacttgcaaactttatgtgccccagtacagggtaacgccagggccaaaaagtgggagtgggtgggtaggggagtggggaggagggtatgggggacttttgggatagcattggaaatgtaaatgaggaaaatacctaataaaaatattaaaaaaagaaataacagacataaagaaacaaactgtgcaaaaaaatctctaaacaataaagttttgacaatatctactgacttgaatggtaatctctagaagttattcattttttgtcccccccccataattaaaagattaatttgtatctgctcttttaaaattggcaaattataattgtgtatatttatggaatataatatggaataaaatttctggttttttaagttgacaagttataactgttcatattaatagagatggtgtgatgttttaatatggtacacagtatggaataattaacttaagatagaagacatatctattgtcagggttctctagcagatcagaaatgatattataaaaaacaaaaatcaccctgagtgaggtaacccagacccagaaagataaatatggtatttgttcacttatatgtggatgttagccattaaataaatgataaccaacctacagcttatatgaccagagagtttaggtagagaggaagggcccagggcaggggggcacatggatctccctgagagggggtgatagaatagattttgatttttatagattaggtagggaatgggaggagaaatagggttgagggaggaaatttggggagagacagctagaatttgggggcatttaagggatgatatgaaaacccggtgcagtggaaaccctcctagaatatatgagggccatcctaatgaggtctcctaatcatggcagtaatggagtcaccattactggccatctcttgtccccaaatcaggcttccagttctgggaatggctttcatttcagtgagttgttgaccaagggagtcccatggaaaccctcaaatcacccctgggttgctaagacaatgggttgttctctgtaaacgttgctgaagacgacacccacacaactcaacgaacatggagaagtcaggctggtgcctacgtggagcctttaactgtatattccagtgtcttcagtgtgagcaggcaaccaaaagaggaatacaaacaccagcccagccacaaaacctttgacctacaatccatccctggggtaggcgtaggagtaaatggttttgcacggagtaaggattatccctgcgttatccaggggtcatttctctgtgctcacatcttgtttcaatccggacacggcgttgtagtgcttaggtcaagaatctccctactcaagtttgtgtaaacaattcttaccgtttattctctgccttgtcagtgggcagaggagagaatggcgtggaaagttccatcagccagaaaaggagagagagcgagcgagggagattcaagtcggccacggggagaaggtccgaggagacaccgtgggaagaaacatctgaagcggagggagccagaacaatattaacatatcatgggaccggagccgggaggtaaccagattagcataaggggttaaggtagatcattaaactgctgaggtattgccgtgacgcttgaaatacatcttggtttctctgtgtggttattggggactagcaaaggtaaagaaatacagctgctggtttaattcactgattacacttgtattaaaacgatacattttacagatagtatttaattttaaaggccacagacctttgtctttttctctcatactgatggacacttatcttgatcccgtgcctcctgctgtaataaatacgtgtgtattcagctcttctccacactgactttgtatcagtttccacacatacagaaagcgaggatcactggactttatgatagctcgatttttaacttttatttttatttttttgagtatgtgaacaatgggtgctctttcttccttccttccttccttccttccttccttccttccttccttcctccctccctccctccctccctccctccctccctccctccctccctccctccctctctctctctctctctttctttctttctttctttctttctttcttcctttctttcgaaacagagtctcactctgcaccccaggctggcatgggactcgaactcatgaagatttatatgtttctgcctctcaagtgctgtgattacaggagtgtgcctgcccatctgactttgtgtggtttcgacttttggacagctctgaataaagttttccaaaccaggcatagcgatttacatcttcatcagtgccatgctcggggttgctgtatttcccacatccttaccaatgtttggctcgtcgttttgccagcagtcactcccatggatgtgcagtggggctggtgttctactctgcgaacccatagccattagtgccagtggatactttcttcatagatttgctgaccatttatatatctttcttggaaatatacacgatcagatatcttgtttatgtttaacttttgttgagggaagggaaaggaagggtttattctgcttacatgtcttggttcatagttcatcacaaagggaagccaggacagaaacccaaagcagggaagtagggactgaagcagagatcatggaggaatgatgcttactggcttgttctccatggttttctcagcttggctttttcaacaatcaaggtccagctgtccaagggtggcgccttccacagtgacctgggccctcccacatcgatcatgaatcaataaagtattccacagacttgccaataagatagaggcatcttctcgattggagtttttctcttcccatgtggctctatgttgttccaagttaacagaaaatggaccctttgtcaaattgatgtgcagacacatcactgttaaaccataacctttcctttcttgcttatgcccaagttctcgtgttaataatattacattgtatattacattataaaatacagtcccaaaccaggctgtttcggtcggcccgcaacaactgttgagtcatttaaattgttcatgtgcttgaatatcaacctctcattggatatatgatttataaatattttctctctgttgctgtataggcctcagactgtaaatttaagtgtggccagcagagggctccattgtgcaaagaaggaccagtacttgggtgaagatggctctgcttaacatcaggctctttatccatacaggctcagcaacagagttaaccatgtatgggaatgggtccataggttacactgacccatttacctcaatggccaaaactggtagtgcccaacttttgagtaccttagtaaaggaattactctaaaattttctttctttctttctttctttctttctttctttctttctttctttctttctttcttccttccttccttccttccttccttcctttccctttttaacaatttttaaaatgttatattatttgctatttcctttcatacttatgtttaatcttgctcacacttttcattaatgggcaatattgtgactctacctcactgttttatttggtcttattttctttcttttctttctttctctctctctccctccctccctccctccctccctccctccctccctctttctttctttctttctttctttctttctttctttctttctttctttctttctttctttcttattagatattttctttatatacatttcaaatgttatcccgaaagttccctataccctccctccaccctgctcccctacccatccactcccacttcttggccctggcgttcccctgtactggggcatataaagtttgcaataccaaggggtctcttttcccagtgatggccgactaggacatcttctgctacatatgcagttagagatacgagctctgggggtactggttagttcatattgttgttccacctatagggatgcagaccccttcagctccttgggtgctttctccaggttctccattgggggccctgtgttccatcttatagatgactgtgagcatccacttctgtatttgccaggcactggcatagccttatatgagacagctataacagggtcccttcagcaaaatctttctggcatatgcaatagtgtttgggtttggtggctgattatgggatggatccccaggtagggtagtctctggatagtccatcctttcgtcttagctccaaactttgtctctgtaactcctttcatgggtattttgttccctattctaaggaggaatgaagtatccacccattggtcttccctcttcttgattttcttgtgttttccaaattgtatcttgggtgttctatgtttctgggctgtttttattttcatgttgcaagtgtttcatctgcatgtatataagtgcactgcttgtgtccaatatctatagaggccagaagagggtgccaaaatacctaaaactggagttacaggtggctgtgagctgtcatttactctctctcaatctctctctctctctctctctctctctctctctctctctctctctctctctctctgtgtgtgtgtgtgtgtgtaagagaacctggtttttctgtaagtggagggagtgctcttaactgctgagagccccctttctactgagacagatctcactgtatatctctggctagcctagaacttgctatgtagaccacatggccttgaactcatacagatccaccttctgagaataaaggccagtgcccctatatttggctttttcactggtctttaaaaattaagtagtcctgttttatttttttcttgtcttgtcttttctcttcttcctcttccaccacctcctcctcctcttctcccccctcttccttcttctgtttttttgggacagggtatctctgtgttgccctggctgtcttggaattcacaggccaggctcccgtttgtatttatttccttctcacatctatctaattttgttttttaaaagttttttcattatttgggttttctttttattaaatgttttttaattgaaatagaattgtatcacttctccctcccttttctctctcaagctcatctcagtcacccgccctgaacgcttcccaggcttctcaccttccaattgatatcctctttatctttgactatactcatcacacacaggcacacacatacccaaaatatatacatgtgtatgtacaaatatgtgagtcatgtggtcacccatggattccagtcaaaccagcaattgttggcccattaaaatgtattatttataagggccaactgttatttggatgtatagctataagtcattaaaggaatcagataatttgtttataagtctattgttttcagataaagcagagctagtaaaatttgttagagtccagtcccccctctctctctataatatataacatatataatacataaatatatagtgctgagttaatctgttgattgggtgatagatatggcttcaggggtgaccactgtgttggacaaacaataagagggctcattcacaagagaggctaattcttcttctccccgcagactagagtagcttgtggttctttctttaagggtgggacttcacacagtttttcttctcctacattaacatgccgatcgacattgctattgttctggtcttgtttctgtagccattttaggagaggctgtttcacttcagacttcctcctactctggctcttacaatttttgcactctttcctctggcatggtaccctgagctacggatgagggagctgtggtaccaatgtatttttggggtgctgggatctttatactgtgggtctctgctttgtgtccagttgtggttttctgggatggtctctgtttgctgtagagagaggcttatctgatgagaggtggtagctacactgatctctgggtataagaacaagatgcagagaaattatgctggcctagcaaagcagtggtagtagattcttttcctttttatttattatttaattttattttaagatttattgaagcctgataaacagcttcaatgaagtagctggatataaaattaactcaaacaagtcaatggcctttctgtacacaaaggataaacaggctgagaaagaaattagggaaacaacacccttttcaatagtcacaaataatataaaataccttggtgtgactctaactaaggaagtgaaagatctgtatgataagaacttcaagtctctgaagaaagaaattaaagaagatctcagaagatggaaagatctcccatgttcatggattggcaggatcaatatagtaaaaatggctatcttgccaaaagcaatctacagattcaatgcaatccccatcaaaattccaactcaattcttcaacgaattagaaagggcaatcggcagattcatctggaataataaaaaacctaggatagcaaaaactcttctcaaggataaaagaacctctggtggaatcaccatgcctgacctaaagctgtactacagagcaattgtgataaaaactgcatggcactggtatagcgacagacaagtagaccaatggaatagaattgaagacccagagatgaacccacacacctatggtcacttgatctttgacaagggagctaaaaccatccagtgtaaaaaagacagcattttcaacaaatggtgctggcacaactggcggttatcatgtagaagaatgcgaattgatccattcctatctccttgtactaaggttaaatctaagtggattaaggaacttcacataaaaccagagacactgaaacttatagaggagaaagtagggaacagccttgaagatatgggcacaggggaaaaattcctgaatagaacaacaatggcttgtgctgtaagatcaagaatcgacaaatgggacctcataaagttgcaaagcttctgcaaggcaaaagacaccgtcaataagacaaaaagaccaccaacagattgggaaaggatctttacctatcctaaatcagataggggattatatccaatatatataaagaactcaagaaggtggacttcagaaaatcaaataaccccattaataaatggggctcagagctgaacaaagaattctcacctgaggaataccgaatggcagagatgcacctgaaaaaatgttcaacatctttaatcatcagggaaatgcaaatcaaaacaaccctgagattccacctcataccagtcagaatggctaagatcaaaaattcaggtgacagcagatgctggcgaggatgtggagaaagaggaaaactcctctattgttggtgggattgcaagcttgtacacccactctggaaatcagtctggtggttcctcagaaaattggacatagtactactggaggatcccgcaatacctctcctgggcatatatccagaagatattccaaccggtaagaaggacacatgctccactatgttcatagcagcctcatttataatagccagaagctggaaagaacccagatgcccctcaacagaggaatggatatagaaaatgtggtacatttacacaatgtactcagctattaaaaagaatgacttatgaaattcttagccaaatggatggacctggagggcatcatcctgagtgaggtaacccaatcacaaaggaactcacacaatttgtactcactgataaatggatattagcccagaaacttaggatacccaagatataagatacaatttgctaaacgcatgatactcaagaagaacgaagaccaaagtgtggacactttgccccttcttagaattggaaacaaaacacacatggaaggagttacagagacaaagtttggagctgtgacgaaaggatggaccatctagaaactgccatatccggggatccatcccataatcagcttccaaacactgacaccattgcatacactagcaagattttgctgaaagggccctgatatagctgtctcttgtgagactatgccgaggcctaggaaacacagaagtggatgctcacagtcagctattggatggatcacagggcccccaatggaggagctagagaaagtacccaaggagttaaagggatctgcaaccctataggtggaacaacattatgaactaaccagtaccccggagctcttgactctagctgcatatgtatcaaaagatggcctagtcgccatcactggaaagaaaggcccattggacttgcaaactttatatgccccagtacaggggaacgccagggccaaaaagtgggagt

SEQ ID NO: 122 - DNA, 1079 bp, Mus musculus
gggatgccaaacccctacctaaccagaagaagagaagaaaggccactgccgaggtcacttccagtacttggaggagaaagcaacgttcccatttacagctgagtaacaggagccacaaggtatgtctgactcaaaagttcaggctctcgatgactgtgcggtgctgcccagtgtgtcttcttcaatgtaacctcaggacctagaacagcaccttgcatgtgctctcaggtggttactctgatggcctcatggtcctgcctgaaacagaaagtctgccacctacttctgtagcagcaagactcctgttctgtggctaagcttcctgcctgtgcaagagccacagggaggggccaaatgcatgccactggggccacgcctcctggtaaagacataaatagtgatcctcgggactggtcatcagagctcccctgccttcaccatgaagtcctgcggccttttacctttcacggtgctccttgctctggggatcctggcaccctggactgtggaaggaggcaaaaatgatgctatcaaaatcggagcctgccctgctaaaaagcctgcccagtgccttaagcttgagaagccacaatgccgtactgactgggagtgcccgggaaagcagaggtgctgccaagatgcttgcggttccaagtgcgtgaatcctgttcccattcgcaaaccagtgtggaggaagcctgggaggtgcgtcaaaactcaggcaagatgtatgatgcttaaccctcccaatgtctgccagagggacgggcagtgtgacggcaaatacaagtgctgtgagggtatatgtgggaaagtctgcctgcccccgatgtgagcctgatccctgacattggcgccggctctggactcgtgctcggtgtgctctggaaactacttccctgctcccaggcgtccctgctccgggttccatggctcccggctccctgtatcccaggcttggatcctgtggaccagggttactgttttaccactaacatctccttttggctcagcattcaccgatctttagggaaatgctgttggagagcaaataaataaacgcattcatttctctatgc

SEQ ID NO: 123 - protein, 146 aa, Mus musculus
IVILGTGHQSSPAFTMKSCGLLPFTVLLALGILAPWTVEGGKNDAIKIGACPAKKPAQCLKLEKPQCRTDWECPGKQRCCQDACGSKCVNPVPIRKPVWRKPGRCVKTQARCMMLNPPNVCQRDGQCDGKYKCCEGICGKVCLPPM

SEQ ID NO: 124 - DNA, 22324 bp, Homo sapiens
accgccacagaggccatgttctttttttaatatgtcttatcaaggcccacaacttccttagtgacaagtcatggcttcttttttgttggtccttgagtaaatggatgtctccctttggggagatatgccagcccgtgggggaaaaatgtgagaaacatcttggtcttcaatccgacactgtcacaaatcatttcttgggaggggaggtttcgaatgctcctgccaccactgaattttcttggcttctacttctggttcagacatttgctgctgttgccccagatcccagctctccccatccatgagttctctaactcttctttgtactgtttttttctgagggcaaccacctttctcagtctctccagaattgctaagaagaatccaacctgcacaaatggcaaaattcgagccaagggaattcaagccttctggtaaaagaaggaggtggacacccagcctctcccttgaagtgcattgctgctcttagaccaacagggatgactggacatgctgcccctcccatgtttttattcctttctcagcttctccttgccctgtctccacaagtgattttttttcttttaaatttttatttttttcttttatttttctttagagatggggtctcgctattttgcccaggctggtcttgaaatactgggctcaaacgatcctcccaccttggcctcccaaagtgctaggattacagacaccagaatagagatataattgcctccattttctatgggaaaatcttaaggcacactctaggtttgcaaatcatgctaattcctttccagcatgcaccaatttataacttgtatgtcttattttgtaggggatgaccttggttagctgtctaattgaggaagaccttaaacataaatgcacatagaggcattgctgattgataatttgatttatgttcatgggaggaaaaacaacatcaaacaagagagctatggttaggtgcttattgtttattgatgctaagtctctttctatgtcttttaaaacaagcaatgaggctgaattttcagagaatgcagatacctaacaattggcctaagggttgtcctgcctaatttggtaaaaaagtggcagacaactgtacattatttagatttaccagatgaacatataaaaaaaaccaagtagaaatactggaaataaatgattattgaaataaaaattcattacttactagatagaactagcattcgacccagcaatctcattactggatatatacccaaacgaatagaaattgttctaccatgaagacacatgcgtgcatatattcattgcagcagtattcaaaatagcaaagacatggaattaatctagatgcccatcaatggtggactggataaagaaactgtgatacataaacaccatggaatactatgcaggcataagaaagaatgaaataatgtcctttgtagcaacatggatggagccggaggccattatcctaagtgaattaaagcagcaacagaaaaaccaaaaacagagtatcacatcatctcacttataagtgtgagctaaacactgaatacacgtggacacaaagaagagaacaataggcattggggcttacttgagagtgaagggttcgaggagggttaggactgaaagagtacctattgggtattacctgggtgacaaagttatctgtacatcaaatattaacatgcaatttacccatgttaacaagctgcacatgtacccttgaacctaaaataaaagttggaaaaacattggataaagtagagtttagactggatgcagctgaaagaaaacttggtgaatttttagccagtactgagaaattcacccagagcccagcacagagagatgaagagaaaaatataagagaaaggcaaaacaacgataataaaaatagaaggtctagtaaatatccggtggaagttccagaaagagactggagagaatggcacagaagtaatattcaaagagataaagaaaggactttttcttttaggattaaattaagacatgcatcttcagactaaaagtgcatatttggagtaaagcagaataaataaaaggcaaacatgactcggcgagatttctgacaatagttactagttcatgcttttatatgaagcaaatggaccaggagccaactaaacatgaaaaccaagcctcataatggccactgattgttcatgtcgatccccacatcctgctgcacctatataaagtgaattcttgaaaaggtgcagatgcccttccttccccaacaaaagggcatcctctgcaatactcctccaagatgtagccatggaaggtgacaggcaaaggagaggctcccagacagcagaactggattcttcagatttattgagtaaggaaatcactccaacattaggtaggaagtcctcacatccctgtcttacaggatgtacaatccgtattacgggccagtgacaatttgtatatatcttcctatatttcccttttgcaaataggactttttattgcagtcattccgccctcaatctaccattctatattgggtgcatttgaagtggttaaatttacttaagcttattaaacttaatctgtgaagactataaatttaactgacagaactgctttcacccacattgcagaactggagatgaatatagtacccagagagacattttgttgtctttctttgggagagaggttgagtgcattttatgtagatgttggtttagaaagtatttgaaaaaatttagttatgtagatttcagtaaccaaaaggggtatactttagagaacactcactgctatttttaccactgagcatcctttcacccttctgctggtagctatatcctaatttaccccaggagaatcattccctctcccactctgaaaattccactggatttggggatgagtacacatggtgatgagtattgtggccttggcttaaaccaatcggtacatcccagttccctggtcccaatcattggtttaaagatttaattctagccactcctagttagttgagttgcccagaaaaagcccttactagacatgaatttgggaagatgggaggagatgccacagccatattataaatgctaagagggagcctgactaagaatgaagccaacatgaagagaagtgccgtggagagaatcttgtgggagctatagtttgagcccttgctcaaattgcacctgaaaatagcacctattctccttggtttattcagcactctcacttcttgcatctttaagatcattttttaactttccgccgaaggattatctggacagtgctactatcccaggcatctccaactctgggtttaggactaaagaagtcttggagggaccataatgaagcagtatgtggctgaattctgaagacttgggtttgaatcttactgtacctctgacttgctgtgtcatcttgggcaagtgggcttactctctgaggttccatttccttttctttaaaatgggatataaaagtgcttggtccactgtgaagttcggggtcatgcatggtgtctattcctaggctttttattcaggaaagttggctctctgggtcctgagagtcctctataaggcaaaaacccagctagaatctaagacttggggcctctaaagagcatctgttccaatgcactgatcttacaaatagggaaactgaggcccagagaaaggaaggttctacatcaaattggacagagctgggattccagcccagtgtcctgagtccagtatcatcgtcatgcctctctagctgaccacagggtcccagaggccagaagtgatgctatcaagtgtgagtctttcatggtctttctggcactctgctctgtttgggccacagaggtgtcctcatagtggtgctctccactgaccccaggcttagacaccaaactctcccatagtaatgatcaaccaggcatcgtctgccatgtccatctaagaccctaccatctcctgatctgcaacaggaacgtttctctgagactcactttttctcatctgtaaactgacttgacattagtatctaccaagttttgtgtgacgcttaaatgtaacaaaacatgctaaaccaaaggagatggattctagtgatttggggacatcttttcccaagctgcttatagctctgttccacagtttaataatccagtttttctattcccggttttcttccatgggtagtcatgatggcagtttcttaatgccgagcactgtttttctttttgttttaccaggtccctaaagcatttcctcatgacataccacagactttgtttctttaaccttaggttaactggatcccttcctctagggagacagacatgcagtttttgaaggaataaagtgcagagccctgatctgtacaccaaccatctcttgcatggtaataagtatgaagacacctgagatccaccgttgttggttaatttctcctgccaattctttgatggtggatgtttttcacccttgcccagattctgctttactgcccttcacccattcacttgtgggcctaaaaggacagttcatatttccagattttattaggactatgatgagcagtaggggaggaagtacaaacattgcagaattcaaactttcttgggtgggaaaatgataaggagtggctaagccatctgtttctctggaaggtctagggagatccagttgccatgtccaccacctgtggatgacacttccagaggtgatttaaatgaccccacctcccttgcagtcatctctttctcatctactcttcctgtctcagctcggggtttttttttccccaatactctccccaccacacctactacatctccatactccctggctctgtgtctccattcccatttggtcattattgacgttttatgtattttgtttaagacaatattttaagctaagttataaaggcaactatgaaagtcagaaaattggctgaggctcttggggagagctgatggcctcagaggaagcaggatgaagctgtttcttagagtcacagttaccgtcttgggacaggtagaggaactgaggcccagggaaaggtagttgctgccttattcacataggaatgagctgtgaaaacctggttgtctgccagattctgaaagagttttttgttctgtgttgttttttggttttgagacttggaaacatagtgaattttaggtaagaacacagtgacttttagttaagggtgaagctggcatctgctatcagaatggggcgacccgaaacacattcttccttagacctgagcaacggggctccttccctgcacctcacacttcaggtcgctctgtgccttggggcgtcttcctcaaaattgtctatgttcccctggagtgcctgaagccagccaggatcaatggtgccatggggcagagaatcccagcttggactgagaactgcatgggttctagtccaagggggtgcttctcactctgtactccttcccccattgctagaatctagggcagtcatcctaccaccttggatggctcctggcaggagcctgtggctgctcctgtctcttcctcagggctttccaggccatctctgtgcaactccaaaggggcttttcagttgatgtctttttttttttcctctgattgacctatgctctctcgggtcagtgttgagccataatggattaggcagagacatttcttgtgcaaatgagatgctcctctcacttcaaccctgagcccctccagggctggctacataatttacaagactcaatgcaaagtgaaaatgtggagctgcttgttcaaaagcaggaaaaaaagtgttaacggtactaaaattaattttttaactttctttggcagtttctctctagatctgccatggtgttaaaaaaattatttactgttgctcctccacaagtatgtggatactcacagggagagtgcagactcccagaggtgcgcagggtccctgtcccgctacttggtgtgtgcaggacccaccagctgccagggtccccctgtcaccagcaccctggtagtcagggacaagcggccacactaacaacatttgagacagtaattggaagccagtattcagagaaggcataaaggatgatgcagcctcacaagtaatgatgtaaccaactttaataaatggcattgggaagtgcagaggcaagcaggttccatcagccagggttttccagagaaacagaaccaatagttgattatctggctatctatctatctatctatctatctatctatctatatctatctatctatctatatctatctgtcagttaagatctgtctatctgtctgtctacctacctaccaataggcccaatcaggtctattttgtcaagaaataagaccatgttttgtcaaacatttaatgggacagagccagatgggtccagacccaaggactaagctatttagttaaagactgacagctccctgtgcgcttaatgtgtgcagggacacgccggtaataaaaacaatgtgtaatgtactgaggggaccagacagtttgctgagtgctttccaaatactcctcacaacaactgtacgactccagaggcagcaacactctcatttttcagtggaggtagctgaagttcaaagaggttcagtgatttgcttccaacctgtaagtctgactttgaagttcaggttcttaacaaccatgtggtgtcgactccgtgggcgtgctcttttctgtagccctaggcctagtgcaatacctgacatgtggtaagaaatgttaaacaacttttgtgtgaatggtttgtataaatgaatgaaggaatctataggatttaggtagaaggcaataaagggtgtgtgaaatagatttttttttttgagacagagtgtcactcttgtagcccagtggcatgacctcagctaactgcaactctgcctcccaggttgaagtgattctcctgcttcagcctcctgagtattacaggcacacaccaccatgcccggctgatttttgtatttttagtagagatgggatttcaccatgttggccaggctggtctcaaactcctgacctcaagtgatccacccacctcagtctcccaaagttctgggatcacaggagtgagccaccactcccagccttgagatagattgaatgagtcagtctcaggttaagatttggttaggagtggaagtgtcctccaccagacaggttctggggatcagcatgtgagtaacctgttttagaaaagctcaatcttgtgtgtgtcgttaatccgctatgcagctttgggcctggatcttcttctaagggattcagtctcttttatgcaagctgtgggtttggtctaggggttagcattttctgtaaaggaccagacgataagtattttaggctgtgcagtaaatattttaggtccctgttgccattgtagtggaaagatagccttagacaatacataaattaatggatgtgtggctatgtgccaataaaactttatgaaaacaggtaactaggtggatttggtccaaggactgtagtttgctgatctagaaaacccttgaagtcctctttttagtcttaacattctatgatgtaaacatttagaaccaattatgtcaaagataataatgattatatactattatcttcttatgacacccatggaagacattgctaattgggcacagggctcttttctgatgagaaaggagctggctctaatcagtcaatcacagattgagcaatcagtcaatcacagatttaaaaaaaacttaagctgtagcattttccttttaatttttttttttttttgagacggagtctcagtttgttgcctaggctagaatgcaatggtacaatctcagctcactgcaacctctacctccagggttcaagtgattctcctgcctcagcctcctgagtagctgggattacaggtgtgtgccacactgcctggctaatttttgtatttttagtggagatagggtttcaccatgttggccaggctgctcttgaacccctgacctcaagtgatccgcccaccttggtttcccaaagtgctaggattacaggcataagccaccgtgcccagccccttttcattctttaagaaataaatatttagaaaactccagataatttcttgagtgtggcactgaggaaaataggaacaaacagagagagagagagagagagagaacaggaactctgtgagagaaatcaaattatcccctgggtggtggaagtgagaacaaaaatcttgacctgagagtgtcattacccattggtggaaatcatagcctccatttctctcttacctaccctactaagtactccaactaagagtgaatgcacctggctcatagtagttaccttgtgcatattaattttcttccttttctttttccaccaaaatttgactgatgattgattatgtccaagtcttctgatccaccaaaattcaaaccatggagtgacttttgtataaagggatctgctgccagttgcctgtttggttgtggaatacttaaatacttcatgtggggccatcgctacttgataatgagtgggtctttcatgtctgtggaaagttccacaaaccttcaccttaggaatgaatgggagaattccaagcatgaagataatgagtcaagagcttggagtttgtagctagatgagctttggttgaattttattttattttatttttttaagacagggtatcgctctgtcccccaagctggaatgcagtggcacaatcatggctcactgcagcctcaaactcctgggctaaagcgatcctcctggctcagcctcccaagtagctgggactacaggcatacgtacgtcatcatgcctggctaattttttacatttttttgtagagatggggtctcaatatgtggccagggctggtctcaaactcctactctcaaggaatccatacacctcagcctcctgggcagctgagacagcaagtgtgcgaccctacactcagctatgggctgaattttagagataatggtcgctctctttataattagaagcaacctatgcagactgggtagcaaatagaatgggtttaattttttgctgtcatgtgagatctgtaagggattttggggaattttaggaagcaatcctctaagatctcaaattatctcacagctaaatgtagattacagtgactgatgagctgctttccccctttatctcagattcatttcaattctctttagtgggaagggatactattcatttgttcttttcattcagagtcccttcatgcccttaatttcataaccctctgagaagggctgacttgttagtatcatttcatttcacagctgagacaactgagctccagagagatttgtggagagcggagctcttcttcagctttcatttgtgagtgcttttcctgtgtcaggcacagaacaggcactggggatataacggtgtaaatatttcagggaactaagtatcagttggttgaacgagctgaacttttgagaaagaaactgcattgagtaatcagcagagtttcacaatgcctgagagtccagtaatgtgagaatcagaattagcaatgtgagaatagaatgtattgcacaaagtctcagcagggagtctgtgtctggttttagttccaggtccgggtagcacctttgcaattgaccacttcttccctctctccacctataaggctaatggcctgggatcttgtgatgtttagggctcagatggacactgagatggcctctttaatcaaccaacttcccaggccaatctcttccctttcttttctgatagttgctgtgttggcctcatagccttacctggcataggaaagataaacaatctccttggtgtcaggatttctggtctctggctacgtttcctgcttatgcaatagtagctgggagaggccgaaagaattctggtggggccacacccactggtgaaagaataaatagtgaggtttggcattggccatcagagtcactcctgccttcaccatgaagtccagcggcctcttccccttcctggtgctgcttgccctgggaactctggcaccttgggctgtggaaggctctggaaagtgtaagttggagtcactctggtctaatctgggctgcagggtcagaggtggggtctccttgtggtgtgggtgtgtccccttctgtaggctctgatccctcagcttagtttcgggagacctccctgagggtggaatacatgtctggctgagctccaaggtttgtgtgacagtttgagcttctggaaatgcttcctctatgcagccatgctgtcagcccaggtcccactctctctctctctctctctctctctctctctctctcatactccgccttcttcttcacctgtctgcgactctcaaatcattagtttctgactctgcttccttgtgtctttgcttctgctattttgtctctgtgcttctgccttgggctttagctctcaacttctctcacactggttctatttatctttgtttacctctctccatctccatcactcccagccttcctctctgcctttgtgtagccttgttttgctcttgggtgggaggtcttgactagaagcctgctgcccttttcttgggtgtgaaacgtcccctgtccatttgtctaatttaatcaagcccatcaatacacctggagatcaggcaggcatgaccctttgggctttgtggacagctactgaggtaagggtctctccccctcaaaagtggtgctttgttcaggaggcatgatgggtcctcagtacccagcctcctcctgacctcttgactttctcttcaaaagccttcaaagctggagtctgtcctcctaagaaatctgcccagtgccttagatacaagaaacctgagtgccagagtgactggcagtgtccagggaagaagagatgttgtcctgacacttgtggcatcaaatgcctggatcctgttgacaccccaaacccaagtaagcaggtcggggaactgggtagagaggagtgagcctggggacacagcattagagggatggaactgggtgatgggtcctgccaggcctccttgtcaatccgtcagtgagtcacactgccctaagcaggaaggtagccagcagctggtgaagcagcgggcatttagatagccaggtagttggaagcctcccacctagtcagcactgggtggctggccacctgcatcaatggggggcctgaagttctaggagagccaggtgctatgtttgggggccgccttagggagaaggtggtggtgatagaggtggggaggggatgatcccccctgctgaagctggagcaggggctcactctaaaaagtggggatgggaggggttgtataaagtacaaggcctctgaccggtagcctcactctcacccagcaaggaggaagcctgggaagtgcccagtgacttatggccaatgtttgatgcttaacccccccaatttctgtgagatggatggccagtgcaagcgtgacttgaagtgttgcatgggcatgtgtgggaaatcctgcgtttcccctgtgaaaggtaagcaggggatgagggcacactgagctccctccagccctctcagcctcaaccctctggaggcccaggcatatgggcagggggactcctgaaccctactccaagcacagcctctgtctgactcccttgtccttcaagagaactgttctccaggtctcagggccaggatttccataggatcgcctgtggctttgattctattctagtgtctctgggtgggggtcctgggcaagtgtctttctgagtctcagtttctttatcggtaaaatgtacataatgagattgaaagtgctctgcaaagcactatgtgcactaagaatttattattcaggttgtttccatcatgttttctgaggtgaaatcacaaaggatcagtggagtttgaggattatctagttcaatgctttgagtttagagttttacggtgaaaatgagacttgtctcctgacactaagtctctctcaactatagcgctatcttgctattttctctatctcagaaggatccttgggcaggaggaaggatgtggatatgatttggctggtttctatgctgaagctcttatctgattttctctcacagcttgattcctgccatatggaggaggctctggagtcctgctctgtgtggtccaggtcctttccaccctgagacttggctccaccactgatatcctcctttggggaaaggcttggcacacagcaggctttcaagaagtgccagttgatcaatgaataaataaacgagcctatttctctttgcacatcctgcttctgtgattcgttgggggtatgagtggggtgggaagctgtgagggaagatctagatatgaggcctccttcctatgaatacgtagtgggaggaagaggcttagggactgggggaacttgaatttatatcatgagtgtgaaagtgctgactctgtgatttgggacaagtgattttatctcctaaatttcaatgggattagggatgtacaataacatgaagaatcagaaacctcaattttactgcctctggcaggattgtcaactgcaggtgaaaaactttcctgagacgagtttatgcataagagatcctgccaacagttaagctattttaatccagggggttttcatctaaagccatacagaactgttggggcagattcctgtgttcacctctgtatgtgttacgatatatatattggttttcacacttgatatgttgtaggtctgtctgttgtctaatccaaccaacactctctggacactcagaaaaattaagattatctgcaactcacagcaaatggagtcctcaaaaagactaaccatgttacgtcagtgcccactctcgattattttgaaagacttggaatgccccaaacctcactggaccattctgctacatacttttctcacctccagcaagggttattccagactgaggaacctaggctcgggcaaatacgctactaggagtgtgccccaagtagcaccttgcagggggaggagacctagcgttgaaatgagataaactcctgggttacatacagaacacatgctgaaaaagtgacagtactattttttttctactcttcttctccaatttttggataatgataaacttttataatcttccttaggtcaggttttctggaaaacagtcccagaggcaaatgtttgtgaacagggggtttgctggggagtgtcctggggagtgacacctgtgacagggaaaagaaagcagggctgacaggcaaaaaaagcaaaaatagacaagtgggactacctcaaactaaaaagcttgcaaagctaaagacacagccaccactaccggtctctgcatcttgatggtagtggtcccctgggcccagctgctttctctttatctcttggtcttgtgtcttttacaatctcttgtctctgcacacagggagaacacccactaagccctgtagggctgtatagaaatgctactgatttttgtatgttgatgctgtatcctgcatatttactgaattcattgattggttctaagagtttatttgcagagtctaaaggttcttctgtagatataattatgttatctgcaaagagggataattagacttcttttccaatttgaaaggcttttatttctttctctttcctaattgctctatgacttctaatattaagttgaataagagcagtgagagttggcatgcttttcttgttccagttcagtatgatgttagctgtgggtttgtctatatggcctttattgggttgagatacttttcttctatacctactttattgagagtccttatcatgaagggatattgaattttaccaaatgatttttctgcatctattgagataatcatatggactttttgtccttcattctgttgatgtgatgtatcacatttatttaaaacattcataaatgatttatatatgttgaaacacattcttcatccctggaataaatcctacttgattatagtgtattatctttttaatgtcttgttgggttcagtttgctagtattttattgaggatttttgtatctatgttcataaggaatattggcctgtagttttttggtgtgtgtgtgcatgtgtgtgtccacgtgcccttatttagttttggtatcagggtaatgttggactcatagaatgagtttgggagaattttctcctttctcctccttaattttttggaatagtttaaagaagaactgatgttaactcttctttaaaagtttggtagaactcagcagtgaagtcttccattcctgggattttgttgttgttgttaggaagctttttattactgattcagtctcattactcattattgaactgctcatggtttctaaatttttttctggttcaatctttataggttatacatttctaagaatttatcagtttcctctaggttttccaatttgttagcttatagttgctcataatagtatctaagaatcctttgtatttctgtgtcaccagtggtaatgtctgctttttcatttctgattttatttgagtcttctctctttttttccctaggtggtctagtttatggtttgccagttttgtgtatcttttcagaaatccaactttttgttttgttgatcttttgtaatttttagtctctctcttgtgtatttctgctctgatctttattatttctttctttctactaattttgggtttggcttgtttgtgcttttccagttccttgagatgcatcattaggttgtttatttgaaacctttctagttttttaatgtagacatttattgctataaactcgcctcttaatactgcttttgctgggtctcataggttttggtatgttgtgtttatatttttgattatttcaaggaattttgaaattgtattcttaatttctttcttcacccattatcattcaggtgcatgttgtttaatttccatgtatttgtatacttttaaatgttcctattgttattgctttctagttttattccattatggtcagataaaatacttggtatgattttgatttgttaaaattcttgagacttgttttgtaccctatggctaacttttgacattgttacttgtgctgatggaatacgtattctgcagttatttggtgaaatgtgctgtaaatgtctgttaggtctgcttagtctatgatgcagtttatatctgatatttctttgttgattttctgttaaaataatctttccaatgctgacagtagggtgttgaagtccctaactattattgtattggggtctatatattccttaatatctaataatatttactttatatatctggacgctccactgttgagtgcatacatatttacaattgttatattcttttactaaattagtccctttataattatataatgctattccttgtctcttttttccagtttctaatttgaagtctgttttgtctgatataaatatagctactcctgcttgcttttgatttgttttcatggaatatttttccttctctttactttcaccctatgtatgtctttacaggtgaggttagttttcactatatagttgggtcttgttttttaatccttttagccagtctatatttttaaaatggggaatttaatctgtttatattcagggttattactgacaggtgagtacttactcctatcatttgattgattgtttcctggttgtttttgtatatcctttgctctttacttcccttcttattgtttatttttgtggttgggtggttttctgtaataataaggtttgattcctttctctttcttccttgtgttttggttctatcagtgagttttatagtttcaaatgctttcatgatggtgtcaattcatggtgcaccatgggactgaaatttaagttttataatgaatgcttttttccttaattcctgcttttatgtcttcatgactgtgtaaaaacttcattagttgatggattcaaaagactaacttgaagtcattttggaatgtgaatctgggccagataaaccttcatgtcctctctacactattctaaaaatggatgttcctcctgcttgcttggtagctaaaaacatatctgacttcagcaatagtaagaagtagatttattaatgcacacagaagaattgggacctgatgtgggaggcagagagatgatgagggaaagctctctggagtagctgctctatttaccaacaccgacctttctttctagcacaaacttggggctacctccacacgttgagtgttttccctgtgtaaatctgctgttttcttctaactctgaattggcatgtcctcactgagtttcagtccaaatttacaaaaacaaaatccctcccaactgatttaatatgcctgcactcatattttcaagtgcctgcactcatatttaaagtgtctgtactttaaatatttaaagtgtctgcactcatattttcaagatgtttgtttgcaaccccacacactgacctttctgtttccaaactaatttgatatgcactgcaattctgtgataccgaaacatgagaaggatattacatgaaaggaaaacaattttccagccttgctataaacataaaggcaaaaatcctaaacaaaactttacacagggaatttggtcatatataaaaatgatgaaacatcatacacaagtaaggttttatgtcaacaatttatgattggtgtaacatttaaaagtaaatcaatgggatacttctcattaatggagtacaggggaaaatgttatgattatcttcgtattggctatagaatgtgtgaaagagtcacttatctcttcatgataaatgagaaaataatgacagaacattagaagttcacttatttgatggcaagcctatacaaaaaccatacagcagagggaactactttcacaacggtggagtaaaatctgctccttcataaaaggagggagaataagtttaagaatccattattcaaaattcttaggaccagaaatttttcaaattttggatattttcacattttgtaatctttgcatataaataatgagatatcttagggatgagaggcaagtgtaaacattatctgtgtttcacatataccttatacacataggctgaaggtaattttatgcaatatttttaccggtttcctgcatgaaacaaagtttgtatacactgaaacatcagaaagaaagttgtccctatctcagccgcccatgtggacaatctgtgattgtttagtatcaccattgtatctgactcgaatttatatgctaccaataagcaatcattttattacacttattcacccataaatatttaacaataaaaatacgacataccattaatactgtgaaaataatgtgttcagggtaactaagcagcacagtagcatcaccaaaatacctgccccagctgttaaacaacagcaagaagcaacagcagcaggatttcagtctccatctacgatgctgtgttttgattaaacgattattggtcactgtattttatttttgtaggtgaaaagagacatcacaagcaattgagggaccaggaagtggatcctctagagatgaggaggcattctgctggatgacttttaaaaatgttttctccagagtcatctctctcattaacaatgttttttgtcttagaaatttcttgttgatttttaaacttacatgatttcttgttttggtatgaatacaggctgcttcagtccttcaataagcccatcacactttttcaccatgtcatctatcagcactttttctgcagtgttacgaacatcagcttcatcactgtcagcctgcgttttgcctgcaacccatcaaatgaggtcaggagaggagttttccacttttggcttcatgttggtgctcaaaacttttaggattttggagcatttcagatttcagatttctgggtagagatgctcaacctgtactcacatatattttcaatatcaactttttttccccagaattttggaattcagccaaaggtttgtcacaatccaaggagtggcatcattaagaatcatcaagaaaaacaagaaaactttagcaagaacagaaagtttagtggcagtataacttttccattcccatctttgtgcccagctgtgtggtagcctgaaagccaccaggtttgctccacagtggctgtgaaaaccagcagcccagcagcccctgcacgggaggatttcctttctgctttcgaaagctctgtccccggaaaactgtcactatttcatttgtatgtcagctctctaaaaaggcacccttttcatagcatgtatttacctcgtctaactcagagtgtgctctatgtggacagtgctatttctggggcaattttttgccatcacagctacttccgacggtgaggccaattggagctaacaagaggctgaccaaaaaacaaaaaaggaaaaggtaggaaagatttccaggtgcttaaagaaaatctctgtcacatctgtgggactttagaataccacactcctgcacagaattgtgtgtttgccccagggctgtgtacatgctaaggaaagacctcagatgaccctaattgttcacctctggctgaattaaagtctctatgtgaacaggaggtgaaatacaacataaagttgcaagtttcccagtggaatgttgacagtgtatctcaatggatacacatgcagccccttggaaaagtccaggtgatttattggtttagtatttaagatcatttctgtccaatcatgagctgacctctaagctaatggaacagcgtctttagtggctacacatgacacacgatacagactttagcaaattagtccaggaaagttactaaggaagtaatcaacagcaaagactgtgcaaacaaaccctggggagagaatctgatttccaaactggccacattatattatgtaaaaagtccaatttcattaaagaattacgagacatgcaaagaaacaaaaaatattgcccatacagagaagggaagggaaacaatgaacagagatgatcctttaggagctcagatgatggattagtagacaaagacatcagctattataaatacactgaaataactaaaggaaactctggacaaaagactaaaggaatgtatgagaataatgtcttacaacatagaaagaattaaagataagtaatgaagttgtaaagtacaaccaatgaaatagaaattcaaaacaggggttcaccagaagacagaaacagaagaaaggatcggctaacttaattacaggtcatttgagattatacactctaaggaacaataaagaaaataattaagaaaaatgaacagagcctcagagacctgaagaacacaatctagtgtaaaaacatatgcataatgggaatctcaggagagagaagaaagagaaaggcgcagaaagaatatatgaagatagaatgacgacgaaaatttttattttgattaaaaacattaatctctacatctaagaagctcaaagaacactaagtaggaaaatctctaagagatccacacctagatcgaaatattagtgacaaaggcaaggagaaaattttgaaagcaagggacaagccacttatcatgagcagttaataaactaaacagtaatttttcattaaaatcatgaaagccagaaggtagtgagagaacacattaaaaacggcagaagaaaaacctatcaaccaaggattctatatcttggtatgtctattcttcagaagtcagggaaaaattaaggcattcctggatatacaaaaactgaagagttcatcaccatcaacctgactgcaagaaatactgacatgatgatatatatatatacacgcatatatatgtatatatatatacacgcatatatatgtatatatatatacacgcatatatatgtatatatatatatacacgcatatatatgtatatatatacacgcatatatgtacatgtatatatatatatatacacacatacatacacagaaaatccttaagaatccctcaaaatattattagagctaataaatgacctcagcaaggttcaggacataatgtcaaaatacaacactctatggttttaagaataaaatttcatttacaatagcataaaaagaataggataattagggattcatttaaccaaaaaatggagaaacttttatactgaaaatggaaaattatttttcaaggaaataaaagaagacccccaaaatagaaagctatactgtgttcatggattggaaaactcgatgttgccaagctggtaattcttcacaaattgatctataaattcaatgcaatccctagaaaacttcaggtgaatttttgttgaaatagatcagtgaatcccaaaatttgtatacaaatgcaagggacccagaatagccaaaacagtcttaaaaaaaaagggcagaattggaggactcacatttttttatttcaacgtgtactacaaatctacaatttcaagatgttgtgttactagcataaggataaacacaatatatcaaaggaatagaattgagaatccataaataagccattacattttaaattgtcttattttcaacaaaggtacaaaaactatccagtggggatagagtagtcttttcaacaaataatggggaaaaactggatatgcacctgcaaaaaaatatacatggactgttacatcatatcaagtacaaaaatgggctccaaataaaacaagacctaaatatatgaactaaaattacaaaactctttgaggaaaacataaatgtatatcttcatgatctggtaatcagcatcaatttcttagatatgctaccaaaagcacaagcaacaaaaggaataatagatccaaaaatagattaaagttaaaaactttggtgagtcaaagggcactaataagaaatgaaaagataacccacagacatgggagaaaatatttgcaaattttatatctgataagggcctagtattcaaaatacaaaaagaactcctaaaatcaaccataaaagacaaaaaccatgattaaaaactgggcatcagattttaacagacatttctccaaaagaaaatgtacaaatggccaataagcatgtaaaatgatgggtgatatcattagacctcaggaaaatgcaaatcagaaccacaacgagaagccacttcacatgtactatgatagctataatcttaaaaaaaaaaaacctaaaataacaagtgttagtgaggatgtggagaatctggaacattcatacattgctggtgggaacataaaatggtacatcctctgtggaaaacagtctggcagttccttgaagagttaaacatagagttatcatgtgactcatcagttccactttaagaattatactcaaggtaattgaaaacattttaacacaaaatttgcacataaatgttcatagtaggattaataatagtacatacaaactagaaacatccaaatgttcaccaatggataaatggataaacaaaatgtgatgtatccattcagtgaaatattattcatacataaaaagtaaaaaaaaaaaaaagatcccaccctacaacatggatgagctttgaaaacataattctgcatgaaagaagtcagatgcaatgagccacatattatatactttaattaatataaagtgtccagaataagtcaattcataaaaagcaggttagtggttgccaagggagaagtaaaggtaggaggaaggattgagtgccatcaggtataggggttcttcatgggagtaatgaagttgttccggaattaacaagtggtgagggttgcacaagcttatcaaaatactgaaaaccactatattgtacaccttaaaaggtgcatgtcatggtttgtaaattgtatctcaataagaaagtagcacaaataattaactgaataactaaacaaatataagttaaacacacttgctttgattcctggactgggagactagattaccacttctgattctgtaagtgaagtttgttggcatacaaccacatccattggtaagaatgatctttgactgcctttgtcctatagtggtacagacaaggagttgcaataaagatcttaaggcatataaaacctacaatattcatttcctggctctttgctgaagtttgttgactcctatgttaaagcaatcaaatttttaatgaaaaacctttccaaaaagtacactgctggtccaggtggcttcacaggtaaatgctattaaacatctacaaattatacattctacaaaaatgttttaagacaagagaagcagagaaaacact

SEQ ID NO: 125 - DNA, 594 bp, Homo sapiens
gtcactcctgccttcaccatgaagtccagcggcctcttccccttcctggtgctgcttgccctgggaactctggcaccttgggctgtggaaggctctggaaagtccttcaaagctggagtctgtcctcctaagaaatctgcccagtgccttagatacaagaaacctgagtgccagagtgactggcagtgtccagggaagaagagatgttgtcctgacacttgtggcatcaaatgcctggatcctgttgacaccccaaacccaacaaggaggaagcctgggaagtgcccagtgacttatggccaatgtttgatgcttaacccccccaatttctgtgagatggatggccagtgcaagcgtgacttgaagtgttgcatgggcatgtgtgggaaatcctgcgtttcccctgtgaaagcttgattcctgccatatggaggaggctctggagtcctgctctgtgtggtccaggtcctttccaccctgagacttggctccaccactgatatcctcctttggggaaaggcttggcacacagcaggctttcaagaagtgccagttgatcaatgaataaataaacgagcctatttctctttgcac

SEQ ID NO: 126 - protein, 132 aa, Homo sapiens
MKSSGLFPFLVLLALGTLAPWAVEGSGKSFKAGVCPPKKSAQCLRYKKPECQSDWQCPGKKRCCPDTCGIKCLDPVDTPNPTRRKPGKCPVTYGQCLMLNPPNFCEMDGQCKRDLKCCMGMCGKSCVSPVKA

SEQ ID NO: 127 - DNA, 27125 bp, Mus musculus
  misc_feature (1)...(27125): n = A,T,C or G
ccacaggcagctctcactgagattctcagatcacgtccactccccctcttaaacacacatatccttccctatgacctattccttctccattttcattaaagaacctacagttacagagacacctccaagatccaaaccaagaagactcgtggaagcagcatcttatctttgcacatggcaggcagcatcctcgtgggctatggggtctacatctgcttctcctgatactctgtcgtcagctccaaaacctgcatgagttcagtgggattcagtgctgagaatcagcaatggctattttcagttgcacaaaagagacagtcctctcgtaggaacaaagtaaccaccacagaaacccaagcttgcatcaccagccacagcactgtgtcttgacagatcatagagctcactcctcactccatcatcaaagttatcattcccatatatagccaccatagcatcataacctccgtagatccggagcacagaccacctgcacctagctccatggtagccctatcctcttgctgttggtctatgatatggtcccagcggctgcctcagcaatgttataagtgaatcacagaaccctctgtgctttccctgcaacttctgaaggtctctatccagctttagatagttcaaccaggaggcaactgccccatctttagcatcaaattgagcatgacatttcagaacccagtgcacaccaatactgttggtttaaatgcttcatagtgatagtaactccaaccatgtgttcagagaacgtgatttgagaagggaaagccctccaccacctccggtgtgcacaactgctcttccagccacctctacatgaggaattgctaagctacacacagagccactatcagtcttgactggctcagaaacgaacttcccttctgtgtgccttagttcctgtgaaccagtcagtgaggttttctattgctttgttcctctgactcttcacggggattaatctctctggtttttcttttctttttctgggcaggaatgtgtggggagcgggtgtggcggcagtcccaaaggcgccagggactgcagctaagtcatatgacttgcacctgacttcctcatataagacacaaacatcttgagtgctgcgcaggtgtaccaggatacaggtgaatccaatttggtggagatttgcccctgctgccctgattagctgaagcctcgtgactggcgagggggcatggcctgcagtgcgtggatgagagagagtataaaaggagtgagaggcccagggttcgggggagatatataaacaagggagatataaaaacaagggagatataaacaggggagatataaacaagggagatatatggagaaagaagaaacaggactgaataaatgtgtgcagaaggatcctgtagcagcgtcgttcttcctggcctgttgagtgcgcgcaacaggaatgcttccactttcatcagctctgccttgttttgctctgtgttgttttgttttgtttgaggcaagtgtcatgatgtagcccaggctggctgaacttgagatcctcctgcctcagccttcccaaggttggaccaccacatcaggctcttcatctcccttctgtgtctgagctccccctgctctgttcagcagaactcttctattccatgaatgaaatacttcccaactccggaatgaaaaacaaaggcaagactcacaagctaagctgttgcagttttgtcttttgtccagatactatcacatctgttgggaatagaaaggaaagtaaggcgagctgagttcttgggacctgcagtgtatgctgtggtacagcagcacatgaactgcaccagctacacaccaacgaggagacataacagatattattagctaaatcaaggccaaaaatcttacttccatctggatgcagcagtgtttcacactgagtattagagcagaggaaaaacagacactctgtctccctcctttgtgtctctgcagatcatcgctgtccaaaatgttaactaacaccattaacctgggcctcaaaacttgtttactttgatttatttttttaaaaaagttgttttaaaaggcttttaataggtactctaaaagcattttccccaaaaggctgtatttgcataatattctcccatcttcaagcatccgtctcatcatacttgtattttaagagagcagctacactatgctgagttcaaaccccacctcttacactgcctcaggttaaacttagctctctaaagccgtttcctggcctgtaaaacagtgacagcaatgacgtctggcatatagggtttatgaggactggacaaaatgataatgaacaactgtctgtaacagtccctggcaacaacatgaacacaataaacattagcagctgtcaccagcaagcagcaatgccactcctccctgagtcaccctagctagaatatttggggtgaaaaatcccctaaacacaagtggaaaaagtaccaagattccctggaggacaacaccactcaaggactgaagactctcaactatcctattgacacagaagaccctagcattaagaaacaataacctaactgggcagtggaggctcacacccttaatcccagcactcaggagacagaggctagagaatgtctgtgttcaaggccagcctgatctacaaagagagttccaggacagccagggctacacagagaaagcctattttgagaagccaaaccaatcatacaaacaaaataacagactattggtttctcctggagtaaactgtcctctggaaggcattttctgcattctatatactaacaatgatatattttctttattattcaaaaagtaacagttattgttttttatttggtttggtttggtttggtttggtttggtttggtttggttttaaggggaaatagtgccaatttagaaggcatgctttttcagaaagtcatgggctcagtgtgaagagtcttacagttcacccactcagctcagcaccggagacatccatctgtccttagctcagcaaagagatctgagttatgaggcttttatttaaaaagtttctaatcagtttgctcaagaaaaaaagcatgaatttggaagtcttcatggaactttgtatacaactcagtgactttttgtttgccatatccccaaatcttggttcagatgataatggcttctggtagaatttgtagaatccatttttgtagatttgtagaagctatttgtcagatggctgccccgaaaccattgcagcaaattagtttagccctatttaaatacaagatagatcattttctattgcattacaagaatgtattgcttacactctttatagagctatatatttttttggatgtgggaatattacaatctagtttctagaggaaaaccactcaaagctgttcctacctgttacgtaaaggatgctgttagcaggggtaatacacagaatgtggtctcagatccttggagttctttgacatgagttaagttcctgtccttactagggcatctctcaagctgtgaaaacaccagaggaaatgagattgtgggatgtcagaaaggtctccctcctgcagccgcttctctgaaaaccaactagatacaaagctttgctctgacactaaaggaaacatttagaacagaaagctagtccgactcttccttctgaaatgccaattggccctgtgttttcctggtctattttccttctcctttctttgaaatcaatgggctcagtccctgtaaatttcccaagcaatgggtcgtgtagtaaacagaggtgtgtaactacaaagtgcaggttcagaccagcttcctggaaaagatggattagcgagtcactaccatctagaactgcctaaagagagctacagcttcttccacagcgcatggaagaacccagctcagcccagaaagcaccagaaagactttgccctcaactacctcctcaccctggactacgaaaccacaacactcattttctttaaaagaatttttttttattttgtaattaaaatataattacactgtttccccacctccccttcccttcctccctccaaacttcccgatgtctcaccctgccctcactctcagactcatggtcattttttctttaagtggtactagtacatctatatgcataagcatgaacccaacttgctgagtccattttctgttgcttgtatgtgtatacgttcagggatgacaggttcctattggataactgatttaaaggctcatccctggacaggattatttctccttgcaacctgtagctctttctttaggggtagggttctataagatttttcccctccactattttttaaaattatgtgtttatatatgcatgtcggtgtgaggatatgtgcacaaggatgcaggtgccctcagagtccagaagacagtctctatcccctgaggatggagttgtcccttcccagtccagggaacccattgggaccagtactcaattctagagggcagcaccagctcttacccactgagccatctctctggttccattatgtctcattttcacaaatattttcagcagtaacacaagaaaagccacagagacaaatgataaaacacaactttagacttccattcacttgcaaatccaaatggtttacagtaaacatccacgtacctagttacttacagaacttaaaggtgtgaaaaggaagatttcaccacacagattcaaccctcagcgactgctgctcacactagctaaggcgacaccccgtgcctcggtttccttgtttgtaaaaatgagaactgtatcagttacttttgtaaaacagtgaccaaaatatctgacagaagggacttaagggaggaagattttactttggccaacggctgtggaatattcagcccttggtcagtggctctgcttctaggcccactgtcaggcaggttaccatggtgacaggattaggtgactcaggagtatcttaatttgtccacagacagaaagtttaaaaaaggacagaaatgcccggcatggtggtgcatgcctttaatcccagggaggcagaggcaggcagatttctgagttcaaggccagcctggtctacaaagtgagttccaggacagccagggctacacagagaaaccctatcttgaaaaacaaacaacaacaacaacagaaattaaaaaaaaaaaagagccagatgacatataacatactccacaccatccaaacccccactgccaatgacatacttcctctgattatgtgccttctcccctgtgctacctcccaacaatgctatcatattatgtactcaacaagggatcatcagtccattgattaatccatgacccacttgtctctgaaacatcattacagacacattcaaaggtgggttgcactaaccccctagctatttcttaatccaatcaggcagacaattaaaactagtcgtctcagggataataataacagtattggtttacatcattattatctccatccatcagagctgtctagtaccaagagtattgggaatggtatactatttttttaaaaaaagaacataggcaaagctttagttttggaactttgatcacattccacattcaagcttgatcctgggttgggagtatctcagtgggcgtaggcttgcaaagccctggggcccatcccccacatctccccagacatttcccgttttagattgtatagcaactattccataaaaacaactagaagaatcttttttcttttctttctttctttctttctttctttctttctttctttctttctcctcttctttatgttttttttaacatttcttctattccaaatgcattaataagctgtctgtgcagccagggccttgagaagccaagatctttgaaagctggagaactcccaggaaacgcccctactgctggcactctccgctcaggcacttgccagttcataagcacagtgggtatggatcgaaaactgagacgctgggcagaaaatggctgttagcaggaaagagactctggcttgaggaggctcaaaaaaaagctgaaattcagatacaccaagttaaccagggcttcagacaaaatcctgaagggagagtgtaaaacggagattcttgtatgggcagagatgctcttggctcctgtgtctttcctcattcataagcagagcagggcaggtgtgaaacagacagaataaaaagcagttgaggaattatgcagaggtgatcatggtcttatggagatgaacaaataaacgctggggttcagagcccaccagagcagggaagccttgggaagctccttgtactttcagtagaaattcattctagaaatgagtacaaagacgtaaagactagcttttagaaatggaacctcaagccagcttgatccctcatggattctgggggtttctggttttggtctgactgctgacacccctgaacacaaactgtgtgtgtgtgtgtgtgtgtgtgtgtgtgtgtgtgtgtgtgtgtgtgtgtgagagagagagagagagagagagagacagagacagagacagagacagagagacagagagacagagagagaaacagagaaacagagacagagagagacagacagacacagagagatgtctacaagtcaatagaaaattaccagctatagagagacaggttcaagagcaaaatgtacattcagatcatacacaagtaatctagacattggaataatcagactcagaacataatgactgtcaacatggtaaggagaatggatacaagatgggggatgcctcaaggacctaaagtctacatagttttaaaatctaagtagaaattctagtaccaaaaaataaaaccacaagcagacagtaactaaaaaggcaacattcaataacagaacctagcaattgttgagacataagtgaagaaagtcagagtgacctagaacagtgaactggtagaaaacaggcaggtggaaacacctgaccccagttcttagaaagaaggaggaaattccaaaagagcatcatcaatcatgtagaaggtttcaagaggctgtctatgtgtctgattggaatccaaggaggttgtcgatggaaacctgagatgagctcaggttggaaactataggcattatttggagagctaattcacagctaagaactttccaaagctgatttaatcaggctatggattcctggtgagaaagctcaacctggaactccaggtgaccacctcaacttccccagtttctcctggacgcttgaaaggccctgctctctcggtcaggctactgcagtcgtctctgctggacattatgagttcatgagttgatgatgtattcctatcttcttcctgtttctactgccacttgatgtttatttttatttatttatttatttatttattgtactttcactcgctttaaacttaataaactcacccactcaaaactgaaactatggctgtcataagtaaccctctcaaccgttgaaatcagccctcagcaccacacaggaggctgcctgcactaagcaaatgccccgccaatgggccatatcaccagatttctttaaaaaaaaaagttttaagacaagctctcatgtcattgctcaggatggcctgccaccctgcagccaggcaggccttgaacttgtgcctcagccataaacatagctgggattacaggctgtactcatcactggctcagcatctaccaaattatgttaaaatgatggtcttgtcttttcgtttccagcactaaaatctctcattcgtttttctttcctatagcattgacctctatctctaatacagtactaaatactgttagggctaataggcaaacaaacaaacaaaatacaaaacaaaaaatcagaaataaacaaacaaacttaaagaaaagtaacattacagaggaaagtaaaaccatcaggaaatgtttggcaaacgtatacagagagcaagtacgcgtgagtcctcccgctcacccatggagtgctcacccaggaacgaaacatctgtatcccagcctccactgcaaggtttatagaccatgaggaagagggcatggaaacggtgtaaagggcagaggtcagggaggactgcggagaaatactgtttctctggaatacagcaacagtgcacttgccaacccaaggcagctgtcctaggagtcaggttttcaggttcacccaggcaagattccaacatggagcatgacatttcaggacttcttcaggagggacattcaggctttttttggggggtggggggtggggggtggggggagtttggtggccctggttagttgactctgctcctgatttatgagtgtttaaacaggacaaattaaactcatgacagaagtgagggaaggatcgttggagaaggcctgagggacaaatatgatcaaaatacattgtagcttgtgtgaattctacaagaatttttttaaagttgtattttaaatgcatgggttagggactgtgtctggtggccaagaatgtacactgaacagaggctctggactcacctggatggcaggaactacctttttgtaagagtttgccctctaggaaaggaacagctcccttaaatgagcttcattgtaacctcctgggcaagcacagctctacataaactattacgacatcagtaattctaatcatccattgtcccttgtccccagttcacagccacagggacctcactgatcagagctgctatggtgtccttcttattggcttggcttcgcccttttcaacagaggtccaccctgctgagtaagtgctcactgatctcttctgtccaggctttagtggacttcagaaggaagaggcaccggctcttctctcccgtgctcccaaaggcttgtggttatggagatggttgcctcaataggaggtgggctctgacagctggatgggtctgggggaagccagacacatggcaggctccaagtcaatgaccaagcagggcctcctctctctgcacacccagtgaggctgtcttggggtagaaaggagttaagttccaaggaatctcctaccccaaacctccaaattacagcttgtcattgcaagcttcgaactctcacactttctttgcaggagctgggactacgctcaatcagcctggggagttatcaggtgttagcctgttaccccactgggaatcccttcagccacctttgttctccatcttgaatggagccatgggttggccatatcctgccacctactcccttggatctgagctggacccttgcatctggcgtctacactgctgctgaaatcttctcaccgtgcacatccaaggatatctctatggtaaaagtccagaaaggctaaagatgttgtccacaatctctcggcaatgaccagatatatccccaccagtatcacaacttgcaacgcgctccgttcccatctgccctctgcctccctactgtgttgattcccatttccaaaactagctcagaatgcatcccactggcagccaggcaatgccttcttgcagatctggaggcttcaggagcctttgctgcctcttaggctcctgcagagagatggccttgctctctctgggcccttttcccccaagatgctgtgcagtcgtctcactaaatcaaaactgccagaactgagttttaagcgatatatagccaccacatctattttgttcctttatactttcaaagtaggacagattcgcaaaatacattgagtcagactcagtgtccacgatggagagacgagtgggtagcttgtgcttctttagaaggggcactgggcagcgtgttagggctagggggtagtggggcaggacagacctgtcccgggacaagagtggctactcgcaggccggttttgctttcgctctgagtgtggtgggcggtgggacggtcccgaatctcctcaaacgggcactccgagagttaattcgaaagcgccaccagccttgggggcgatcgacgcacttgtccttgagatgtagagacagagagagaaagcaagagacacagtcctgggaaagtcctgccggctatccagacaattataaaaatgtgtctcccaaggtcagcgttccaacagcctcaccctcggcatccagcagctcctctcagtgccggtccagcatgtgtcaatcacgctgtaagtacctgagggccgggaccagggtgacttgatgagaggagaaggcttgagaaagaacagacagaagccctggacccattaagggagactaaagggctgccagcaactgcaggccaagggaaggaagaggggaaagatggtcgtgctagattgcgctgcaccgagcatggtctcattatagaacaaccctgggggctacggctatgcccgtttcacagaagagaactaaagcccagccttgaaaccaatgtaaggaaaatgcaggtctcaggcagtccccaaacaagatctgggaggtcttgcttcatctgtcagccccggggaagggcttaaattatgtgtggagggaggtcagtacccagaatggatggaaaaaattgccagaatggctgaagaaagaggcaggtcaaaaccaagttgacaagctccacctgccctttgtttcccttccagacctcctctttttggccacccttgccctcctaaaccacctcagtttggccagggtcattccagtctctggacctgccaggtgtcttagccagtcccgaaacctgctgaagaccacagatgacatggtgaagacggtgagtttctcctgtccttctggcttcaaagttccgctgttgacatgacttctaacctatctggtatctgctgggaagtttatggtatctggcaggaaccgtagagggtttcaagacttctaaatataatctaaaggaaactgtgtctctagagaaaggaagaatggtaataaattgtaacggcatcggtttaggctgtgtctacacagaggaaagtggggacttgcaatgtccctcccagcctgcctgcctgtgtgacacagtgtcaggtgctccctgcttctgcttcagggcaggtggaacagggagacagtctctaggtacactctctgtgcttcacaagccatagagatgaattagattgtctctccccctgctcaccagtgtccagcactgtgatgcagtcccttgtcggatggacacatgtcagggaggactcagacatcagatagcaagcaggtccagcctccagttttctggggcaagtgtgatccagttttagtcacggctccactcatttttctcaggtttcatgtttgaatgcaaaatagccttttccgttgtaaaattgccacggtttcctctcgctttggggacaaagctacagcaaaatgctaatgtgtttgagatatcctgcagctgctagggctggagatccagtagaattctggcttaattatgaatgggtctcccgggttctatcccccaacagagcgtgcgttcataagcacctgggaacagaggagggaaggagggaaactctgtcttcctgttttgtttttaaatctttcttgaggatcttctagcttgttgtcttatggctatcccaacataagctccgctccacaagcccttcttggtgaattttctttctttccttcccgtcttgcataacgtgctgctggctgttcctccaagctcagtcttaattgagtggggttcccaggagggagagatggctctgtggttaagagagctggctgctcttccagaggtccagagtttccacaccctcatggtggctcacaatcatggtaactctgatcatagggaacctgtcgttttctctgtgcctctgtgggcactgagcacatgccacacagacatccatgcaggcagaacactcttggccatgaaaccttaaaatgaaggagaaaccttacgagaggttccctaaggaatccctgcagaagggagagattgttttcctaagatgaggtttggtgtggaggggatgaggtattcaaagttaactagccgctcctcactcctctgctgccaaataccagcactgggcttcgagacacaatagaattcgaccttgttttcgtttgggtcactattgctctctagttgaacacggaatccacgggggcacattgctgtctgtcctttgtcacaccccaggaccacagctgcatggaaaagtcatcgcaggcttcagtcagagagctgttgacttcctaatatgttgtgtaattctgttcagtggtgctttccagcacaccagggaataagagacagtccccgcgtatgtaaattaaagctcaactagtatttagggcttgcaagtttgttacagccatcaagctgtgactttaacagtttcctctttagaagttaaacttgaaaaaaaatagagggagagagagattcacagggcacagctgcttggaaaaaggaaaagccacaggactcaccagaagcaagcagcacagtgtggcactgatgctgatgagtacagcctgctgcaccccagtgttcacatggtgaaaaaaataccctgctggcggacagcctaggcaaagggggaggagagtagggagagcgtgcgggaggttgggtttcttagcttatgaagagcctgagtttcctacaggccaaagagatgacggttcagagtggccagcctaggctctgctgatccactgcgatgcaggtctcagagggaaccagctgtcttgctgagagattcacctcagcttctccttatgtttttcccaggccagagaaaaactgaaacattattcctgcactgctgaagacatcgatcatgaagacatcacacgggaccaaaccagcacattgaagacctgtttaccactggaactacacaaggtatggaggacccccacccaaaaaacaacaacaacaacaacaaaaaacacaattaagagccgtgcagccaacctcagctgtctccagatacttacttgtagctatcaaacgtgagagttttgaagaaaaaaaaaaaagtcaacaaccatacaaatacttctacaagctgaaggatatactcggtaactaggaggtggctatggtggtatagacctttaattccagcacttgatggatagaggaaggccggctcctgttaagttagaggccagtcagggatacacagcaagatttcatctttaaaaagaaagggggtggtgtggcgggtgaagcttacttattgaagtgctcatgtcacaagcctggggacctaagttcccatccccagcacccatgtaggagctgggtgtgatggtttcacatgcagagacaggaggatacctgggccagctagtctagccgaatccatgagctgcaggcccagtgagagaacctgtatcagaaaacaagaaagtcaggagagcggctgagaaagaccccaaagatcatcctccgatttccacgagtacatgcacctgcacacacgtgcacacaggaatcctatacatagccacccaaaagcagttatgatggtgaagtttcttttactggaatgaaaagttagtttgagaaaaaaatatcagagagatttatattaagagtgaatgggtggggggtatgcatgcctttaatctcagcacttgataggcagaggcagatggatctctgtgagttcaaggccggcctggtctacagagtaagttccaggacagccagtgctacaatagaaacaggtgatggtgatgatggtgatgatggcggtgatgatgatgatgatgacgaagacaaactcctcggtttatgattttcttctagaacgagagttgcctggctactagagagacttcttccacaacagtaagtaagcactctaagggttccttccccatgacggattcataacactgatgcctggtcattctttctctagagagggagctgcctgcccccacagaagacgtctttgatgatggtaagccacatcacttttctgaaatgcagcagggtcctgtagttccagcccatctcaatgattccttgcccattgtgtcctgcgctctagaccctgtgccttggtagcatctatgaggacttgaagatgtaccagacagagttccaggccatcaacgcagcacttcagaatcacaaccatcagcagatcattctagacaagggcatgctggtggccatcgatgagctgatgcaggtaagccttcctcctatcagccagcgctccttttccatggtgaagagaggtcctttattagatatgataaaatcagcacagcttgggttgggagagacctgaacacccccaccccaccccacaccctcatcccccaaccatgaaaggccttgcaaggttacatttgcttagagagccttgagggggcctctacaataagggcaaatgcaagcagccttctacttgttgactcatgatacaaatcaggcacttttcaaatgcttcttctcataccatccccacaacaagcaaataaggtctctacagaggaggaaactgaagcttaagaggatgaacgagggttccctacaaaagggttttttgttgtttggtttggtttggtttggtttggtttggtttggtttttccgagacagggtttctctgtatagccctggctgtcctggaactcactttgtagatcaggctggcctcgaactcagaactccacctgcctctgcctcccaagtgctgggattaaaggtgtgcgccaccattgcccagcttattgttgttttaaatacattcttttcttaaaggttcaagattaggactggagagacagtccgatgattaagaggacttgagtttggcctggggctcctatgtaacaaacagggtgtggtcctgaactgctctctaactccagagagtggagacaggaggcctatggaggctttcttgctgcaagtttagccatgaaatctccaggttcagggagaaagcatgcctcaaagaaataagatggagagtcacgtgatctcttctctggcttctgcatggtgtaggcacagatatgcacatgtttgagtgcatacaatacaggcaaacatacacgtgtcctttttaaaatgtataggatggacattctaggggctgcacacatattcaaatattactaggggaagcacttggggctggtgtccaagtataatctattttgaaccaaaatgtgaccaaaatgaaaagtggtcttacatctaggtaattacagtgttaggtatccgtgggaactttgctgtaccaccagtaacacaaagcacaggagtgtgcacaccagagacaagcaccttggcaaccaaggcgtgggatgaacatatgttcagaagtcactgcctggaaagcaattgtttttcatttcatacatactgtcttgcacagggtttctatgtcttagataaaatatcatgacggaaagcaagttggggaggaaagggtttatttcatcttgtagagtgtagtgagtctattacccagggaagtggaggcagaagctgatgctggagaggactcctggtgactggagtgctccacatgacttgctcagtgtgctttgtatagcacccaggaccaccaggctagggtgagctggtgcctcccacatcaactgtcaatcaagaaaatcaccagaggcttgcccactggccaatctggctggaggtgtttttctcaatgaccacaggcttgtgtagagttaacataaaagcacccaggacattacatattgccagatgactcctttgaaagacagtgaagtttatgcaggtcaaacaacctatcatgtagagatttgtaatggatattgcatgaacaaggccagaagtcaggtgatttggatagtaggaagaggtctaccagggaccagccaactatgctgacagggttaactcttgtcagcctgtttgtaaaataagatgactttaaatagcctatgtctctcttgagatttttgtgaggagcaagcaaaaatcttaaacatcacagaaacctaagttcttattctatgttatgaaatcaaaggatcgagtggggaaacacggtactggcttgtttatctaccacaaatagcgtttctatcagagataggtctgttgttgataataagctctaatccatagatcctacttaccctccaactccctcctctaaaagaacaggacttcttaacataatttataaaaattaattagctattgctgcaggtgctacctcatagactcacaccttctgagagatcagctctaatgacaatttctttctggaaaatttaggggtcttgtcagagatcattaaaaacataggtatatgctcacaaaagagtatttcttccctcttttcctgcaggaacacagcaggagtagatgtgaaatgggtctaggagtgtgatgaggggctaggttgcaggccctggactttgcattgactgtctcccattttgcagacaaacattctaatttttaaattgtgcatatgctatgcttggtgtttctttctagtctctgaatcataatggcgagactctgcgccagaaacctcctgtgggagaagcagacccttacagagtgaaaatgaagctctgcatcctgcttcacgccttcagcacccgcgtcgtgaccatcaacagggtgatgggctatctgagctccgcctgaaaggctcaaggccctctgccacagcgccctcctcacacagataggaaacaaagaaagattcataagagtcaggtggtcttggcctggtgggccttaagctccttcaggaatctgttctcccatcacatctcatctccccaaaggtggcacagctacctcagcatggtcccctccatcgcttctctcatattcactatacaagttgtttgtaagttttcatcaaaatattgttaaggggcgaagacgtcctcccctcaatgtgttagcagaagagcaagaactgataagctattgtttttgtgccaaagtgtttatgaaaacactcagtcaccccttatttaaaaatatttattgctatattttatactcatgaaagtacatgagcctatttatatttatttattttctatttattataatatttcttatcagatgaatttgaaacattttgaaacataccttattttgtggttctaataaagtaatgttatcacttcacagatgttcttggagtctctatctatctatctatagattatttatttaattacttaaacaggacctcgctgtggagaccaggctggcttctgactaacagagatcagatgacctctgcctcctgaatgctggggccaaacctatttctcactttgcccagctaactagagtgtttaagtgctctgagacacactgcaagaaaactgtcttagtttgcactctattgcgctgataaacaaacaccatgaaactggggggaggggcatatgccatgttacagcttagagtctatcactgagggacatcgggcagaatcctggaggcaggacctgatccagagaggatggaggagtgctgcttactggcttgctctccatggcttgcttggctggctttcttatacaacccaggaccaccagactaggattggcactgtccacagtgtgctgggccctcctgcatcaatcattaatgaggaaaatgccccctcagacttgcctgcaggtaaatctgatgacattttttttttcagttgagcttctgtcttcctaggtgcccctagtttgtgtcaatttgacaccacaaacttaaaaacagcacaaaaaattctgatttgaacaaaataatcttgcaaagacggccacaatggggcttgggggatggctcagtgggcagtgttcatcttacaagtgtgacaagcagagttcaggtacccagaactcaacctgtaaccccagtgttcgtcaggcaaactggggactactggagcaagctggctgagttgagaggtcagactgatgacggtctgagagagagactgggcctcagtacacaggcagcaagagatcaagaaagacactcaacagcagccttgggcctccccgcccatgtgcacgctcatgcacacacctatgcatccacacatttgaacacattacacaagcatataccacagatagatacatgaaaaaaaaatggccaaagtgttctgactcatttcccaatccccttaatcttgtttttgcggggagaccaggctggcctcaatactcaagtggctgtgtgaattacagtttttaaggattacatgactatttctgttcaacatttgaatctcaaacaaaacataactgaaatctttctccctgacaacctcgggccatgacctgctgtgcattaaacaaatacattatcacactcttcattggaaaacgtgtcctgtgaggctctctaaattattccaattcgtgggaccctttgggctctcagagggaagccctttttaaattacaaacagaaaaactctctacttgcctaaattatatagaacgttttcccaaaccccatgtataattgctttcttttggtttaagaagtgtctttcttctggtcttagtattaattctgtcttcctagttctttaaaccacgcgaatctaaagagtcccacaacagaataccacatcatttggttctgggataaccatgttccttcctaatagaatagggctctcgggcctttatttagagaagcaccttttctaagctgtttcttcccaccaggtcccccattcatctccaggggtccagaggaaaataattgtggcctctcctctgtgacaaactcactgtccaattctcactctctacccatcatcagataagtcgctggagaccagattcaccaaagaactgggtaactgtaggcttttcccagtcaggggctcccctcaggcagggactctacccagtcaggggctcccctcaggtagggactcctcccagtcaggggctccccccaggtaggggctctcctcgggccagggcccgtctcaggaagggttattttttcctttgagcagctcagatcacagtgactctcataggctgtggagtcgctggctactccttctagagaatgacactcactgtctatctcatctttgagtcaagcccagcaagagaaggtctcctccacagacttgtgtccgtgtagaggaacacactcagtacatttgtcctaggcaccaatatgagatgtgctttaaataatgtctggaggtggacatggtagtacatgcctgtaatcctaacacttgagaggctacagcaggaaggctatgagttcaaagtcagcctaagctttaggccaagatcatatctcagacaaaacaaaagcaaacccaatgggcccaagtgaggtcttcaggacaaattccattcctcaatccatagttagttctcacatcttgctagatatatgcagcagtgttacgtactctgaccaagtgttttaatggctcccccacccctccgtgccctcttccaagaaatgaagataatactcaaacttgcctccaaggatcagagtgatggttaaataaaatgatttgcctggccctcagtacacagcacatcttagtaaattttcagggttatttcatctttggggatggcaactcagagtaattaaaccctctgcgattgcttcattggtgaaatttaagagagtaaaacaaaattcacagttactgtaaggattaaatgaggcatggatggagccaggtgtggaagcacatgcctggaaacccagcacttgggcagtagatgcagaagcatcacaagttcaaggctagcttttactacaagagtgtttgacaccagcctgggccaaaggagacctgtctcaaaagcacacatacagtaaagaaataagacactgcgggtacctaatgggcactccaaatcaaactgttaaagctctggggttatatctttgatacccatcactggtcccaccaggcagggccaataagatggcttagcagacaaaggcactggaccctccagggcactcagctagagtgtggtcagccgtaaaggttgcctgtggaaaattcaggcaaaaggcaaggcccctccctccaagaacaaagactgagggcctgaacttttcagaccaaatccctcagtttaaaccatgcccaggcacagcccatagagtccccttgacctaaatgctccgctaaaaaggaaacaagcctgaccgcctctgacacagagaaggatccacctgaggattggcatggaaaacatgggggtggaatctgcctactgaggttcctcagaactggggaaagaggcctggtcacatgtgcaaaggcagatttggaaaactcaagacatgccaaagggtcctctgtctccaaagggaaagtgaaattgcagaaacaaatggggaaaataggtttaatgtgagaccagccccatgtccactatagacacttttggctgtgtcaacaggcatttctattgtccctttactgtcaacatttctttccagctaccattgtgacttcataatttaacctaaggtacatataaaatttaaaatcaacaagtcctactacatcttctgaagattttaattgtctatacctgaaatgaatacatacatgcatgcatgcatgcattcacacgtgcgtgcgcgagcatacacacacatacacacacacacatacacacacacacacacacacacacacacacacacacacacacacactgtgtgtaatcacagttactaaggaggctgacaaaggtggatcacttgaccctgcagagaagtggagggaagcctgaccttggcaacaaagaatttgtctccattttttttcattaataattgttatcacatttgtttattgtgttgcacacatgcataggacacttgtgaaagtcagaggacaacttttaagagttggttctctccttccaccacataggttctggtggtccacctcaggctgtcagaagagcatccttccttacctgctgagccatctttctggccctcaaaaggttttgtaattaaatgtttaccaaaaaattcatttaaatgtatttggtgaaaaaaaatcttcagtggtatctatgtatccttacatttgacactaaaatatcgatgtagggaccaagtatatggtgcatacatatagtcagagcattaggctattgaggcaggaggattgaaagtttgaggacccagaacggggtatttagtaagactctacctcaaaataaaataaaaagaacagataataaaataaaaaatcaagtttcattagataccttggtgtgactctaaccaagcaagtgaaagatctctatgacaggaacttcaagtctctgaagaaagaaattgaagaagacctcagaagatggaaagatctctcatgctcatggattggatgaattaatatagtaaaaatggccatcctgctgaaagcaatctacagattcaatgcaatccccatcaaaattccaaatcaattcttcacatagttagaaagagcaattagcaaattcatttgggaaaacaaaaaaacctaggatagcaaaaactcttctcaacaataaaagaacctctggggaaccaccatgcctgacctcaagctgtgctgcagagcaactgtgatagaaactgtatggtgttggtacagaaacaggcaggaagatcaaaggaatagaactgaagacccagaaatgaacccacacacctatggtcacttgatatttgacaaaggagctaaaaccatccagtggggaaaaaaagatagcatttttaacaaatgatgctggttcaactggcgatcagcaagtagaaaaatgtaaatcgacccattcttatctccttgtacaaagctcaagtccatgtggatcaaggaactccacatagaaccagatacactgaaacttatagaggagaagtggggaagagcctcgaacacatgggcacaggagaaaacgtcccgaatagaacaccagtggcttataatctaagatcaagaattgacaaatgggacctcataaaatagcaaagcttctgtaaggcaaaggacactgtcaataggacaaaaaggcaaccaaaagattgggaaagatctttaccaaacctacgtctgatagagggctaatatccaatattacttatattaaggtatacaccttatctccatatttgctcctgttagcattttgttctccttctaagaaggaccaaagcacacacactttggtcttccttcttcttgagcttcatgtggtctgtaaattgtatcttggatatttggagctttggggctaatatccacttatcagtgagtgcataccatgtgtgttcttttgcgattgggtcacctcactcgggatgatattttctagttctatccatttgcctaagaacttcatgaattcattgtttttaatagctgagtagtactccattatgtaaatgcaccacattttctgtatctattcctctgttgaaggacatctgggttcttttcagcttccgactattatgaaagtaaaatgtctccatctgaaagagataagcatagtcagtccacagagagggtcagggaagacagaggagtgctgacgtggcagcaacaattagaaatgaagctaaggcatgtcctactcacgaagcatgacagtgccagcccttagaggtgagtgtgtgtgactctgtgtgtgtgtgtgtgtgtgtgtgtgtgtgtgtacatgtgtgtttgtgtgtgtgtctatgtttctgtgtgtgcatacctgtgtgtatgagagagagggtgtgtgtacgtgtgtgtatttgtatgtgtatgtgtgagtatgtgtgtatgtgtgtgtgtgtgtgcatacatgtgtgtgtgaaagagagggttgtgtatgtgtgtgtgtgtgtgtgtatgtgtgtgtgtgtgtgtgtgtgtgtgtgtgtgtgcacnnnnnnnnnnnnnnnnnnnnnnnnnnnnnnnnnnnnnnnnnnnnnnnnnnnnnnnnnnnnnnnnnnnnnnnnnnnnnnnnnnnnnnnnnnnnnnnnnnnnnnnnnnnnnnnnnnnnnnnnnnnnnnnnnnnnnnnnnnnnnnnnnnnnnnnnnnnnnnnnnnnnnnnnnnnnnnnnnnnnnnnnnnnnnnnnnnnnnnnnnnnnnnnnnnnnnnnnnnnnnnnnnnnnnnnnnnnnnnnnnnnnnnnnnnnnnnnnnnnnnnnnnnnnnnnnnnnnnnnnnnnnnnnnnnnnnnnnnnnnnnnnnnnnnnnnnnnnnnnnnnnnnnnnnnnnnnnnnnnnnnnnnnnnnnnnnnnnnnnnnnnnnnnnnnnnnnnnnnnnnnnnnnnnnnnnnnnnnnnnnnnnnnnnnnnnnnnnnnnnnnnnnnnnnnnnnnnnnnnnnnnnnnnnnnnnnnnnnnnnnnnnnnnnnnnnnnnnnnnnnnnnnnnnnnnnnnnnnnnnnnnnnnnnnnnnnnnnnnnnnnnnnnnnnnnnnnnnnnnnnnnnnnnnnnnnnnnnnnnnnnnnnnnnnnnnnnnnnnnnnnnnnnnnnnnnnnnnnnnnnnnnnnnnnnnnnnnnnnnnnnnnnnnnnnnnnnnnnnnnnnnnnnnnnnnnnnnnnnnnnnnnnnnnnnnnnnnnnnnnnnnnnnnnnnnnnnnnnnnnnnnnnnnnnnnnnnnnnnnnnnnnnnnnnnnnnnnnnnnnnnnnnnnnnnnnnnnnnnnnnnnnnnnnnnnnnnnnnnnnnnnnnnnnnnnnnnnnnnnnnnnnnnnnnnnnnnnnnnnnnnnnnnnnnnnnnnnnnnnnnnnnnnnnnnnnnnnnnnnnnnnnnnnnnnnnnnnnnnnnnnnnnnnnnnnnnnnnnnnnnnnnnnnnnnnnnnnnnnnnnnnnnnnnnnnnnnnnnnnnnnnnnnnnnnnnnnnnnnnnnnnnnnnnnnnnnnnnnnnnnnnnnnnnnnnnnnnnnnnnnnnnnnnnnnnnnnnnnnnnnnnnnnnnnnnnnnnnnnnnnnnnnnnnnnnnnnnnnnnnnnnnnnnnnnnnnnnnnnnnnnnnnnnnnnnnnnnnnnnnnnnnnnnnnnnnnnnnnnnnnnnnnnnnnnnnnnnnnnnnnnnnnnnnnnnnnnnnnnnnnnnnnnnnnnnnnnnnnnnnnnnnnnnnnnnnnnnnnnnnnnnnnnnnnnnnnnnnnnnnnnnnnnnnnnnnnnnnnnnnnnnnnnnnnnnnnnnnnnnnnnnnnnnnnnnnnnnnnnnnnnnnnnnnnnnnnnnnnnnnnnnnnnnnnnnnnnnnnnnnnnnnnnnnnnnnnnnnnnnnnnnnnnnnnnnnnnnnnnnnnnnnnnnnnnnnnnnnnnnnnnnnnnnnnnnnnnnnnnnnnnnnnnnnnnnnnnnnnnnnnnnnnnnnnnnnnnnnnnnnnnnnnnnnnnnnnnnnnnnnnnnnnnnnnnnnnnnnnnnnnnnnnnnnnnnnnnnnnnnnnnnnnnnnnnnnnnnnnnnnnnnnnnnnnnnnnnnnnnnnnnnnnnnnnnnnnnnnnnnnnnnnnnnnnnnnnnnnnnnnnnnnnnnnnnnnnnnnnnnnnnnnnnnnnnnnnnnnnnnnnnnnnnnnnnnnnnnnnnnnnnnnnnnnnnnnnnnnnnnnnnnnnnnnnnnnnnnnnnnnnnnnnnnnnnnnnnnnnnnnnnnnnnnnnnnnnnnnnnnnnnnnnnnnnnnnnnnnnnnnnnnnnnnnnnnnnnnnnnnnnnnnnnnnnnnnnnnnnnnnnnnnnnnnnnnnnnnnnnnnnnnnnnnnnnnnnnnnnnnnnnnnnnnnnnnnnnnnnnnnnnnnnnnnnnnnnnnnnnnnnnnnnnnnnnnnnnnnnnnnnnnnnnnnnnnnnnnnnnnnnnnnnnnnnnnnnnnnnnnnnnnnnnnnnnnnnnnnnnnnnnnnnnnnnnnnnnnnnnnnnnnnnnnnnnnnnnnnnnnnnnnnnnnnnnnnnnnnnnnnnnnnnnnnnnnnnnnnnnnnnnnnnnnnnnnnnnnnnnnnnnnnnnnnnnnnnnnnnnnnnnnnnnnnnnnnnnnnnnnnnnnnnnnnnnnnnnnnnnnnnnnnnnnnnnnnnnnnnnnnnnnnnnnnnnnnnnnnnnnnnnnnnnnnnnnnnnnnnnnnnnnnnnnnnnnnnnnnnnnnnnnnnnnnnnnnnnnnnnnnnnnnnnnnnnnnnnnnnnnnnnnnnnnnnnnnnnnnnnnnnnnnnnnnnnnnnnnnnnnnnnnnnnnnnnnnnnnnnnnnnnnnnnnnnnnnnnnnnnnnnnnnnnnnnnnnnnnnnnnnnnnnnnnnnnnnnnnnnnnnnnnnnnnnnnnnnnnnnnnnnnnnnnnnnnnnnnnnnnnnnnnnnnnnnnnnnnnnnnnnnnnnnnnnnnnnnnnnnnnnnnnnnnnnnnnnnnnnnnnnnnnnnnnnnnnnnnnnnnnnnnnnnnnnnnnnnnnnnnnnnnnnnnnnnnnnnnnnnnnnnnnnnnnnnnnnnnnnnnnnnnnnnnnnnnnnnnnnnnnnnnnnnnnnnnnnnnnnnnnnnnnnnnnnnnnnnnnnnnnnnnnnnnnnnnnnnnnnnnnnnnnnnnnnnnnnnnnnnnnnnnnnnnnnnnnnnnnnnnnnnnnnnnnnnnnnnnnnnnnnnnnnnnnnnnnnnnnnnnnnnnnnnnnnnnnnnnnnnnnnnnnnnnnnnnnnnnnnnnnnnnnnnnnnnnnnnnnnnnnnnnnnnnnnnnnnnnnnnnnnnnnnnnnnnnnnnnnnnnnnnnnnnnnnnnnnnnnnnnnnnnnnnnnnnnnnnnnnnnnnnnnnnnnnnnnnnnnnnnnnnnnnnnnnnnnnnnnnnnnnnnnnnnnnnnnnnnnnnnnnnnnnnnnnnnnnnnnnnnnnnnnnnnnnnnnnnnnnnnnnnnnnnnnnnnnnnnnnnnnnnnnnnnnnnnnnnnnnnnnnnnnnnnnnnnnnnnnnnnnnnnnnnnnnnnnnnnnnnnnnnnnnnnnnnnnnnnnnnnnnnnnnnnnnnnnnnnnnnnnnnnnnnnnnnnnnnnnnnnnnnnnnnnnnnnnnnnnnnnnnnnnnnnnnnnnnnnnnnnnnnnnnnnnnnnnnnnnnnnnnnnnnnnnnnnnnnnnnnnnnnnnnnnnnnnnnnnnnnnnnnnnnnnnnnnnnnnnnnnnnnnnnnnnnnnnnnnnnnnnnnnnnnnnnnnnnnnnnnnnnnnnnnnnnnnnnnnnnnnnnnnnnnnnnnnnnnnnnnnnnnnnnnnnnnnnnnnnnnnnnnnnnnnnnnnnnnnnnnnnnnnnnnnnnnnnnnnnnnnnnnnnnnnnnnnnnnnnnnnnnnnnnnnnnnnnnnnnnnnnnnnnnnnnnnnnnnnnnnnnnnnnnnnnnnnnnnnnnnnnnnnnnnnnnnnnnnnnnnnnnnnnnnnnnnnnnnnnnnnnnnnnnnnnnnnnnnnnnnnnnnnnnnnnnnnnnnnnnnnnnnnnnnnnnnnnnnnnnnnnnnnnnnnnnnnnnnnnnnnnnnnnnnnnnnnnnnnnnnnnnnnnnnnnnnnnnnnnnnnnnnnnnnnnnnnnnnnnnnnnnnnnnnnnnnnnnnnnnnnnnnnnnnnnnnnnnnnnnnnnnnnnnnnnnnnnnnnnnnnnnnnnnnnnnnnnnnnnnnnnnnnnnnnnnnnnnnnnnnnnnnnnnnnnnnnnnnnnnnnnnnnnnnnnnnnnnnnnnnnnnnnnnnnnnnnnnnnnnnnnnnnnnnnnnnnnnnnnnnnnnnnnnnnnnnnnnnnnnnnnnnnnnnnnnnnnnnnnnnnnnnnnnnnnnnnnnnnnnnnnnnnnnnnnnnnnnnnnnnnnnnnnnnnnnnnnnnnnnnnnnnnnnnnnnnnnnnnnnnnnnnnnnnnnnnnnnnnnnnnnnnnnnnnnnnnnnnnnnnnnnnnnnnnnnnnnnnnnnnnnnnnnnnnnnnnnnnnnnnnnnnnnnnnnnnnnnnnnnnnnnnnnnnnnnnnnnnnnnnnnnnnnnnnnnnnnnnnnnnnnnnnnnnnnnnnnnnnnnnnnnnnnnnnnnnnnnnnnnnnnnnnnnnnnnnnnnnnnnnnnnnnnnnnnnnnnnnnnnnnnnnnnnnnnnnnnnnnnnnnnnnnnnnnnnnnnnnnnnnnnnnnnnnnnnnnnnnnnnnnnnnnnnnnnnnnnnnnnnnnnnnnnnnnnnnnnnnnnnnnnnnnnnnnnnnnnnnnnn

SEQ ID NO: 128 - DNA, 1231 bp, Mus musculus
gcaagagacacagtcctgggaaagtcctgccggctatccagacaattataaaaatgtgtctcccaaggtcagcgttccaacagcctcaccctcggcatccagcagctcctctcagtgccggtccagcatgtgtcaatcacgctacctcctctttttggccacccttgccctcctaaaccacctcagtttggccagggtcattccagtctctggacctgccaggtgtcttagccagtcccgaaacctgctgaagaccacagatgacatggtgaagacggccagagaaaaactgaaacattattcctgcactgctgaagacatcgatcatgaagacatcacacgggaccaaaccagcacattgaagacctgtttaccactggaactacacaagagagggagctgcctgcccccacagaagacgtctttgatgatgaccctgtgccttggtagcatctatgaggacttgaagatgtaccagacagagttccaggccatcaacgcagcacttcagaatcacaaccatcagcagatcattctagacaagggcatgctggtggccatcgatgagctgatgcagtctctgaatcataatggcgagactctgcgccagaaacctcctgtgggagaagcagacccttacagagtgaaaatgaagctctgcatcctgcttcacgccttcagcacccgcgtcgtgaccatcaacagggtgatgggctatctgagctccgcctgaaaggctcaaggccctctgccacagcgccctcctcacacagataggaaacaaagaaagattcataagagtcaggtggtcttggcctggtgggccttaagctccttcaggaatctgttctcccatcacatctcatctccccaaaggtggcacagctacctcagcatggtcccctccatcgcttctctcatattcactatacaagttgtttgtaagttttcatcaaaatattgttaaggggcgaagacgtcctcccctcaatgtgttagcagaagagcaagaactgataagctattgtttttgtgccaaagtgtttatgaaaacactcagtcaccccttatttaaaaatatttattgctatattttatactcatgaaagtacatgagcctatttatatttatttattttctatttattataatatttcttatcagatgaatttgaaacattttgaaacataccttattttgtggttctaataaagtaatgttatcacttca

SEQ ID NO: 129 - protein, 243 aa, Mus musculus
QETQSWESPAGYPDNYKNVSPKVSVPTASPSASSSSSQCRSSMCQSRYLLFLATLALLNHLSLARVIPVSGPARCLSQSRNLLKTTDDMVKTAREKLKHYSCTAEDIDHEDITRDQTSTLKTCLPLELHKRGSCLPPQKTSLMMTLCLGSIYEDLKMYQTEFQAINAALQNHNHQQIILDKGMLVAIDELMQSLNHNGETLRQKPPVGEADPYRVKMKLCILLHAFSTRVVTINRVMGYLSSA

SEQ ID NO: 130 - DNA, 27277 bp, Homo sapiens
  misc_feature (1)...(27277): n = A,T,C or G
acacagacataaatcagccttcataagcattgcaactcaggttcaaatcagcttatttcctgattggtttaaagtgttctgctttattctgactgcctgacagaaactaacatcatagagagcctctgcagtttttcctatagaatgtccagaattcaatttaaaattataggtgtacaaagacaggaaaaagagattaaaaaatacacaatagaaacagacatgcagattatccagatgctaaaattgtcagatacagaatataaaataacactgattaatatgtttaagaaaacagatgacaaaatggagaatttcaccagagaattgaaatctaagtgtttttttaaaaaaggtgaaaattatgaaactgtaaaatacaacaactgaaattaaaacttcaataaataaatttgacaatagtttaaacacaggtgaagaaagtattagtgacctagaagattggttggtagaaaatatccctatggaagcacccaagtatttttaaaaagaaaaaatatgtaggcaataccataaaaacaggaaaaggtctgatgtgtaattagagcttcagaagggtaggaaagtgaaattgagttgggagcaataggtgcaacatttgaagaggtaatgacaaaaaattttccaaagctgatttaaaggtatcaagctatagattcaataaatgctacaaatctcaagcaggataaatacaaaaaaatacacatagaaatgtaataagtaaattgctagaggggaataacagacaaaaagaaaattctaaaagcagtcagataatcgtcctaaacaaataaattacctcaaagaagcaacagtaagactgatggctaacttcttaacagaaacaatggaagccagaaggcattgtgatgtcatctttaaagtgatgaaagaaaataactgccaaacaaaaatatatttcaaaaattaaggcaaagtaaaaatattttcagacaaacaaaaggtgatggaatttgttgtcagcagacttgtgcttttaaaaagtctaaaggcatttgttcttgaggcagaagaaacattatcactgatggaagagcatatacaagtgaaatgaatgaaaaacactgttgggaggctgaagtgggaaaatcacttgagcccaggaatttgagaccagccttggcaatatagtgagatcctatatctacaaaatttttttttttaattatccaggcatgatggctggcacacacctgtagccccagctatcaggaggctaaaggtgggaggatagcttaagcccaggacttctaggctatagtgagctatgatcacaccattgcactccagcctgggcaacagagtgaaaagtctctaaaaagaaaaggaaaagaaaaagaaaaaaagagataaacactggaagccaaacatgaataatgactgtataaaacaataaaaatgggtgtttgggcactttaaaaagctagtgccagcagcctgcttttcaagtctcatgttgagaaattttcatttcataaagagaaaaaaaaatgaccttgactaggaatattctgttttcttccacattaggagcccaaataccatcatagtattactaatactcaccaaagagggcatgtgatggacccttgagggattatttaaagccctagtagtcactgtttagagatcaatgccatgaaaggaaactggcagcctgctggggcaatgatgcttgtgttacagtgctctaccctctatctcattgtgtatacagtatctcaatagctcctcccaacaaccccaccaggcaggtgtatttctccctattttatagaagtttagaaacattaaagaaatgaccaagatcacacagctagaaagggatggaaactgattttagcctgaactgcaaagcccatagtttttccactttacaaggccatggggcagaaaaannnnnnnnnnnnnnnnnnnnnnnnnnnnnnnnnnnnnnnnnnnnnnnnnnnnnnnnnnnnnnnnnnnnnnnnnnnatagatggatggatgaaaagatggatggatagatagagtcagacacaaagcccctgacttgagggtagagagttaatccacttacatactcaatgtttgatgttcatatggtaaatcctgcaagaatgctgctacatagaggaaattctctgctcaaaagctgtcagaatggctacagcagctgtcttagcagttaaaatacaaataaaaacaaaacaaaaataaatgaagctataatacatttgtatgttaaataattcaaaaagtacagagcatattcaataaaagtcaggttttcctcctacttcaaagactcaatctacttctttagaggcaatggtcactactcttagaagcatagatttatatctatactacacgtgtatctatgtgtgtctgtacatgaatatacttttttctctgtacaaatggaagcatattatacactagtctgaaccttgattttgcacgacttttcaagtaatgaagatttttcctgtcatatatataaatctgcctcaatctttttgatagttgcataatagtcccttgaaaagatgagtcatgttttatttaaatggtttcctgctaataagacattggaagcatttcaagttttttgatactaaaaatgatatttttaatggaaataagtctttatgcatacatgcaaatagttttataggataaattactagaagtagaattgctgaacaagtgtatgtgcatttttcattttgatagctattgccaactatccctccaaatagatttcactagattacacatttccacatacccttacacactttacaaactatcaaacttttagctttgcaaactacaggataaaaattatatctattatttttatttgcatttattcaattatcagtgcagctgagtatttttcatatgtttataagtaatttgtgtatctttttctctgagctgtctgttcatatcctttgcccagttttgaattgaattattggcctttttcttattgacttttgcatttacacagtgacattagctcttggtttgttacatgttcatgtaaatgttttttctgggttatgatttctctttaaaagttgtctataatattcctatagacaactcaaaattcctatagacaacgaatcaaaatatttgatttttacagtcaaatttatcctttttttctttataatgtctgggcatcagatgatcttaattattcatgagactacaatgcccaggtgttgtatcatattcagataagttgctaaactgtctcaagatgcagaaaagtttgcaaaagtattcatacaatctttattctggagcaccaataagtaataaatgacacctttctggattttttttcttgaagcccgttgtcaagatttttgaagtctctcaaaaacaggatagatggctcatggatgttccctacagacactgtgtcatgaatatttaggactcccctccaccgctattgagaagttgccacttaatgtttcaaagagagcaaagaaatagttttggaagaaactgtatgtgtgtcttaatctaaaattaataactatatttcactatcactcactgtagaatgatatctaatattgttgacattctaccactttacaaaattcttacctgttcactgtataattgatctgcgtgacaaaactagcacaacaaaagattaccatctccattttgctgatatgaaaattaggaaaggcagtggcttgccccagcttacataggtaccaagtagcagaaagaggctagaaattaggtcttttgatcgtaggcccaaagttcctttagtgctatagcctttctggctccgctcacttactatttctccccctgctgctcagatatgtcagcaaagaagaaagagctccacagaaccaagctcctcagcatgtaacactgggggttggtgttcaacaaggaacacagagctctgcttcttaccctgacaggccacctttcaggattgaagctcaggattggaatccagattgatgccatgtgggcaccagctgatttatgctcaagttgaatgacatttatggacaagagccacaggaaaactgacagcagagaccttgctattttatgaaggaaaatcacgtttacagtgctgacctacacatgcaaatttacggtctcaactgatcacaagcctctttgggatctcacttcatctgaggatgagctgccaccctaaattatggcaccaaagatatagttccaaatcttctgttcaggtcctatgactctgaccttgtctacttgtcagggagaataacaatgaagacaggcatatcgagctatctactcaaatcagccagggtttctcttccagcactactgatactttgaatcacaaaattatttgtctgggggggcggatgggcgggtgaggggctatcctgtgtaccgtagaatgttcagcagcatttagcaacattcttctacccactagatgccagtggcaacccccttcctccaattatgacaactcaaaatgtctccacacattgccaagtgtcccctggggagcaaggccatctccaactgagaaccacagaaatagatctttaatatattctgtcaaatttttgaaaagacccttgtctctcagtgatgaaaatgcctgattgactcatagctcaaaccgaatgggaaaggaataactaacaataaaagctacctgaattcccagcactttgggaggccaaggcaggcagatcacgaggtcaggagataaagaccaacctgggtaacacggtgaaaccctgtctctactaaaaatacaagaaaattagccaggtgtggtggcagccgcctgtagtcccagctgctcgggaggctgaggcaggagaatggcatgaacctgggaggcaaagcttgcagtgagccaagattgagccactgcactccagcctgggcgacagagtgagactccgtctcgaaaacaaaacaaaacaaaacaaaaaactacctgaatgtaccaaatagcaattgaagtttgcaaacaatgaccttgagtcatctgcttacagaaggtgtctatctgtcttttggacaaaggacttctgatgaagaggatggagtggaccatattctttaatccatgacgttatttgtccccatcaaatacaaatatctaaatgtatttatatattttcattatcactagtcctcattctcattcccctcactccccagtgggatctatcctactaatatatatccttttgtctgtgtctttgtataatgtgtactattttgaatatatcattctcatttaagtcaatagagttccgcaatcacttactcacaattcttaaacttacacagctctggacaccagaagttttctcttaaattcttaacagcgaaatctgactgaagcgacaaggggttacttggggttctttagccactcaatgtaactattcctatgttttgctgcggaactattatgcttgattatgcgatgccacctcttccttttctaaattccaagcattttgaattccaaaaacaaatctgagcccccccatttttttctttttctttctttcctttttcttttcttttaagtgagacagggtctcactctgttgcccaggttagagtacagtgacacaatcatggctcactatagccttgaccttccgggctcaggtgatcctcccacctcagcctacttggtaggtgggagtacaggcatgtgccaccatgcctgactaatttttgtattttttgtggagatggggaatccctatgttgcccaggctggtctcaaactcctgggttcaagcaatccactttccttggcttcccaaagtgcttggattacaggcatgagccactgtgcccagccccaaagggttttaattgtctacttatacattatagagagagatcttactctgttttcctgtttttactcagtattatatttttaatacatatccatgttactgcatgtacatctagtctattacttctaactgccgtagaatactccatgaagtggatccctacattccactcacccactcccccagtaatgagcagctacattgcctccagttccccatcactacaaacaatgacttaatgaacatcctcatacatgttcctttgtggacctgtatgagaatctccataggatatacacccagggttaacagctgggtcatgggtgtgaatatacttaatctggtcaaggaatgccagaatacccttcaaaacagccatgtcagcctactggcatggtgtgatataatagatcctgtagtcccccattttcccaacacttaccagtatccagtgttctcaacttgtcagtctaagaggtgtaaagagatatctcattctttttttcatttgcattttctgatataactgagcctccaggtatgctcattagtctttggggtttcttctcgttaaattgcttattcatgagctttacgcattttttactagtgtttctgtctttttcttgctgacttacaagagttccttgtttttagacattgaaaatattggttttagacactgaaaaatatcttctctcaatctgtcagctgtctgttcatttggttcatgcatagaggaaatgtgtaaaacagaaatcttcatttttatgtaatccaattgataggtattttgccttatggtttggagctttagaagttttaaaaaagtccttcccacttataagtgacaaagacagtcctctatattttcttctactactgtaacaattttacttttcacatttggtctttaattcacttccaaatggattcacctctgttgttttagattggagtccagttttatttttcatcatacgctgaacattttctctttttaaaaaaattttttgtagggagtttttgctcagactggccttgaactactgacctcaagcaattctcctgccttgacctcccaaagtgctgggattacaggtgtgagccattatgcccagcccattgagtattttctactaaatattgcatgttttcctcattgatcagggaatcatctgtattatcttatacttaatacccaaatatacaaatctatctataatttctctactctgtttcaatggtccatatgcctgatctgttgcaaagatcactactttaatttctatggctttaaattatgtccatatgtgatagggttagtcccccttttcattattcccttagcatttttacttaaggccaggaacagcagctcacgcctgtaatcccagcactttgggaggccaaggtgggtggatcacttgagcccaggagtttgagaccagcctaggcaacaaaactagactccgtctctacaaaatacaaaaataaaaattagctggacatgatggtgttgcctgtggtccaagctactcaggaggctgaagtgggaggatcactttagcccaggaggtcaaggctgcagtgagctgtgactgtgccaccactacactccagcctgggtgatacagtaaaaccatgtctcaaaaaaaatttttttaacttagtcatagattttattacatctgtattttagagtaggcttattattaagtttctgagaaaatttatttgtagcttgtattggaattacattgagcatgtgaattaacgaaaagaggcttaagctttctatatagagaaaccttccacccaagggtatagaattatttaattaaatcacactatattcttgactgaactttaaaatttttctccaaacactattctgtagttatccaagctcatgtaataatcataataactctatactgtaggtacttttattatcatcatttaacagatgaggaaactgagcccagagagataaataactcacctaagaacacacagcaagtaagtagcagaacctggattaacatagtttagtccatactcttagccattatactgcctctgtatctacagtcagttactttatagtttggctgcttctatgcatgtcatcttgtttttattacattttctgatggattgttgcagatacaaagaaaatcggctgattttttttaagttgatatgtgtattgcatgatgttgttaaattctcttcttagttctaatagtctattaattttttttctttttgtatatcaactgtaaaaagtgacagttttaccttttcttttccaatgtttaaagctctcatttctttttctttccttatagcattggccgagacctccacgacaatgctacacactgtgaagtagtgattgtgagctaagactgtcacttatagaaaaatcatgtattcctagaagaaggttttcatttcatcttagctagaggacatggagcacttcaggaaactatttcacaaaaatgtaaattagaaactgtgtctggtagccaataatccatttttaacagtggccctgtgctcatctaagcaacagaaattacttttgtataggagatggcccttccaggggagaaacagctcagttgtgatacacttgtcttcatcctgactttaagtacatttaactccacactaaacccttgtggccacaacacagctctgcacctgtcatttgctctagacaaactgctaaacgcaattgtttctgacaatggattactctgtatcccgtgggggaattctcagacagcagcattagaaggggccttagagatcaaccatttctcttattttacacacacctaaaactccctacagccgtgcttcatcagcttcgagcagatgagccacccagaaggcagctccagttattaggtcctagggcctgggtgtagtcaggccctttggaagctccaagtcagagatcaaacacatcctccccactacccacgcctagggtgactaatgcctgtgggaaaaacaactgaactaaaaagtcccacaggaacctcaaacccagcacatccaaaatggaacttctcaccatctcctccaaactcagtcctcttatacagtaatccctgtaaagctagaacaatctccattccccattctcagggccttcctctcccgctcacctgaggagctaccaagccttggcccacaagccctctgagagtccctcctgcccaccctgtgttctccatactgaataaggacttggccacaccttgtcaactcttccctctgctctactcctgacccctggatccatccttcatgctgtggctgaagggatccccccatcatgcaaattctgccacatctcccgcctaaaacccaggaagactccccactactctcagcacagaaagtacactccttagtatggcatcccctgccctcatggcatggccccatccagccctccagcctcacaccctgcaaggacacctagacccccacctccctcaacccttcatgactgcgcttctgatccctgtttcccctggctagaccctgcgtgccctcccgctggaagcggtctaatgcctgcttgtttttaacactcaggttggggcccctgcctgctcccgggagcctttgctgactcctggaccccgttgctccggctgagcgtgggctctttctctaggtctttcctcccaggactctgtgtattcatcctatcgttaaactggattctctacaagagtaataattgcagagtcagccagctctcatcccttttcaggtttcagaaaagacctgtgaacaaaacgccttgagtctgatttagtgtggcaatgccccaagggtcctgttctccctgggtgtcctgcacctggtgcaacgtcggcctggcatctagtgagccatctaaaggaacgatgatgagtgaatgatttgcctaccccttccagtactaggctggaggtcgtggttagggcccatccctacgcaggacatgcaaagtgggaggcactcctctctctacgtcggcagggggcgctgcacagctgcggggcggggtagcttagacacggggcgtccggctaaggccggggacccagggtggtgggcggggtgtcccgcccgcctgtggaccccgcgcagtaactgcgaacatttcgctttcattttgggccgagctggaggcggcggggccgtcccggaacggctgcggccgggcaccccgggagttaatccgaaagcgccgcaagccccgcgggccggccgcaccgcacgtgtcaccgagaagctgatgtagagagagacacagaaggagacagaaagcaagagaccagagtcccgggaaagtcctgccgcgcctcgggacaattataaaaatgtggccccctgggtcagcctcccagccaccgccctcacctgccgcggccacaggtctgcatccagcggctcgccctgtgtccctgcagtgccggctcagcatgtgtccagcgcgcagtgagtactcagcccgccaggtctttggctcgctcgggtgcggaggggcggctgcttgggaagagtgggtagaaactcaagtctgcctaaggagagactggaacagcagcagccgtctcctgcaaagaggaataagaataggggtctcaccgtgtgctaaatagggcatgtctcttttcatctcgaaacagcctgatgagctatcattatgcccacttcgtagaggagaaactgaggcccagcgtgggagatttcctgctttcctgcctagggtccctcagctacaaacagaaggcagatcctagccagttctaaagtcaggcttggccgggtgcaatggctcacgcctgtaatcccagcactttgggaggccaaggcggacagatctcctgaggtcaggagttcaagaccagcctgaccaacatggtgaaaccccgtctctactaacaaatacacaaattagccgagtgtggtggtgggtgcctgtaatcccatctactcgggagtctaaggcagggaaaattgcttgaactcggaggtggaggttgcagtgagccgaaatcgtgccactgcactccagtctgggccacagagtgagactccgtcttaaaaaaacaaaaaaagtcaggctttctcactccactgtttttaaaacactgggtcccaagtctgactcagccacttcaccacctggtctgggtttccctgatcaaaaacatgtaggctttctctgggtgagtgttgggttcaacacccttgtccaagctcatctctagaccctcacagggagctggcttctagccctagaatagagtggcgctttgtaataactcgagtcatctctcaggtgttgaaggaaaagtgttggaaatgggttgagggaggtgggtgccaagcatgaatggatgggtgaaggtggccagaatggagggaaggtggtgcaggcaggccatccaggctgaagctcctccacctgctcctcttccttccaggcctcctccttgtggctaccctggtcctcctggaccacctcagtttggccagaaacctccccgtggccactccagacccaggaatgttcccatgccttcaccactcccaaaacctgctgagggccgtcagcaacatgctccagaaggtgagcctttcctgtcctctccactgtggacctgcaccctccctgaggaaggggcctctgatcctcccctctggtacctgatggaactgcagagaaattgtggaagttcattagcagctgtcaacagcaggagagggaactttacaaatggcccaagtgttaaagagtcctagtgaaattgtgtctccagagaaagcaagagtagtaataaattataatgatgttggttttggctatgtctacactgagtaaagtggatatttgcagtgttcctgtagcctgccaacagagatagaattgtgtcaggtccacatggtttctctggcaccacaccactgatcaatcccggaaatagttacttgggtgcatactctgtgttggggggcaggggtacaaagatgaaatagccttgtccctcctgctgcccaccagcttctacttggtgacacagttccttcttggagcaacacatctcagggaggactatgacagtgcacatgcagccttcattttctagggaagagttacctaattttatttacagcttcgttcttttaggtttcatattttaatgtaaaaaacattgccgttaaaaactgctccagtagctactgctgcaaaggctaaaggctaatgttttaaaagatgtcctctgcctttctgctctctaggaattttttcttgagtattttctagcttgttgccttaggaatatcttaaaataagctcaatgccaccaagccttcttaaagggctcctttcccctttcaatctttcataatgtgctgtgcattgctcctcacaattcaattaatcttaattggacagggggctcaagtgaaaactgctttgtttcccgaagaaaggttcaaaatgggtaacttttaggtgctccaattcatatagatttttttgtgcaaaagctgacacccctactcccagatatagtcctaagggtcaaaagattatagaaatcaatttaatgttttgtacatcatttgtcaaatttgctgtagtagaaaacaaatgaggtagatgcaagtgattcaccggccatatccagggcacaggtttgtagaatttgggctatatgtttattttttagtttgatgccattcaaaaaccaaacatttcaattaagatttcaaaattctagcttctcttgaaaagatctgaagaacaacactggactcacacctccaaatctaactctttataacctgctcagaatagtggggttgcccaggtctgtttaaacacctccgggaatagtgtattcatttcctactgctgctgtcacaaatgtagtgggtttaaatgacacaaatttattatcttacagctctgggcatcagaagtccaaaatgggtcctactgggctaaagtcaatgtgtcagcagagctgtagccctttctggaggctcttggggagaatctgttgccttgctttgtcaggtctagaggctgcccacattccttgacttgtggccccttccattgtccataccagcaatgtctggttgagtctttctcatgctgctccctctggactgaccttctacccgcttctacttttgaggacactgcttacactggattcacccagataatccaggatcatctctctactcttagatcagctgattagcaaattgaatgtcatctgcaccttcattcctctttggcaggtcacatagctcattaccgggttccagggattgggaggtggatgtctttggaggtggagaattggtctagctaccacagaaagggattttactacttgtgcccaaacgtattctgaattttcaggccttgcttcttggctcatgctgttacctctgtctgaaatttccctcctccattgtcgacactttactcctcttaatgtgggtgtcccaactctaggaagctttgcttcccttcctgcccctcctcagaagcttcatgcccttctcaccatgtctcacctactgatgcctcctggtcatttgggcaattgtctgtctcagcagctaaacttgcaatccaggagggtatacatggtcctcttctctgtcatgttcttagtacctaatggagtgcctgccacccattaggctgttgaatggaaaaatgatcgtaatcttcaatcatacagtcctttacttcctaagatacatttcataattttacccaacggtgctttccaacacactaagatgacatctctgtgtatgtgtgtgcgtgtgtgcactgcaaattaaatctcagcttgtcttaagggtttgcatgtttgttatatccatcaaactgtgaccttaacagttccccctttagaagttatacttgaaataggtattcatagaatacagtcactttagcaaaagaagaaacaattttcaccagaagcaagtgtcacagtgaggtgtggaggctggttagcacaggctgttgacatgatttattgtgtttacataatgaaaaaatatgtaatccagagaaacatgccccaagcttagggagaggagggtgagagacagaatgtaaggaatctattttcttttgtattatgaagaaccagaatttcctgcaagtcaaagtgacagaggtcaagggcagccagccggagccttcctggcaccctggcttaccagccttgtggggtgccaggtgcattatcaatgttataaactgagtttctccttcattttttataggccagacaaactctagaattttacccttgcacttctgaagagattgatcatgaagatatcacaaaagataaaaccagcacagtggaggcctgtttaccattggaattaaccaaggtataaaggattttcctcccagagcatgcagtgtggttaaaaactgtgcatcaaatctcacctgcttctaaaaattcacgtttctggtatccatcattatgggattttaactggtcctacttcagaagttagatttgggagaaaaattatttttaaaaaatggttttttttgcaacaatgtgaatacacttaacacttaaaaatagttcagatgctaaatattatgatatgtgtttttaccataataaaaaaaatttgagacctgaagagtcagaaagatttatactaagaattaatactttgatatatgattttttccctctagaatgagagttgcctaaattccagagagacctctttcataactgtaagtcaaaaaatgaaaagtttcagcctgtatgatgaattcatatcactgatgtctgattattttttcctctagaatgggagttgcctggcctccagaaagacctcttttatgatggtaagacacacagctctttcctcaaatgcaatgggggaaatgtttttagcccatctcaatggatacttccccatcttgtcatgtcacccaggccctgtgccttagtagtatttatgaagacttgaagatgtaccaggtggagttcaagaccatgaatgcaaagcttctgatggatcctaagaggcagatctttctagatcaaaacatgctggcagttattgatgagctgatgcaggtaagacttcattctatcagtgagagcacctttttcatgctaaagataaccagccagggtctttgataaagagatataaaaagaggtctggaggccttttaaaggcctgacagacctacattttcaagaagacagccttgagggtgccgtctatagggagcacaaatgtgagcagatcacattatgaaaagcagactccaaagtattcactctgtggtatcccccacactcggcaaatgtttttgtgcattttcttatgtcagcctcaaaacaaccatatgggatctgcacaaaggagggaaccaaaccttaggagagttaaaccacttgtctgaggctctgcctcttaaaatccttcaagaggatttcactacacttaccttctcactcacctctaaaggctccaggacgtgctccaggatttgcatgcaaggggccagtttgcatatctgcaaatattgctgggaaacaagcaagattggtgcctgattatgacccattgtgaaccaaaatgtgaaccaaataaaagaatgacctatcatctggggcatctataatgttattcataggcaagaacttgctttgttatgttctgaatcaccataacacagatgctaatataaaacaaatatttatataagtgagggtgactgctttggtgacgaggacatgggataaaaatatggtggcagaaatcattgtctgaaaagtaattgttttacttttattcttttcgtgtgtgtgtgtgtgtgtgtgtgtgtgtgtgtgtgtgtgtgtgcatgtgccagatttcttgtttgaaaggcaatgagcttcatccaagtatcaaagaatgttagcatctagagagctgtagttgctatttcatttttaggaccaagagttgggtgatttgggtgctagaatcaattctaccagtaaccagacaactattcccaagtcacttaacccctctgtgcctcagtttcctccagtataaaatggggtgactttattctagctttcttttagactttttgtgaggaagatatgaaagtatttattcatcaagggtgcaaatgtaaggttttatattctgttatcaaatcaaagtgctaaacttgggaaattcattgccaggtttatctgacacaaatggcatgtcttcagtaaacaggcctgttactgatagtgagttctgatcaatagcaatccatcacctccctgtgctaaacagaagtgggctttttaatgtaacatatataaaattaattagatattgcagcagatgtcattttaaaggaactgtttctttctaagacacaactcccactgatgattttttctaaatagttttaagggtcttttcagagctcattgaagatggatgtgcttggaaaatgagtatttcttttctcattctgcctggtgatctggctgagagtagatttggattgggtttaggagtggcataagggactgagttgcaggctctgagacatgtactggcttcactcatttttatgaatgaatatttgaattttggaataccatgtaagtcatgcttactgttcattctcctaggccctgaatttcaacagtgagactgtgccacaaaaatcctcccttgaagaaccggatttttataaaactaaaatcaagctctgcatacttcttcatgctttcagaattcgggcagtgactattgatagagtgatgagctatctgaatgcttcctaaaaagcgaggtccctccaaaccgttgtcatttttataaaactttgaaatgaggaaactttgataggatgtggattaagaactagggagggggaaagaaggatgggactattacatccacatgatacctctgatcaagtatttttgacatttactgtggataaattgtttttaagttttcatgaatgaattgctaagaagggaaaatatccatcctgaaggtgtttttcattcactttaatagaagggcaaatatttataagctatttctgtaccaaagtgtttgtggaaacaaacatgtaagcataacttattttaaaatatttatttatataacttggtaatcatgaaagcatctgagctaacttatatttatttatgttatatttattaaattatttatcaagtgtatttgaaaaatatttttaagtgttctaaaaataaaagtattgaattaaagtgattctgcaatttttctaatgtacttttaagtgttaaaatatacattgtgggaaaattgaaaactctgatgagacttcaacaaaattactctggaaagaatgccacaatattcttattcctttcctagtccctttcatctcattttaaagggaccctagtaagacaagatatgctttactactaaggcagccaagtgagtcatggtttttgagggtttattatttttgttcaacataagactaaaagtatgctgtgcattagaaaaatacttcatagtattcttcaaccagaaaaaaaatgtcactaagaggccttctagcctaattattctaatttttgtgaccctttgggctctgagagaaaagttgtctctaatttgcaaccagaaaatctctccatttgtttaaaactgtatagaacttttgcctgaaccacatggataattgccttactttggcttaagagatgtgctcttaatgagctaaatgttaaattccatctttttaattctctaaaccaggagtccccgatccccaggccatggagtggtactggtctgtggcctgttgggcagtgggccccacagcagtaggtgagtggcaggtgagcaagtattaccacctgagctccgcctcctgtcagatcagtggcagcattagattctcataggagtgtgaaccctattgtgaactacacatgcaagggatctaggctgcatgctccttataagaatctaagtaatgcctgataatacgaggtggaacagtttcatcccgaaactatctttgccccctgccccccgggtctgtggaaaaattgtcttccacaaaaccagcccctgctgcccaaaaggttgcggaccactgctgtaaatcatgtaaatcttaggtttcatgacttagttcattttgtactgctgtaacagaatatctgagactgggccatttgtaaagaacagtgatttatttttttactgctctggaggttgggaagttcgagaacaaggggccaacatctgatgatggcctttgtgccccatcatcatatggcggaaggtgagagagagagcaagggggtgctgaacgtgtccctttataaggaatccactcccatgataacagcattaatccattcatgagggcagagtcctcattgcctaatcacctcgtaaaggtcccacatctttatactgttacaatggcaattaaacctcaacgtgaggctgggtgcagtggctcactcctctaatcccagcactttgggaggccgaggtgggtggatcacctgatgtcgggagtttgagaccagcctagccaacatagtgaaaccccatctctattaaaaatacaaaaattagccaggtgtggtgacgaacatctgtaatcccagctactcgggaggctgaggcaggagaatctcttgaacccgggaggcagagcttgtagtgagccaagatcgcaccactgcactccagcctgggcaacagagcgagactccgtctcaaaaaaaaaaaaaaaaattcaatgtgagtttgggagggggacacaccacattcaaaccatagcaattcacctgacacaatacaatttaatgttaaggctttgataatccattcctccttaatagaaaaaggacctaaaatacaaaatattttgagtgacccctttcctcagttactcctcccaactgaatcccaatctttctccctgtaaatgtgttatctccttcccaggtcctcctgcatggcaaacattctcgtttttcaaattcttgccctattagacattcaataaaatagaaaccatcagaagctagatcccatcacctatctccttctcttgagtgattcttccacaatcttgaatggtccacaagtgcttcacagacatgggtttctttcaagtgtcgagtctggggtctcagcagctttgacagtgaggagagacgaacggggctgtagagttgcagccacccctcacttggaatggtgactactggttgtctgggcccagagatcaggagggacaagcagacggtctcttccatggactgggtttacacacaagaacacgtgtgtttcttctgttctagaaattagcatgggatatgcttcaaaaacatgactggccacagaaacagcttcatggttcattccattctttattgcatggttagtttttcactttttttaagcctgtgtctgcagtttacaagtagtgtagtatgcttgcaaccaaatcattccaatgctccccattggtctcctcttctgaaaaaggaaggtaatactagaatctacctaaaaggatcagagaaagggtaaaatggaacaactcgtgcaaagggctagcgttgcacctggcacatagtaagtgcacaataaatgtaagcacattttgaaatgtattattagtctttgggctaagcacctgcaccgaatttgttacctcctctttgctgctatttcctcattgatgaaattcagaaaacggtgggacctaattaactgtgttattgtgaagattaaatgacacaatacagtgccagcacctagttattactcaacataaatttgtcacagttctcacaagacatcagaacacccgctgatgtgctgtcccccatggcactcagcatattaagtgtggtcggcacaagcggctgcctggtgtgaagtatgagggcaaaaggcagggtctctgccttccaagaacaaagggtggagagcaaagtaactttttttttttttgagacggagtttcacttgtcacccaagctagagtgcaagtggcgcgattcgggtcactgcaaactccaacctccaggttcaagcgattctcctgcctccgcctcctgagtagctgggattacacgtgtccaccaccatacctagataatttttgtattttttagagacagggtttcaccatgctggctaagctggtctcaaactcctagcctcaggtgatccacccacctcggcctctcaaagtgctgggattgcaggcatgagccactgagccaggccaggagcaaagtaacttatcaaaaccaaggaccatccccctaaaaataccccccagtcaattggagattcgtttgattaacaaactactttattcaaaagaaactaaaccttgaaagtgtatctcacacctaagaatgactaaatcagagaattaacatgaaaaatatttagttgtcagctgccccattaaaggtccaggactttgggaagacagaacagttctaggacatggtctggccagacatccaaaggtaagtattgaaaaactcaagagatgtaaaagacccttagacacccaaaggaggataagaaactacagacaaaaagaaaagaacaccagctttgttgggggccagcacccacagccatcataagtcctcttctctgtgtcacactgggccattcagttattatccttatttgaggactaaacattttgggccgggcgcggtggctcacacctgtaatcctagcactttgggaggccaaagcgggcggatcacaaggtcaagagatcaagactatcctggccaacatagtgaaaccctgtctctactaaaaatacaaaaattagttgggcatggtggtgtgtgcctgtagtcccagctactcaggaggctgaggcaggagaattgcttgaacccaggaggcggaggttgcagtgagccgatatcgcaccactgcactccagcctggcaacagagcgagattccatctaaaaaaaaaaattaaaaattaaaaaatacttttggttctggctagcataatttggcttcctagtttaaagcaaactgcattacaatatgataagtaagaaaaaaatatggccgcattgtccaaaaattgaattctatgtacttgaaatattttatttaaaaaagtgaaataggatgcgtataaatgttttgaaatatatgtggtgagaacaggcacaaaaactttagttatatttatgtatctttcaattttacattaaaaatatgagtatgaattagatctatgtaatatcaaaaacagtatattaatggaatctgttttagacaaaaaaaaagtagtagcaactgctcagttgtgcttcctaaatgccaggcatgttcctaagagtttaccacaaataaacataaccatcctaataaccctttttatggatgtggaaagtgaagaaaattattgaagttgaccaggtgcggtgactcatgcctgtaatcccagcattttggaaggccgagatgaaggattgcttgagcccaggagttcaagaccagcctgggcaacatggcaaaatccccatctctacaaaaaataaaaataataaataataagattatgtaagctcacataattaacattttaagtggcctggtctcagcctgtgccagcagctatgctcatgttgaagtcactgtctaagtcaagggaatgctttccctataaccatataaatatcatcccaattatttatgtatctcccttctctctcttgctaaactgtgggaacctcagatataggcaatgtagtattacccacgtatttgtgttcccagccccaggaacttaaaaatgatacagaaacaaagggaatcttcatgagcccccacaattctcatgtcttttcctaatctagatagaaataaagaagtctcagccaggtgtggtggctcatgcctgtaatcccagcactttggggggccgaggtgggcggaccacctgaggtcaggagttcgagaccagcctggccaacatggtgaaaccctgtctctactaaaactacaaaaattagccaggtgtggtggtgtgcgcctgtagtcccagctactcagcaggctgaggcagggaattgcttgaacccaggaggcagaggttgcagtgagctgagatcgtgccactgcactccagcctgggtgacagagcaagactccgtctcaaaaaatacataaataaaaataaaatttaaaaaataagtctctagtctttgaaagaaacttattcacaattataaaaataaagagttaaaaaattgaaaatgcatatgcttacttagttcaaaataattatacatgttcataatggggaaaaatccaaattcataaacgttttgatttagttaacataatttaaatacctgtggtctgagtatatgtctatgcttcagaaacaacgtgccaataaatattccacacctaggggtgggaaagtgttttacttcccattaggttgcagatgtcttagaaacacattcctgcaccacagcttcaagaaatccaaataatgacctgatctgctggtttccaagctaccctaccaggagcaagtcagaggccctgcagggctcctcggtaagccctcgaaatccctctcccctcaatgaccccaccacagcagctccacttttgaatattttaccagtgcgtgttccaggtaagatttcctttcacaaaaggttttcgtgggtaaggaaaaatgaaaacttgctgaattactctaagcccctctctccagttgtttttataatggaaccacctgttgatttccaggcttgctcgaaaagaaaacactgctataaatgcatagagcgtcttcccttctgaaaaggaaacttgtgctagaggttacagaaaacagcaagaatgggattgcaaagaataaaggtggctgactaactctagacttcctaactgaggacttacatcaggaccagaacaaattaggtctaaatctacagtgggctccagggtggaaatggaggtctcacttaagaagcaggagaaatctcaaaactcagagcctagaatttaaccccagggcctccgtgttagcatcagcggctgcagagccaggatcaggacttctcaaatcctgacatatagacagggaggctgagaacacctgtcaaccaaaaacacatgattccagcagtgaatccctgggatcaagctcttcagcaagcagtgtgctggttcaccctaagaaggacttccagaaaacgggtagtggcctaggctgactgctggaaaccacgattctcatgggaacaaattaaaaattcagcaactgctgtgttctctttagagaatggagtgaagcgtgctttctcatgaaaaagcagcgggaggaaacttttccccgaaaggaatacagcaaaaggaccaaatgagagtcattatgtgcagaaaaatcccttgtcaagagaaatgcacaaatgaggaagtattaggaatctgcctggttttaaataaaaacacaccttcccatccttggaagggagaaaaccataattattcctgtggcaaaagggctgtggggacaatgcaggttgtcctgaacctgtgtgaacacctggtgaactagtttaccctgtctggcactcactcagccttggcccaggagccaaagagctgggatcaaaaccaactattgccaaagagccaaaggaaagacaaccaaggaataggatgctttaaaacaggacctgtaagtaaataatacaaagaagagcagtgtcaaaaagcagacttccttttcttctcatcatccatgatttatgaatttatggatcaaataatgtaaaatatatccagaatattaatcacccaccacactcatgatgctgaagtagtgacaatatctacacagaccaaaaaaaaaaaaaaaaacatttcaccaattagcagcagccaatgaggcccattatttcctgaggcaagtctttttcaagaaaagaagacagctttcccttggttctgtgaaagctatctctgagtagcattcttccccatgaaaagtaaataattccaccgtgaaagtccaagaaaagtagtgtttggccagttgtacttctccaggggatgaggagctcacctttgagcttgcatcccaaattgctaggtgggagagaattgcatttgtttctaatctcttgaggcttcagcaccccaagactagagagtagaaaacctcagtggtcctccaggcaaagtgggcccgggggttcagaacgctcgctcaccatgtctgaaaagcatgcagagagatcatagtactttgacttctgatataaccttctggggtgtttatgtacttattttttttgagacggagcctcgctctgtcatcaggctggagtgtggtggcgtgatatcggctcactgcaacttctgactccctggttcaagcgattctcctgcctcagcctcctgagtagctggggttacaggcacatgccaccatgcccagctaatttttgtacttttagtagagacggggtttcaccatgttggccaggatggtcttgatctcctgacctcgtggtctgcctgcctcggccttccaaagtgctgggattacaggcatgagccaccgcgcccggccaggaataaaaaaatctaaatagaattttaaataaaacctctctctgaattactgaggattcttagaaaaaaaaaacactatattcgttgtagtaacaacatataataatcaaagtcttgaattgatttgagctcagttatgacaatgtgctacatccatccacacacatacaaaattagaagtgcttgaaaaccaagacaaggaaccctgtggttttctggatcaacaccaggaacgatcccctccagccctccctgggctctgctttctcccttgccctctttgctggttgaatattgctggcgccacccagtggcccccatgacccctgcttcagtgccacagaaggcccagaaggctcaatgctaccagccctgccttaagtaccagggtgacatgactgctcccttactgagccagaccacctgcctggatcttgacatgcatggtctcctttcattctcaccacagcccaggacataggagggtctgaacccatttcacagatgggaacagagaggcttcaagttaggttgagattttacttacagtcccaaagctagggcagcactggggctgggcttccaacccttcctctgactcagctgcacacaccatccttactaagaggacagcagccccttgcctgcttttgcatttgcataactctctgaacccaagcttataaataaccaagccacatgttctatagctattcccaaagacacagcttgattccagacaaataactaagatataattttctgctcaccttccaacacatcttggacttcaagagagatgatgtctttcaagcacttacataaattctgggctgtggcaaggctctgatccttttcttgccacttcttcagcatcctaaacttgcagatggtaacatcttctgccctcttccagatatcatcagttttgataactccaactccagattggcagtggcaggttttgttttgttttgttttgtttgcaatggcacaatctcagctcactacaacctccgcctcccgggttcaagcgattctcctaactcaacctcccaaatagctaggattacaggcgcctgccaccatgcccagctaatttttgtatttttagtggagacagggttttgccatattggccaggctggcctcgaactcctgacctcatgatccgcccgccttggcctcccaaaatgctgggattacaggagtgagccaccgcacccagctggcagtggcagtttttatccactctttcctcaagtcgccagcaagggtaatcaaaaaactgagtaactgttaagggggtttcgtctttgcttcatctaaacacagatgatgaattcagtagttcctctgaacatttcaatcattaatagatacttacaatgaaaatatactctccttattaaaaaaagtatagcattaattgttacttctctcacttttaaaatatatttaaatgttccccaatcactgttttccaatcaattttaaggactaaatggtaccatttcatataacataccactgttagagtgtaatgttcattcacagtgatagttccaataataagactgttttgaagacagcacaaattaggttggaattttgaaaaattcagacatcaaaaataattcaagtggcttaaaaagagaaagatacagttttggtcttacacacctgtctttatctaaatgttagtggcacaccaagacacttagtgacctcagtgaccactaaggagaaaagcaagagatctgagctctcatctccattatgccacttcctggttttagggggaaatgcacatttcaaaaaaaagcctcatgggatggtaatatctgttttatatctgatttgtaatgtctgctaatttcttagaaagtgtcatacacttagaaggtgtgatttttgtgaaatatacatttggtcttccttatcttttcctggcataaagctcctaaaatccttggaatctaaggagtgtttagagtgtatacgctaattatatagcataattatatattagcatataaaggagtgtatgctaactatattactagatagcatatataatatagcatgtaattatagatatatatattatattattatataacataataatatatactatataattagcatataatcctttatatgttaatgaggtgactggtagctgagggcccctggatagcttcaggttaggagtgggtcacagtaaaaaccaaggctggattggaaagttaggattttcagctccaccccataaccagcagatagggaggagggctgaaaatggagttgatcactaacggccagtgatgtaatcaatcatgcctacaaattaaagcttctataaaaccaaaaggacagggttcagagaggttccaggtttgcaaatacatccacatgctgggagtgtgtgcaccctaactccacagggacaggagctccagtgctgggaccattccagatagctccctgagtatctttccatctggctgttcatctgcatcctttattatatctctaactaataaaccagtaaatgtaagtaaagtattgccctgagctctgtgagccactgtaacaa

SEQ ID NO: 131 - DNA, 1494 bp, Homo sapiens
ctggaggcggcggggccgtcccggaacggctgcggccgggcaccccgggagttaatccgaaagcgccgcaagccccgcgggccggccgcaccgcacgtgtcaccgagaagctgatgtagagagagacacagaaggagacagaaagcaagagaccagagtcccgggaaagtcctgccgcgcctcgggacaattataaaaatgtggccccctgggtcagcctcccagccaccgccctcacctgccgcggccacaggtctgcatccagcggctcgccctgtgtccctgcagtgccggctcagcatgtgtccagcgcgcagcctcctccttgtggctaccctggtcctcctggaccacctcagtttggccagaaacctccccgtggccactccagacccaggaatgttcccatgccttcaccactcccaaaacctgctgagggccgtcagcaacatgctccagaaggccagacaaactctagaattttacccttgcacttctgaagagattgatcatgaagatatcacaaaagataaaaccagcacagtggaggcctgtttaccattggaattaaccaagaatgagagttgcctaaattccagagagacctctttcataactgtaagtcaaaaaatgaaaagtttcagcctgtatgatgaattcatatcactgatgtctgattattttttcctctagaatgggagttgcctggcctccagaaagacctcttttatgatggccctgtgccttagtagtatttatgaagacttgaagatgtaccaggtggagttcaagaccatgaatgcaaagcttctgatggatcctaagaggcagatctttctagatcaaaacatgctggcagttattgatgagctgatgcaggccctgaatttcaacagtgagactgtgccacaaaaatcctcccttgaagaaccggatttttataaaactaaaatcaagctctgcatacttcttcatgctttcagaattcgggcagtgactattgatagagtgatgagctatctgaatgcttcctaaaaagcgaggtccctccaaaccgttgtcatttttataaaactttgaaatgaggaaactttgataggatgtggattaagaactagggagggggaaagaaggatgggactattacatccacatgatacctctgatcaagtatttttgacatttactgtggataaattgtttttaagttttcatgaatgaattgctaagaagggaaaatatccatcctgaaggtgtttttcattcactttaatagaagggcaaatatttataagctatttctgtaccaaagtgtttgtggaaacaaacatgtaagcataacttattttaaaatatttatttatataacttggtaatcatgaaagcatctgagctaacttatatttatttatgttatatttattaaattatttatcaagtgtatttgaaaaatatttttaagtgttctaaaaataaaagtattgaattaaagtg

SEQ ID NO: 132 - protein, 164 aa, Homo sapiens
MWPPGSASQPPPSPAAATGLHPAARPVSLQCRLSMCPARSLLLVATLVLLDHLSLARNLPVATPDPGMFPCLHHSQNLLRAVSNMLQKARQTLEFYPCTSEEIDHEDITKDKTSTVEACLPLELTKNESCLNSRETSFITVSQKMKSFSLYDEFISLMSDYFFL

SEQ ID NO: 133 - DNA, 27383 bp, Mus musculus
  misc_feature (1)...(27383): n = A,T,C or G
tgaggttaaagatgtgtgccaccacatccagcctcctgcacacaatacaactacaatccttcctctttccgctccccctcccccagatacctaggagcactctgtacacaccagtgatgactctgatggaagtactcacgtctgtaactgcctcccaaagagctgtgtgaccctttgccatcaccctccctgccagttctactcctggcccaatctcagtcagccactgagccatctcttgtcattacagattagactgatctattctacagccaagtccccttttcctgtggggcaatagatgtctgacaccagccctccctcacccccctaaccccctgccttgccatcttctagtcttatagaacattccagtgtgtcctgacacacagggatcatgtctatcaggggagggttctgctgaaacaggagactgtgagacggagtgaggcttcgggggagggtcgtgagtttgtcctcagcctagcagagaggggttggcatagaaggtgactaagcgtagcctacagttggagaaatttcacttcaagctgtgcaaggggtttggttccttctgatgctgaccgattaagccctgggtcttcaaccttgatctctttgttttggggtgctctcacccagggcagaacttagcttgttctggcttcctgcaggagtgggttgctgtccaaggaggggctatagcaagtcacttactgagaacctgacagcttgtgtactcgctggggtcagagatcaccgagtagtcaggagtgacggccagacaggctgaggaagtttccaagttgactcattggaaagatgttgtcctcagacagagctgaaagcctagtacaagccagcaaaggggcaaacagccaaagtcactctctggccagtcccatgcaaggtggtggcaccttccatgtggactgaaaagtgacacatggaaacaaacagctgccgtgggaacttcccaacagaggtgacacgagaaagctcctgctgccccagctcctgccagcaggagcaccacgtgccacactgtggagggaatagctgccaccctcagcaagcacagtcacacaagcatgacgctccctctggggagcgtggcagggtttgagtgggacctaccaggacagtggaaggcccgcgtgtcagtaagcagtggagagaacccactgggttgcaacttgctactatgggttgttctaagagccactatgaaacagctcatggaaagtctctctgtgtgccagacctgccagccaccaagcactttaaaacaaaatctcacttaatactaaacacgggcagtatattcttttttcctaggggaggaagtggacgcctgtgacttacccagggtcaggggtatactgggatggggatttgcattgctgaaagtccgtctctaaggcccatgctctgcccgggtaaggcctaaagacaccagtgactggagagctggtgctacacgttccccctgtcttcacccacctctgtctcctttccagccccattctgagaaatagccacacttgcttgaagctctcacctcctcctcttaatggaatcccctccgaatcctgtttcctcatgcatctcctgggtctctctgtggcttcctccctccttatctacagcttggctttcccaacccaaagggaatccctacaactgagcctgcaggtgcaggcctgcagcctcagggctccctgggattcccctttatcctcaggttaggtagggaataccctatctctcagccactgtaagtgccccgagcctgactgctctctaggcggcagctcttggtcaccaggttaggttgggaaatggccttacagaccaggacaggttgagatgagcctcctttgcactgactgaaccgtaagcggggccacttccttcaggacaccagccagtcatttgcctctctgactgagcgcctgtcttgcccttccctcttctgcctggaggagtcagggagcttccagctctccggcccttcacatggtgattcaggggtacacagttaaaccctgggctcattctccacagcctgaactgaaggaactgtacccagatctgggccccgatttgcagcttcttgacaattcattcttcaggaaattccaagcactgaaatgtgacctgctaaaacggaactctgtgtccttcctgcaaaccctgatcaggcttagatcacacacacacacacacacacacacacacacacacacacacacacactgtatgcacgagacctccatcctggcagaccctcatacccactacctactccctctctgatggtccaggttcgggcttgtcagtgaccaaacttgatctgggtctcccttgaagcaagaaaagaactcactggagggaaatggaagctttagcagttcacagaccggaaggaaaggatcagccctaacctgcctgagggatagaactcaaaaaacagagtgcagccacaagtgaaatcaggaccatgactgactgctgagaagtgaattcttagctcagtgactgagcgatggattgagcttgtctggtgcatcgggagtcctgggggaggggggggggagtgtatgattgcctgggcattgggagactagacctgggcaatcaactagtgattcttaattttcctaacagtgcctaccaccacagctcctgatgctgaaagaacggctcacctctttaccacatgtacacacacgtgtgtacacacacacacacatacacgcgcacacacatcccaaagagactgtttctgaaatggtctcatgtctattcctagtgggctgccccaggcctcagtatttctctcgaggaatgggtaatgcagggctctcaagctattgtcttgttacacactctggctttactactttctaactgtgtgttgtcaggaacactgccagcttctctgtgcttctatacgcaaaatgaagacaccagtatagcctagctcctacgctgattttaatagtgaaggaagggccttattgaacacaaagggcttcaagtgagcccgggctgaaaaatgcttccatacacatgagctaacactgttattattccccagacactggccactatccttcaaacctctcccagttctgtttcccttttgcctagggaaacagtcaaatccatcctgtaggcttgtttctgaggccagcctggggtggcctgagggctccttctccagtccaatttaaaatgtcccagctcaactggggctggataggtggctcagtggttaagagcacttgttgttgcaaaggactcaggcttgattcccagcacccacgaggcttaccttaccacctccttgggcactgtgctcccatgcatgcaccatacataataaaattaatctaaaaatattattttaaaatgccccagcatatttcagctcagactcctttcacaggaggaccatcccagagtctgtttggcacattccctgacagagacacacacacacacatacacacacacaccccgctgttcacttaaccttgtgttctactgtatccttctgctccaacctctctgagtagttctggtccctaccttgtgccaccccagctgtgtctcccgcctatgtctcttgtattatccccaccattaggaagtccatccacactcctgtttaacagcttgcacagaccagtgtccagcatactgttagtgctaaggccataagcaggctagggacagacaaccagagaggaggcaggaagaacagacaggggagagacaagcatggctccatgggacagacactctccccatctcccccacacacaccctccccccattcccgcaggtgccagaccagacagtggagctgctagagtccctctggttatgtgctgttctttcccatggcaccacctttcacaagctttcctgccacccactgtctgccagactgtgaccctgatctcttgttgccatggccctaggggatctgtcacatccttacaatacaacaactcttcatgctcgtgagcctacccctcccaccatacagtgttctagagactccctcttctccgggagaagtatccaatcagcctggaaaggctaggaccacacgctgctagaggaagcctcctcgcccaggcatgccaccggccttcttccagtcaacagtttattcagttcctgtttttccaggaagagagcattcttgcctccgtttcacaagcagggtctgaggagacaaaagcagccatcgaggttcagaataaataactttcttcagtttccacagccaagacacaaactcggactccttggcaccatcttctgactcacgtggccttgccaggtgccctctgaatcacggttggtctctgagtaggttcctaatgcacaggtgagcactatcaggacctccgcccacttcagctgaaggccaggctggctcaagctctggggacagagtctcagaacccatggcaagaaggtcctcctgtcctaggacctcctatccaagcctgctctttcttctgcatacccacaatgctctggttctggggcagagaccctgctctattcctttccttctctgaacacaggctctctgttttctcgtggcagctttctcaaggcacttggaggcctttctttcactcctgggaccttggatatgggcagtgggcagaaatagctccttagggcataagctccacctggggctaagacccaaatagcacctttcctatctgcacctcattctccttaattgcacaggagctctgcctgaagcagtgtttgtggtgtccccaaaagacccaagacatcaaaggcacaggtgaacaataccatcataaacaaatataagagctacagcaaatataagagcttccaccctggcctcctgagcatcaagccgtaacctctcagggtgtttgccagagcttgtgcatttcagaggcagcttccctgagtgatgttctctgctcttccaaactttccacagtgatcatcttagccataattggaaaaatattatatggttgctcacacctgcaagcccagcctcctcagagaatgaaacaggagggctgaaagttcaaagttagtctgggctacataaagtcaagggcagcttgggcaatctggcaagatccttggcctcaaacaaaatagcaaaaagggccggtggtagaaagctcgccaggtatgtacacgagaggctttggtccagcactgaacagctgaggccagcctgaagcctgcaccaagccctgggagagagtgtgttctggggacccttgccacctttccttcccatggtccctgaagcttgaaggtgttgtgtgactcctcctcagaaggggtgagcacctagtcataccagactgagcggcactggcagtcctgtgcggtgaaccaaggacttacaggagcgtgataaagggttaggagacagagggtaaccccaaaacaactgcatcaccaaaacaagcaaacaaaaaccagaaaacaacaccccagcatgagaaatcacctcaccaaagtcccttttttagttagctttctctctcctataatcgctaacatgcaatgcatgcacgcaagcacacacacataaagaccagagaccataagcgatggcaggattacatacactgagggtggagggcatacaggaatccccgggtctcacatgaggagttaatgagcctgcctccacctcccaacttcctacaggggagactaatatccctgatcctgtcagagggccttgtggatacggttagccactctgatttcaagaaggtaaacgaccatccgcctgcctctgcctcccaagtgctggaagcaggctaatttctgagtttgaggccaacctggtctacagagtgagttccaggacagccagggctacacagagaaatcctgtctcgaagggggaaaaaaaaagaaaacagaaaaaaaaaaaaaaaaaaaagacaactctgtgggctggagagatggatcagaggttaagagcactgactgctcttccaaaagtcctgagttcaattcccagcaaccacatggtcgctcacaaccatctgcaatgggatctgatgccttcttctggtatttctgaagacagctatagtgtactcatacatataaaataaataaataaattttaaataaattttaaaaaaagttaaaaaaaaaagacagctctgagtgcggtccccagctgggcgcccatgcactaatgcagccttctcaggcatggtgtccgggtccttcacaacatgatccctacaccagcgcctgtctcctctcctaccatgccaccagattaggaggctgtggtaagtggacggtgagtttaaagccagcccatggacaccagggaacgtagaccagtattagagggtttgtctccaatgatgggattagaatcctggtcctctggatgggcagccagtgattttaactgctatgctttgtctccagccccttaactcatgcctgtaatcccagcattcaggaggcagaggaagacagatctctgtgagtttgaggccagcctggtttatctaatgagttccagaacagccagggctacatattaatgataccctatcttaaaaaacaaacaaacgagccaggcgtggtggcgcacgcctttaatcccagcactcgggaggcagaggcaggcggatttctgagttccaggccagcctggtctacaaagtgagttccaggacagccagggctacacagagaaaccctgtcttgaaaaacaaaaaaaacaaaaacaaaccaaaaaaacaaacaaacaaacaaacaaacaaaaccccagcaagacaacaccctcattagaagctcgtttctttacccccctgtatgtgcacacatttactctgtgtacagatggtgagagactgtagactttacttttctaaattaccttcagagtgaggcagaaacgctccaaattcagggcccactgttctactgcctcatccaaggacccagagatgccctggggtctgaagcatccagtcaggctgctgagtgttggtggctgctctagtctggaaaagttgccttcggctaggcagtactctctgtgggaacaggatcgccccacccctacccagcacacccagagttaaccctacccccaaaaaattcccagaagaaattcacagatgggttttccccagacagacagctcatacatatttgccacttagcacagatgtttgcctggggatggagtgctgagagacaacgcaggtacacaactttagggtaacaggtagccccaaacaaagccagacacgccggggcgagctagaactgagatgcccaggaggcctagattttattctgtgttctgaagtccttcctattgtctgtgtccgcatctcacagagccggaaactctcctctctgcccaccaggcggcgcagcggttccaggagcactgcgaatgtgttgcgggactgagtctcagcacttagcaagattgttttgccaaacttatttcctttactactcaagtccaggaaaacatgtgcccaaacgtaagttcactatcgacttcaggactcccggagggagaagactttatcttagcctcatccttgcggcctaaggtgcaatatccagccaaggggtagcctaaacagatgagctacctctaaaagcgcaaaaacatggataggatcaaggcctgaagtgaaaatgctggagatcatcctaagccagaggctctgcgtccagtcagtgcccaggtttcagccaccctctccatccagtttgctccagcctcacactcaggcaggcaggaggtgggcacgtcctccctaggctgagcggagggagattggctgccagcagaggtgatccggaccaaagccatcttccccgggggcaattttgggctattttctctaaagatgttacactatctaactcctctttgagtttcacagcagccacaagtttgcacctttagagtgagtgatattactcaacaatgaccggctactgttattgcttgcgccgggcactaagcagagaacagaaccaaaccctatgaagtaaaggaaccctcgtggtgtgtgtgggagactttcaccttggtgttcctccaggtgagcaaaaagcgcgtgaggtgcttccctagggcagcggataaacttcgaacccggaaggagggacgagccgcacgcatgggactcaggcacgtcgcctagggcaggttgcgcaccggtggcgtatgcttgagtaaagacggaccctgaccctagtgcggggttacggggcgcggcacctagttggagctcagtaaatatttatggtgagagcgacaagcagggcccacctcctaggagggaaggaggaaagccagagccctcctcaattcctggctcctcccctgcaggctcagcaccgagctggccacggcgtcctggcccgatgtaattacagggtctgccgccaagcctggccgtaaaaaaccgggatgaaacggcctggaagcctcggaagctgggccggaccctgcaaagagccccgggtccgcgccttgccctgatgcgcagccgcaaagaagagagaccagggacagaaacccccgcccatcacaccctgcaacgcacacgggctcaccgccacacacgcaaactaccaagcactcagcttttgactttacggctccaagaatgcactcgagcctaatcaaacacctgcccgccagctccatctcaggcgcagacgccgccaacccctctccagacagctgctgattcgagaggtgaattcctgcagggttgtttacatggagagggggaggggttctgagcctggtactgagagcccaccgactggaagacccaagtcagactcagtcaaacacagccgcccaaactaccccccactccaatccacccccgctgcacgcccaaacacgtttctcctcttcttcacacactgttcacaaacattagcatatgtatgtcaggcgtttcacacgcttccacacacaagtgtctttacacctacccgccatcacacgcatttacacacgccatatgtacatgtgtcaggtcggttagtttgtcactcttcatgaccatattcccacattccatctgcaagcgcgcattcgctcaagacacacgtgaaatgtataaacaggtcattagcgtacgttggcgctattgaaaatattaggaacatccccccctacagcccctgagcccaactatgagttctcgcataaagtactgatggactgagtagcccttagccctggccgcacacgttacacgctcgatcacacacaacgtcgcactttattcccggcatctaagcgatgacacaatctcttgaacaaagacaacattgacaaacccaacaaaaacaaacagccgcgtctgtgtggggaggggcagccaagccagagtcaaggcatgggggagtgttgctgggggggcggggggaggagggggtcacgagagagtgtgagaaggcgagtgcgcgggcctgggtgtgaatctcaggaaaggtgtggttatatccccccacctcacaccctgacaagattggcgccccgcgctgcaaagccaagtcctgaagccactggttcccagacccacacgtataagttcttccatttttccagcttgctatggctttcagtcccacaaagccaacagagcctcacatagacacccccacccccacacccgtaagtgagcacacacagctatgggaggatctgtgcagaccccggagcgctctccgtcgctgagatatgggagtccttcctcccagagtctttttcccttcctccacctccaacgtagccatcaagccctggggcagcgcgcgtcgggcggggcgagggcggggctggtgttggcggcgccagcccaaaaggcggagtcgagcagcgaagaggccagatttgtgatcgtggtgcctactgtaccgtggagaagcctgtgggaaccttacactgcagagctctcgtcctggcctggctcggcccggccccgcgctatggagttcctttgggcccctctcttgggtctgtgctgcagtctggccgctgctgaccgccacatcgtcttctggaacagttcaaatcccaagtaagccctgagactccctggcagcctgggtgccgggttggcaatggcctttcgcagggtaactgtccctgccaacccctggcctgcgcctaggagaggtggccagggatgggttggactctatagctccccacctccgtctgtatctccccttactacctggcaacagccgaccagggcagaaacctgctcatgcctgctcgcacaggcgctggctgtttcagccctctctttctgccctctggcatctcatcactctaaagtaaggctctcctgctgggcactcctgccttgagaattggaacgttggccctggcctccggggctctctaagtccccccatgaaacttctgtgcactctcatttttgtgtgccacttgggcgtttgtatactaacaggcacctatggacgtcaagagtaagcacagcgctcagggagccttggaaagaacctccgtaggaatctaggttttgggcattagatattcattctgtgtttaagatgaccctgaagagtgcctccaaggttggggggggcataaattaggcacatgctgtgtatgggtcgaccgagggagtggctgaggtggtcacactaagggactggtaagaggagtgtcgctgggaagcttggggaggagcagagtggggcttcacagggctacaaaggctgtaacaggaaggaggtaatttctccggagcaggttttagggctatgaagcaaatggtattgagaggaagacactgtcgggccctttgttcttgcccttgagtttcttcaagttatgagaagagtgttagggccaaacctaagagggggatatggtggaacaagaagaggtgagaagtcgaggccacagaatgccactaaacccctccctcccagatccagtgagcctgcctccccttcccctgagagagatgctgggccagtttcctctggcactgcctattgagggtctgttgtctagggcatgtcggagggcaagatagagccagctgccaccctaaaggcactgtcttcctggccctggagtgctgctgcgccccaccagcccttgcgcctgcccttgcgcctgccccttgccttcctgacctagtcctgccctagtagtgggaaagagcaaagtccctgtttatgcccatgccaggtgtcggctgaaggaggaggaggggacgggaagtcatgagtagggaggggggaaccctggccttttccgttcccaagctcccaggtttcctctctttcaggaaggagcctcttccttgcccccctccctgtctactccaccactaatagagcccccttttccaaatggagacttaagtgtcacaggcaggttaagtgtaggagatagtacgctaagtatagcttcagccctggccctctggacacacacataaccctgtcttatttacagccacaggaaagccagtctagagtggaggtcatgggcggtctagccaggcccagcttgggggaagagatgaggtggcaatgaacagggcgggtgtagggttgcataggtgactcagggtagtgggcattaatcctgggctcaccaggctccaggcaaaggcagtggcagagaaaggtgccactgtgagctaggccctggtcctggagagacagatactcagctatcagatttctctgccgcttttgcccggaggccaacactggggcaaaccagtcctgggctgccctggggtcctgggggctgctcacttttgacgaggtaaaatttcacaggctctcaagagcgcctgggcgggtagcgaggtggatgaggcacgagtgagtcagtgcccatcacgggaataggggaaagacgccaggcccagagctgaaatacctgttctgaaatggcttctatgtttatctctccagagaggaattttaaaagcctccctctgcttctctctctctaccccccccccgtgggggaggggcccagaaagtctcattttagaggctgcaagcagttgcaaggccaggcctctaaggggtcatgatgactgggtagtgggtggccaccgtggaaccccaccatcaccatgggcaccacccatgccaaggactcgggttgaaagcaagttggcaggcagctctgctgagcctctccctggcagagcttgggggaattcagagaagctgcctggctttcagtgggaggggggaagcactttcctgctgctgagaccctacccaggctggagccaggtgtctggagctcagtgggaggggccggtgggcagtcaggctggagcctgcagggcttggggggaccaacgggggagaggaactggctccacctggggaggagggaagagctggggcagcctcaggtctaagaaccacagcgtttcatcaggggaaggcgaaattgttactcttggagataaaatcacagagattttcaggagtgagaaagtggaacgaggagatcaggacacaaatccgagtaacaggaaagggaggtttgagggacactgagagagtttgattatctgtgaatctgttggtctaggcattgggatgctgaagtacactgggaatctgagggagactcagtgtgaggggcgggatgggataagacagggatgtgacagggctcagaaggatgggaaggagaaagagacctgggctcctaagcacagaccagcccagagtgcagtctatccaccagcatttaaagaagtccccggggaacagtcgtcagtagaatacagaggaaagtgggctatggaaatgtttagaagcccttgctcgggcgaatgcctggagagttctagaaggcacttcgttacccgagagactcttggtggatgttatttggataatgagtaagagatcggtagtgagggaatgaagaagtcaagatcagtaaatgcaggagttgaggttctggaaagcctttgggactccagtgtgagaagtgaaggacaatgtaatgcattggaagttcaaggctctgggctgacttctgactgactggcttcctcctgctttgcccgggctcaggttccgtgaggaggactacacggtgcacgtgcagctgaatgactacctagacatcatctgcccacattacgaggacgactctgtggcagatgcagccatggagcgatacacactgtacatggtggaacaccaggagtatgtggcatgccaaccccagtccaaggaccaggtccgttggaattgcaaccggcccagtgccaagcatggcccggagaagctgtctgagaaattccagcgcttcacgccttttatcttgggcaaggagttcaaggaaggacacagctactactacatctgtgagtgcacaagggccaggcctcagagcactggtggcctcatgcttagtggggagtcaagtagccgagagcttccccttcagagtctaaactcagttttctcccattcgcatcagggatgtggtgtgagcttcaggtgtcttaggcactctgtttggtaaatgggaacaaaggtcaaaaacactcctagcccctgtccttgaggaagctgggaaggatcccgaataaatcagcagggcaggagagcagtgtatgatagacatgaacaccagacattgggaaaatgtatatgagagccctgtcttcagacacaccagaagagggcatcagatgccattacaggtggttgcgagccaccatgtggttgctgagatttgaactcaggaccattggaagagaagcctgtgctcttaactgctgagccatctctccagccctgacacttgggaaaatgacccatgtgcctgcccgaggtcaaagacagaaaaggccaagtgggtccaagacagaaaaggcggagtccagaatgactggaacaggagggcacacgcacaaagggagggtgacagctcctggaaagagagtacaggaaatagagagctgtgctcactcagaaagtgggtcggacagcttcttcaggcccagatactagtaagagttcagactttgtcctgagggcagcagaaacctgttgatgtatcccgagaccgagcaggccaggggctttgtgaagaccagatctgggccttagtcttctggctgagtctagttcagcatggtagaaaatggtccagggaaagggggcttacacatgaacacctcacccaacttcaggtggggggtgtgagatgggctgtgtgaaggggacagtgtccacggccctgtcactccactgttaaagctgagcgttgttgcagagaaagggagatggggctgcgcactggtcagaacgtaggtaacaactgaaaataaatgccacgggtagctagctaggcgtgggctcacctgtaatcctggcaccaagtttcaggtcagtgtgcgctagagcaagaccgtgcctaaaatggatttaataggaatgtccatcagtgaagagcactggtcgattcctagccccacatagcaatgacaagtctaatagatctcccgttccagaggatccagtgtccttttctgacctctgcaggcaataggtacacagcacagtactcagacaaagcaatcaaatgcaaaaagttaattttaaaacattttaaagatttatgtattatatatatatatataccattgctgtcttctgacacacaagaagagggcatcggatcacaacggatggtggtgagccaccatgtggttgctgggaattgaactcaggacctctggaagagcagtccgtgctcttaactgctgagtcatctctccagcccctttaaaaacatttttttttaagatgtatttattgctgagcagtggtggcgcatgcctttaatcccagcacttgggaggcagaggcaggtggatttctgagttcgaggccagcctggtcttcagagtgagttccagtacagccagggctacatagagaaaccctgtctcgaaaaaaaaaaaagatttatttaatttatataagtacaccaaagctatcttcagacactccagaagaggctatcagatcccattacagatggttgtgagtcaccatgtggttgctgggaattgaactcaggacctctggatgaaagttagtgctcttcaccactgagccatttctccagccctaaaaacattttaaagattaaattttaaaatcaaatgcagacaggagaaaggaattgaagtgagcagggacaggtctggtgggacacacctacagccttagccctggggaggccaaagcaaggagagttgggaaggttagtttaaagctaacctgggctaccatattagagaccttgtcacaaaagggaggggggcactggagagatggctcatcggttaagagcactgactgctcttccagaattcctgagttcaattcccagcaaccaaatggtggctcacccatctgtaatgggatctgatgccctcttctggtgtgtctgaagacagcaacagtgtactcatatatattaaataaataaataaataaataaataaataaataaataaaaaccagagagagagagcgcgccagtgagatagctcagcaaataaaaaggcgcttgctgccaacctgacaacttggatttgatccccagctcccatgtgactgaaggagagaatttgctttcccaaattgttctctgacctctaaacatggaacacacacacactgaataaatattttatacagagaaggagggagggagggagagagggagggaggtgatgcttgcctataattccagcactcagaaggtagaggcaggagatcaggaattcaagagcatcctcaactgtacatagcatgttcaaggccagcttgagctttatgagatcctgtcatcccaaaatttaattaagtttttttaaaaaagcagttactgcacaatcctgacaacctaaatcttgtccagagcccacataaaaagccagatgctgttgtgcacatctgtaatcgcagcactctgatagggagatggaaggcagagacaagagacttagccttagtggggtgtgatggtgcacacctttaattccagcacttgggaggcagaagcatgtggaattctgtgagtctgagaccagcttggtctacatagtctgtcccagagcaggctctgtaaagagaccctgcctcaaataaataaataaaaattaagcagggcagccgggtggtggtggcggcacacgcctttaatcccagcacttgggaggcaaaggcaggcagatttctgagtctgaggccagcctggtctacagagtgagttccaggacagccagggctacacagagaaaccctgtctcagaaaaacaaacaaacaaaacacaacaacaacaacaacaaaaacccaaaaaacagggcatcgagtcagacaattttgagctcctatcttagcaaaggctctttccttaccatcctatggatttattttacagccaaacctatctaccatcaggaatcccagtgcttgaagctgaaggtgactgtcaatggcaaaatcagtgagtgtcaggccctgtggaccacttccttccatctgtgctgggcgtggtctagtggtctgggatggggatggaagttgcctctctgtctcctggtgcaaaaagcctgatctacttccattcttatttttcagctcataatccccaggcccatgtcaacccacaggagaagagactccaagcaggtaggtagtagcctgagacagtttggtctgggtcacaggaaggggtttgcttaaagagactgaggagtaaggtggctccctagccacatacgggctggctaaatcctgtgtggctggaagccgatgcaaacacttaccatgtctgtctttgccttctcaccttgcagatgacccggaagtacaggttttgcacagcattggttacagtgccgccccccgcctcttcccactggtctgggcagtattgctcctaccactgctgctgctgcaatctcagtgagggtgtacgcttgccctggcttatggattggaatgggactaaggggcagccccagccctgggaacctctcccactacacccacaagacgccaccatgaagcctcaaaaggttcagtattaagggttttaaccgaaaagagtttaaccagcccaactgtgccatccctgcctccacttcagagggatggagaaagaagtggagaaggtccttaacctgcagtttctgcctttaagccaaagaaacaagctgtgcggacctggcccattaagaggcctcagtgggagaagggctaaaaagagcctgaggtcatgcggttggacactgaacttggtaaagacgtccttccccaaggaagccataatgtgcagatgaactgaccgaaggaaaagcttgagacagcttcctgcgggggagccaggtacagaagaggcagcttgggctgacccagcatctctgcaagatttccacctgctgggctgccagagaggtttgtagcccggccctgactgcatcctccccatccctggggcaacattccctggagctgtgccaacaggaggactgaagcagcctggttttagagtgtagctgtaagggcagtgcccgtgtgtacagtctgtggagtttagcttaacgggcagggcccacatgtacagtgtctgtatataaatgtgctgtatctgttcatttctatgactgcagggtttttttatacagtgtttttggattcataataaattgatggttttttatggacatgcttttctgccccaccatgttgatttgtgaccagtgtccccattgtgtgttaggctctgtgctaaacagaagcaatggggggggggtgtgggggggggcaggtataannnnnnnnnnnnnnnnnnnnggggggggcaggtataatgcagagctccttttgcggctgaggtgggaaggttaaaaacttgagactgcatgagtaactcagaccttgcctcaaactcaaaaataaaaggctggaaatgtaccccaagaagtagagggttacctaacgtgtgtcagccctgagttcagtcctcaggagcacaaaacataagtagccaggcatggtggctcctgcctgtgaccccagcactcagaaggttgaagcaatgttgccaaaattccaatgccagcctgggctacagtgtgagactttgtctcaccaaaacaaaacaaaaaaagtaaataaaagacaaaataaataaatggctaggatcagtcttaccaggctaaaggagtttactcctgagggttctgcacaactccctgcaagagtgggctatagattcctctccgcacccactctttgttcttcctgtccaacttcaccagcctcgagcgctgggctttggcacaccatgcaggtactcatgctgtctgggtgagtcagggagctggatgccagctgaagcatgtgcgctgccccaccagcagagccgcctgggaggctgggagggaaagttcccagcagcaagtatgttggaacagggggccaggggtaggcttgtccttggatagggcaggtcgtgtaagagaggacatctgaaagaggatggcaattcctgcttttgggggacagactggaaagaggtttcaataacctccaggaaaaccctcccaaagctgggtaaccaaggttctgatatgaattgggggcgcgttgaagacctgtgagactaaatttgaggtttgtggtccagcacacaaaagcatacaagaacccagaagttgaggctagtggtctcgatgatgcaaggggtgcgcagtgtgaggaggggtcggatcggggacaaatgcaggggcactactaaaaccactaaacgcaatctgaacagcacgatcaggacccaggcccgcacattacagcaaaccacccggccagcacgcggcgctggtttggctgggtccccagttccggtgaagttcgggcgagggcgggttccggcgcggttccacggggaagggcggagcttcgccttccgcagctccgggtctgagctactggaactccgcgctgggctagggaaccggctccggtgggatggaggcgggcggcgtggcagactctttcctttctagtgcctgcgtgctcttcaccctgggcatgttctccactggcctgtgagagtgtggatggactgggctggggcaggaagtcaagaaatgaaagcgggcaagagacgtggctgcaatatcttgctgcttttggaacccagaataatagtggaataggattggatgatttgaggtccaaggcgaggctgcctcttggcctgaggggggagatctgcttgtcgttcaggatgattggtaaacaccgagaaatcttttacccactcctaacaatttcctttggatcccttccagctcggacctcaggcatatgcagaggacacggagcgtggacaacatccagttcctgccttttctcaccacggatgtcaagtgagagtgttgttggctgtgatgggaaaggctgagggaggtgcaagagatccctggagacctgctgcaaccccagcagccccttggaccttaatcctccttccctcacagcaacctgagctggctgagttacggagtcttgaagggagatgggacccttatcatcgtcaatagcgtgggggccgtgcttcagactctttatatcctggcatatctgcactacagtcctcagaaggtagaggccctcccttgcactcacctccaccccacacctggccatgttggcagagcatatagttctatttcctggaagattagtgggatggcattaattccctttcctagaaggcccttctggttctcctgcccatgaagtcaaccctttaaaatgcacacagagccacccaccctccccttgttcgaaatgctggtggcttacccaaccccgtggtgtcaagatatcctgtgctcccccaacaggctgggggaagagggctatactgtctgatagttcctttagggttaggaccagggccaatggctaagaatggccattcgctctgcttccccactcagtcacactaacatttattggtctcttattgtacatgtatgtgaagctcacatgaaaaggggagggatctaaaaatggctctccccttccctggggatctccagtgttgtgtggctgagatttctctcaaataactgagtggtgagaggctgacgtgaaggccgggataaaagttgatttccccattagagcatggcagaagacaggaggaggcaattccagcagagagatgagtgttctgggtacagatgcatgtaagacgcctctcccctgcagcatggtgtgctcctgcagacggcaaccctgctggctgtccttctcctgggttatggctacttttggcttctggtgccggaccttgaggcccggcttcagcagctaggcctcttctgtagcgtctttaccatcagcatgtacctctccccactggctgatttggtgagtaggggtggccaagaggtaggggagatgcggagaagggctaggctccctgagccagggactggctaatactggggcgggggcggggcccagctcttggaagaagtcaaggtagcagaggtgagtgggatgcaggaaaagggctgaatgaaagacgcaccacagggattgtggtcttttttccgcgaggaaattctctggcgaggactcaggaatggttctatgaacctgaaccaggcacatttttgccgtaggccaagatcgttcagactaaatcaacccagcgcctctccttctccctgaccattgccacgctcttttgctccgcctcttggtctatttacgggtttcgcctccgagacccatacatcacggtaagcagactctagattgggacgttgggtctacaaagcagagtctggtctttctagcagctttttgattgcaggtgcccaaccttccaggaatcctcaccagcttaatccgcctcgggcttttctgcaagtaccctccagagcaagacaggaagtaccgcctcctgcagacctgaccccaggcacccgagtgccaactggataccaaacagagctcctgtttctgctggtccttgtgaccagttccatggatgcaataggttgtgagaaaaagatgactttgaaactaaagggaccaaagatctttccttagatcagataggacctgtgggatgaaatcacatttttacaggagatcatcttttctcatttcggaggctgaggtggtattagaatgtgccttaaaataaactgttccccacccctgcctgcagagtgatgtgttcttcgccattcccaacctgcctgacttgacagacagagggcctactgcctggggggcctgtaggattggctcagaaaagggatttgaaagaactagaagttaggactggagagatggctcagtggttaagagcactgactgctcttcccaaggtcctgagttcaattcccagcaaccacatggtggctcacaaccatctgtaatgggatctaatgccctcttctggtgtgtctgaagatagctacagtgtactcacacacataacataaatattttttgttgtttttttgtttttcaagacagggtttctccgtgtggccctagctgtcctggaactcaccctgtatacccggcaataaatctttaaaaaacaaaaaacaactagaagttagaaagatccaggaagtccttttaaaaagaaaagaaacctggcagtggtgacacacgcctttaatcccaacacttgggaggcagaggtaggcggatttctgagttcgaggccagcctggtctacagagtgagttccaggacagtcaggactgcatggagaaactctgtctcaaaaaacaaacaaacaaaacaaaaaaacaaccaacttgaaagctgtgaagaatggaaggaagttagggacccatgcttcctgcgcagccttgtatgggaagcctcgcagcacttccaaggttgaagctgaagcgggaggaccacaggttgagggcagcctgggtagcacgacagggttggttgtaagccaggttgaactacttattaaaaccatatatattaaaaccatatacacaagtaaacaaacctgttttggggatatagttcagttgtggacttccaagtttgaagcccagcatgacataaactagtctagtcatggtgggtttagcctgtaattagagacgttagaatcgagataatccacagccatatggctggggtcaaggccagtctagggtacatggcatcctatttcaaacagaaaaaaaatcttgagaagggaacagaacaccatcaaaatgcaaagctaagtaaggcctggtaaggtggttctcctgccccctcacctcttgacctctagtatatagaatccccatcccaccccccaccccaccgctatcctccatactcaaaactacacaagattagaaaataaaactgcattttaatgcggaatgaggaaagatgtccagactggaatgggtttaggtgtcagaagcgcagccccctgcgtgctaaatcagctcgggcctccacgatctggctctgcagctctcgggcagcgtcctcgcagtcgtgaaatgtagctacgcgatagcccaccgtgcccagggcatagcagccagcggagaccaacaggtaggcaggcagtggccacaggacctctcggcaggggaaaggcaactccaagcccagtgctcccatggtcagggcagcccaggcagagcccaggagagccagtccccaaagccactgtgttaacttcgtcatgttggctgcagggagaaaaatcaaagctaagggttctttctaccgatccccgctctgcatctgacatttattcccagtctccgccacccatttccgtctttccactctgcccgccacctaagcgtacctccgtgtgccgcgctgacaaggcccgcatcagcatccggaagtccctttctactaccgccctttttccgggctgccttctgggaactgtagttcttaggacaatttcggccgcgctcagatccaggttggttatacactgctcttcgaaaatctgagttcagaagagtttttgccgttttgttctggagacccacatcgataccggctggaacttgtggacaatcggaggataccccgaaacgctgcgttaagatgggaatgttacatcgccccccttaaactagattctccagtgcagaaagcccactcattcaattattcaagcattcttccaacacacccatcaatcagcaaacatgaacaggccgcctcacacctgctaggcaagttctcaaccactgagcccttttatattttgaaacaggattttacagagtacccggaataaacttgaactccagtctgagatcctgtcttgaagaaataggctggtcatgtcaaattgaactgcaaatcacaggcccatatacctgtgattccagggcaattcaacagaagaagaaagaagaccatgaccattacaggatatgataaagggttggttgctaggggatggagaggtggctcagcagttaagagcactggctgctctatcagaagatcctagttcaattctcagcacccacatgacagctcacagctgcctgtaactccagttccagagaatctgacaccctcacacagacatacacgcaggtgaaacatcaatgtgcataaaataaaaaaaaaattttttttaataaaaaggggttggttgcctttaggtagcaataacagtttaaataaaacaagggggttttctttggcttgatttttggtttgtttgggttttaaatctttatttatgtgtgcatatgtgtgtctatctgagcgtatactggatacatttaggtgcctgcagaagccagaaaagctggagttacaggtagttgtgagctgtctgacactggagctaggaaccaaactcaggtcctctggaagagcagcaagcacacttaacagctgagctgtttccagcctggttggtattcgttttgttttgagacagagtctaatgtaatgtattccaggctggcctagagcatgggatgtagctgaggatggccctgaacccttgttactcctgcctctgctttcccagtgctagaattaaatgtgtgtgttaccaaaccttccttaaagcaattctgttgttggaaaaacgagtaaatgaggagtgaaaaagtcctgaggacatccacatgatcccaaggctcaggaggcagggctgctccaagttcaaggccaacatgaactacataaggaaggccctgatttaaagggaaaaaaatctagtctgagtggattgagggtccacttggaaatcacaaagcggggacagaagtagactgtaactccaagacctcacacagactcacgtgcaggctaaacaccagtgcacataaaataaaaattaacaaatgttcaaagacccattgttcaaagctttgtagctggattggaaatttagtttactttggtatgtcaaaagggaatccagaggggctggagaaatggctcagcagttaagagctctggcagctcttctagaggatcctctgagctccattcccagcacccacatgatgtccttaaccatctgtaactccagtttcagagcgtctgacaacactttatgacttcccgaggcaccagacacatactcagacatacatgcaggcaaaacacccatccatgtaaaataaaagagaaacaaaccaaacccttatttcctcaaagccttcaatgttaatcaacaattattatttataaaacaaaaacaaaaaacatgttactgagacaacagacaagagtaaaatgtgccgttttcttttttcccctttctttcctttccctgagacagggtttctctgtgtagccctggctgtcctggacctcttgttctgtagcctaggctagcctgaaactcacagagatcctcctgcctctgcctcctgctgggttcaaaggtgtgcaccaccacatcctggcctcaattaaaaagtcatttattaatttttattttacatgcattggtgttctgcctgcgtgaaagtttgtgtgagggtgtcagagcttggagttacagacaagggtgaactcagccagctctccagcccttcagaatttttaatcataatttaaatttgttttgagagtataattatgctacttttcctcctccatttccttcctccaatccctcccttgctctctctcaatgtatggcctctttttatttttttagatttatattctccgtgtatcaacggtatgcctctatgtatgaattcatcacacgtgtgcctgctacccaaggaggttaaaagagggtgtcagatcccctggaccagagttactgatggttataagcaaagtggcagtgactggacctggatctgttacaagaactgtacatgatcatggttttgttgttgtgatttttttttttcaaaacagagtttctctatatatccttagctgtcctgggacttagtccatataccaggctagtctcgaactcagagatcagtgttcctctgcctctgagtgctgggatgaaaggcatgtgacatcacatgatcttaacatctatatatagagagatttgaggcctcatgagttttcccccttccaggttagcatgtccattatgtctcttagtgtggtggtttagccaatcgtgttgatgagacttcatgcaagtagcttctacatttctagaagatgaaatctcacagctgattcactggttctctctctctctctctctctctctctctctcataatttatttatttttcatttacttgcattggtgttttgcctgcatgtatgtctgtgtgagggagtcaaatcacttggaactggagtttcagacagttgttagctgctatgtgggtgctggaattgaacccctaatctttcattagaagaactgccagtgctctaaaccactgagccatctctccaacccctcaaacatctctcttccttccttccttccttccttccttccttccttccttccttccttccttttttttttttttttaagttttctctctagccttgctttgtggcctgtaccaggctggcctgatgctcaggctcctgggatagcattcaactgaactcttcacattcctcctgagctcattttcacaccaatagcaatgtaaaaattaaatattaaattagctaaaactgccgggcagtggtgctgcatgcctttaatccaggcacttgggaggcagaggcaggtggatttctgagttcaaggcgagaaaaaaaaaaatttagctaacgcttagaatacatttaagtcaaggaggtaaggtaagactgtgtgttaggaaaatgagaatcagtgacaattaaatcttccttctatggcgagtctactaggaggccgtgccagtgggcacaaaggtcatcacctaaatagataaataaataaatgaaatcggaaggaaggaaggaaggaaagaaaaacaatcatatattatttagaaatagagaggaaaatcttaggagcagcagctttgggatgagagacaggagttcagcagaggagggggaggcagagctagttttcattagatacttgtaaaactgacccacttccataactatgtaagtaagttcctttgttaaagacagttccttaaagaagaatgcctgcccgcagtgacaacctccctatgagaacacgcccctcacaaaggttctcctccatccctctccagaaatacaagccgtgcctaaagggaaggccctatggtacgccctggatgtgaaatgcccaggatgcttctaatccccacggtcttgtccacacccaaatgctatcttgcatgttggctgctccagaatctcgtcagcctacagcaggaaaagcaaggctgacagaaggtggggcctcagcctactcaggaaggaggcagacacaggcctggctacaaaacagagcagaattagagcctactgcagcatgttgtgaccattaaacggtacggcgtcccacaggccaagatacacgcaggccgcccagtgaatagttatctttctgccaatgatcattattaaattcttttttatttttgaagggctgaagctgggaggtagaaaaagatgcagagcaccaaggctctgcttattttcttcaagaaaaggaagggccgaagggactggagagatgctccggggttaacagcattggttaagcccagggttctgttcccaacacctacag

SEQ ID NO: 134 - DNA, 958 bp, Mus musculus
gcctgtgggaaccttacactgcagagctctcgtcctggcctggctcggcccggccccgcgctatggagttcctttgggcccctctcttgggtctgtgctgcagtctggccgctgctgaccgccacatcgtcttctggaacagttcaaatcccaagttccgtgaggaggactacacggtgcacgtgcagctgaatgactacctagacatcatctgcccacattacgaggacgactctgtggcagatgcagccatggagcgatacacactgtacatggtggaacaccaggagtatgtggcatgccaaccccagtccaaggaccaggtccgttggaattgcaaccggcccagtgccaagcatggcccggagaagctgtctgagaaattccagcgcttcacgccttttatcttgggcaaggagttcaaggaaggacacagctactactacatctccaaacctatctaccatcaggaatcccagtgcttgaagctgaaggtgactgtcaatggcaaaatcactcataatccccaggcccatgtcaacccacaggagaagagactccaagcagatgacccggaagtacaggttttgcacagcattggttacagtgccgccccccgcctcttcccactggtctgggcagtattgctcctaccactgctgctgctgcaatctcagtgagggtgtacgcttgccctggcttatggattggaatgggactaaggggcagccccagccctgggaacctctcccactacacccacaagacgccaccatgaagcctcaaaaggttcagtattaagggttttaaccgaaaagagtttaaccagcccaactgtgccatccctgcctccacttcagagggatggagaaagaagtggagaaggtccttaacctgcagtttctgcctttaagccaaagaaacaagctgtgcggacctggcccattaagaggcctca

SEQ ID NO: 135 - protein, 225 aa, Mus musculus
LWEPYTAELSSWPGSARPRAMEFLWAPLLGLCCSLAAADRHIVFWNSSNPKFREEDYTVHVQLNDYLDIICPHYEDDSVADAAMERYTLYMVEHQEYVACQPQSKDQVRWNCNRPSAKHGPEKLSEKFQRFTPFILGKEFKEGHSYYYISKPIYHQESQCLKLKVTVNGKITHNPQAHVNPQEKRLQADDPEVQVLHSIGYSAAPRLFPLVWAVLLLPLLLLQSQ

SEQ ID NO: 136 - DNA, 27571 bp, Homo sapiens
  misc_feature (1)...(27571): n = A,T,C or G
cagagcttacagtgagccgagatcacaccactgcactccagcctgggtgacagtcagactctgtctcaaaaaaaaaaaaaaaaaaaaattaatggggcgtggtggcaggcatctgtaatcccagctactccggaggctgaggcaggagaatcacttgaacccgggaggcggaggttgcggtgagctgagatcgcgccattgcactccagcctgggcaataagagtaaaactccatctcaaagtaaataaattaataataataataacaataataattgcatagagaaagtagtcttgaccccattttatgatgaagaaaaggtgaggctcagagaggttaggtaactttcccaagtttccacagctgggcccccgaccccacccctctctgcactgtctccctgttcaccagctgcctttattggatgtggcttgcggcacttaggcagagcacctgttatacaaacaaatgagctgtccattatctggccatctcccacctgcctgcagggacgggccagggtgagcttaagccctgggggactgcatctcagagcctgtcccacaaaccgcctcaggttccctctgagactgtcccacacccagccccctctctagctctttcctttaccttctctactgactccccccatttgctcccagcagatacagatatagcacttggtgccatatctcctttatccccaggagagccaggcaagtggggcgtagaaggaatagcatggtgtagatccaagccccatcaaatgtaccccacctgagttcttttttttttttgagactgagtcttgctctgtcgcccaggttggagtgcagtggtgcaatcttggctcactgcaacctccacctcccgggttcaagccatattctcctgactcagcctcctgagtagtagctgggaccacagacacgcgccaccacgcccaactaatttttgtatttttagtagagctggggtttcactatgttggccaggttggtctgaaactcctgacctcaggtgatctgcccacccggcctcctaaagtgctaggattacaggagtgaaccccctcacctggccttttttttttttttttttttttttttgagttttgagagagggtctcgctctgttgcccaggctggagcacagtgatgccatctcggttcactgtagcctctacttcctgggcttgcccctgttggcctgtgcgggaaccatgcgaggggaaatgcacactgagagtgagagtgagactcagtctccaagaaaaaaaaaaaaaagagagagagagagagagatggggtttcaccacattacccaggctggtctcgaattcctgaactcaagtttgcccacgtcagcctcccaacgtgccgggattgcaggcatgagccactgcgcctggctccccatctgagttctgaataccatcacctttcggagccttagttttttcacctggtcagtggggacataattcctgcctttgcccacctcgcaatgtgtaggagtctataaaaaggaaatagtatgtgataaaatgtacaactgaaaacactggactgtaataaaatgttacacaaatgtaagggattccaagttggttgtaacataggcattaaactataacttctcaaagatattgaccataaaacttacagagccatgggaaaagaataaagaaatgtgcatgttcctgagccttaacttctatgggtgatttttttctctctgcatttgtgtttctctacgttttctgcactaatcatgtattccttctggaattagaaaaaaaaaggcagagcacagtggttcatgcctgtaatcccagcactttaggaggccaaggtgggcagatcacttaagacagcagtttgagaccagcctggccaacatggtaagaccacatctctactaaaaatccaaaaattagcagggtgtggtggtgcacgcctgtaatccctgctattctggaggctgagatgggaggattgcttgagcccaggaggttgaggctgcaatgagccaagatctggctactgcactccagcctgagtgacagagaaagaccttgtctcagaaaaaaaaaaaaaaagaaagaaaaagagaggccgggagtggtggctcacacctgtaatatcagcactttgggtggccgagggggggtggatcacaaggtcaggagatcgagaccatcctggctaacatggtgaaaccccaactctactaaaaatacaaaaaaaaattaactgggcatggtggtgggcacctgtagtcccagctactcaggaggctgaggcaggagaatggtgtgtacatgggaggcagagcttgcagtgagccgagatcacgccactgcactcaagcctgggcgacagagtgagactctgtctcaaaaaaaagaaaaagagaaaaaaattatataaaagtaatgcttctgaaataaaagtatctaactcctggtcttatatactgtgttatagtgaaaaattttagccaggggtggaaaagaggtttatcggctgtaccaagagtgaatgtcctcctgccagtccctcacccagctttcccaccctggatgccaaagttgaggagctggaaaggacagatttctccccagccaaaatcacaaggaagggattcctggccctatgtctctttgctcttctcccctgcctgaagcattgcagtctaggagaaacccttcccatgagcctcagagttcacaagcaacaattgttctgagcttctcaccttcctgagctccagaccctcacctccaaccgcccctgggactcctcattctagaagttccactggtttctcaaatgcaacatgtctgcagcagatactattcactgcttacccaaaagccatgtaatccctgcttctaggctgatagaactccagtgtctttgggaagcagaacagattcaggggtggataggtccctgccccagccccagtcagagcactcccttctcctttgtagatatgggtgtagcaacggacatgtggacacacgaactggttctgttccttgtctgggaagttgctagaaaagattttcttcccagataaaaagagagccttgggctggtcccagataaaaagagagccttgggctggtcagaaggtagtgagttatctcaattgttcacagtcagttacagattgaactccctgctctactcttttctcccttctcacagctgcatttgactaggctttaaaaagggagaggggttccgggcgccgtggctcacgcctgtaatcccagtactttgggaggccaaggtgggcggatcacgagatcaggagttcgagaccagcctgaccaacacagtgaaacccagtctctattaaaaacacaaaaaaattacctgggcttggtagcgtgcgcctgtaatcccagctactcaggaggctgaggcgggagaattgcttgaacccaggagttggaggttgcagtgagccgagatcacgccactgcactccagcctcggcaacagggcaagactccgactcaaaaaaaaaaaagagagagggagagcaccatgggaggataggaccgctttgctcccactccttcttcttggggctcctgtagcttgaatggagctctctggctgaagcagccatcttgtgaccatggtcctgaggacagcagggcgtggggaagcactggaacttcggtgacactgttgagttcctgtctcacttccagactgcttgttatggggggaaagtaagccctttacttaaacttcgagtagctggtattctgttatttgcagccagaaatttatataatgtcccaaactgaactctccattcgtccttcctaggcctgttcctcccgtgcgtttcctatcgataaggagcactcctgcccaccaagccaccccggacttctcccagactcatgctcatggctcagctctcacctatctctgtcctctgctccccacctcctctgccactcctctgctccccccatctcctccagtagcaacagtcaggggagcagaggacagagagctgagccagagtattcactgaacaagctctcacctctctacctgcgttctttgttccctcctccctgaatgggaatgcctacttattctccaaagcccatttcaaatagactctcttctatgaagcactccccaccccagataaacattccttcctctgtgagtctacagcttgttatactacttatacctctattatacttcttatcatgtattctaattatacatttgccagaattataccttcttttttttttgtttttgagatggagtctcgctctgtcacccaggctggagtgcagtggcacgatcttggctcactgcaacctctgcctcccaggttcaagcaattctctgcctcagcctcctgagtagctgggacaacaggtgcgcaccgccatgcccggctaatttttgtatttttagtagagatgggggtttcaccatgttggccaggctggtcttgaactcctgacctcgtgatccacctcggcctcccaaagtgctgggattacaggcatgaggcaccgcgtccagccccagaattatacattctttaggacaaggatgtatttcagagtccctagtgcctcccagtgtagtgtttggcttaaatgattagtaaatttctggtggaaaaggccccaatataaagcatcttctggccgggcacaatggctcatgcctgtaatcccagcactttgggaggccgaggcgggttgatcacctgaggttgggagttcaagaccagctggccaacatggcaaaaccctgtctctactaaaaatacaaaaattagctgggcatggtggcgtgcgcctgtannnnnnnnnnnnnnnnnnnnnnnnnnnnnnnnnnnnnnnnnnnnnaaaatgaataaataaataaaaataaaccaccttctgctgctttctgtgcaggaacctgagtcccatccttctgagcttctgcctctctcatctccctcccactctcccatcctatccaatttcctcttccctgcagtggacttctggggagaattccaccttccctcacagagtctggcccccttctgagtgggatgtggggaggaaattttatagaatatgtccaggggagtggcaggagatgagacagaggtggtgtgggggccatgttgccaaaggccttaaatgccacgctgaaggattttgaaattactctgtagcccatagataattaagtagaaacagatcttttagttatagtcacctcgattctcaagaagataactggactagtatcaaaagatctggctttggtttggcaatatcaaaagctttttcacacatctgtaagcccaaatgtaagccggtccatagtaggtgctccataagtgtttgttgttaagtcaattgcagggttctttttttttttttttttcgtgagacggagatttgctcttgttgcccaggctggagtgcaatggcactatctcggctcaccatatcctctgcttcccaggttcaagcgattctcatgcctcagcctcctgagtagctgagattacaagcatgtgccaccctgcccggctaattttgtattttttgtagagacggggtttcaccttgttgtccaggctgatctcgaactcctgacctcaggtgatccacccgcctcagcctcccaaagttctgggattacaggcgtgagccactgcacctggcaattgcaaggttatttctaagttcttttttagagactgtctagctctgtcacccaggctgcagtgtagaggcatagtcacagctcactgtaacctcaactcccggactcaagtgatcctcctgcctcagcctccagagtagcatgcactatgtaccccagctaacttattattattattattattattttgtgtacagacgggttctcaaaatgtcacccaggctaatttctaactcctggtcttacacgatcctcccaggtcagcctcccaatagtcctaagttctttttctttttctttttttttttttttttttttgagagtcttgttctgtcgcccaggctggagtgcagtgcagtggcacgatctcgggtcactgcaacctctgcctcccgggttcaagtgattctcctgcctcagcctcctgggtagctgggattacaggtgtgtgccaccatgcctggataatttttgtatttttagtagagacggagtttcaccatgttggtcaagctggtctcaaactcctgacctcgtgatctgtccgcctcagcctcccaaagggctgggattagaggtgtgagccaccatgcccggccaatagtcctaaattctaagagccaatccacccaactgctcagcaactgagggatgtctgaatgtgcatggatatgtttatttctgtcctgctttcattgcaatggcaaactctgaaatactcacgtaatgaagcattacactccctttaaaacattgtttacaaagggtttataacatggaaaatgtcttctgttgtaaagggaaaaaaagaagcacacaattgaaatgagtcatgtttatcacattgtctaaaagcaagcaaaatctcttccccagcaaaaagctggcagggcagggaggccaatgttaacagcagccggtggtcctcccctccccttatcctcctgttctctattttccaactttttttttttttgagatggagtgtcactctgttacccacgctagagtacagtggtgcgatctcagctcactgcaacttccacctcccagattcaagtgattctcctgcctcagcctcccaagtagctgggattacaggcacccacgactacacccagctaatttttgtatttttaggagagatggggtttcaccatgttggccaggctggtctcaaactcctgacctcaagtgattcacccgcctcagcctcccaaagtgctggaattacaggcgtgagccaccgtgcccggcctattttccaacttctgaaaaatgtgtgcacattactaataaagtggggaagggtatactttatgtttcaaaatgaccttgagggagtacgacagagattgctctcagcccaggttctgctcctccccctgctgcctcaccccattgcccagagatgacccctggggctgagccaggtttcacttgccccagggccctgcagctctggccttcccctccccaaactgcagggcacccagcaaaggagtcgcaatccagtacctgcacctgttcccaactggaaatgctgcctccaggcagccagggcctaccccaagacctcagaggaatttcctctgaggaaattcctgccctcccaggaatttccagaaaggactcatggaggaatttcctagacatgcagacaggcagacagacagacacctcaggcagctctcgtcactaagcgcagatgtttgcctgcgggtgacgtgctgggagccaacacaagcacacaattttgcggcgagaggcagcacgaagcaagaatggagagcagacccacccgggcaggctgggggctggcatgaggaagggactgggagggggccccagagttggtcagcagatcgagtctccaggaacagaagtccctactattatctctgtctgaatggcacagtgccctgcaactctcctctcagcacagcaggcattgcaggggctccaggaagggtcagggtagtgtgactgtgagtggtagggccgcagtctgggcttgagcacttagcaagtttgctgtcctggtggcttgtcaatatcccctaccggcctgggggctccccaaggtagtgattttatcttaaacccatccttacactctcggtgcccatcgcaacacccagctcatcacaacactcagtgtctagggctgctccagtagggtggatgatcgacccccatatggataggggagtggatagagagtgatgggatcaatgccctaagtgagatgagaatactggggacagcaccaaagcagggaaagagggctccgggtcctgtcggtgcgcagaatttccatgcacgcttctgcacccagcttgctccagacctagacgcaggcaagagctgacgtggccccgccagactgggcccagcgagcccgaacctgcctggcccaagcagctgcagcgtgggacttcacacgtccccgcccagtcccagtggtcagagaaaccagggaatccggcccaaagctgtctcctccaggaggcaacccgggccacctgctctaaagagctaccagcatccctcccctcttcaacccccctgctggctccttttcagaacagttatgtccagcagaagttaagttccttcactgaacagtgagtgatttcactcactccacagatatttactgaccatctactgtatgtgctagatgctgtgccaggtgctggcagtaagataatgaacaaaacaaaaacccatgtcctcctggagctttgactctatggaatgcccgaactgggaggcagtactctcgccggggccacgtgggaggtcgacacccaggtgtcctcctaggtgagcaaaaggcgcgtgaggtgccgccctgggagcagtcggcgggtggacttcgtcctgggcgagaggagcgggccgcacctcggacaaacgcttggctgggcacgtcgcctggggcaggtgcccgagggagaggggggtggcgctggccgtgcgcaaaacccggccctgacccggccacggggttagaggccgttggtactctatgtttattgtaaacgcagcgaatacggcctccagcggcctcagcgcacgtggtggtgcagtggggagccggctgggccctccccagctccaggctcctccccggcggggtcagcgccagacttgctgcggcgtccgggccccgcgtaattacaggggctgtagccaggcctggccgtaaaataggaggatgaaacggcctgggaactggagaagctgggccggagctggccaggggccccgggtccgtggcttcccgcgatgcgcagccgcagggaagggccggctgaggatgcgcacacacactcacaacaccaacctggcgcgcacacagccacacaaccacacacgtaaaccaccaaacgcacgcagacacacagcattcggctctcccactccaggctcactcgtgagcctaatcaaacacctgcccgccctctccaccccaggagctgacacccgcccgccaagccctctccagacggcagcagatccaggcggggagaagagccccgagaggcaaattccagtgggtttgtttacacagcgcgggggagggggcctgagccgggtactggggcccgactgactgggagccccagctcagactgggccagctccagctgtgcagcctgaggactgcgcacaaacgcccctccgttccaccccacccccgctgcacgccggtacgcgtctcccctcctcttcacacgctgttcacaaacattagcatacgtctgtcaaagagtttcacacgcttccacacacgcggctgtgatactactcacaaatgctttcatgctagcgcgccatcacacgtatttcatgtgtggttacagtttgtcacccttcatgcccagattctcacagtccatattcaagagcctgttcgcacggtgtacgcgtgtgttgttacatatactcaggttattagcgctctttgacttatctaaaataagaacggccccctctcgagcccagggtcccgcgtgtcgctcctgcgggcaggcactgatgtgatggacagaggcgtccttagccccggccgcacacgttacacactcgatcacacaaagcgttgcactttattcccggcatctaggcgatgacacaatctccagaacaaagacaacattgacaaacccaacaaaaacaaacagccgcgtgtgtgtggggaggggcagtcaagcgcagagtccgggaaggggatgggggaggaggagagtgtgggaacgcgggcgcccgagcctgggcatgcgaggctcagaaaggtgcggggcatgtcaacaacctcgcaccctgcaaggtccgcgcgcggagcagcaaagccgtgtcccgcacccccgcgttcgcagactcgcacttgcgagttcttcccttctcccgcacgcgactgcgcccagggacgcaagcccaccaccgggacaggctcacaaagctccacgcagacccacaagtgagcgaacacacatctctgagcagatctgcgggggcagaggagcgcgcttcgctctttcctgcacccccagcctcctcgcctccccaccccgcccctcctccacctccccagcccccaagcccccgggcagccgcgcgccgggcggggcgagggcggggcggggtgtcgggcggcgccggcccaaaaggcggagtcgctaggcgaaggggccagatctgtgagcccagcgctgactgcgccgcggagaaagccagtgggaacccagacccataggagacccgcgtccccgctcggcctggccaggccccgcgctatggagttcctctgggcccctctcttgggtctgtgctgcagtctggccgctgctgatcgccacaccgtcttctggaacagttcaaatcccaagtaagcctcgagactcccgctggcagcctgggctcccggctggcactaccccaccgggataactgtcccggccaaaccctgagctgagcctagagtagatgaccgaggtaggagggcggctgtagattttcctcccctcacttctccgtcatatctgggagcaccccaccccggggcatgcttgtgtctacttgcatgggcttatatctgcccttcccttccttctctctggcacccctattactctaaagtgagggactcatgctgggcagttcctgccttcagcatagacttcgcccctggcagccagggcccttgttccaggccccccacccccccactgtgaaagcctccacgcctctccttgtgtgtcctttgggtatctgaccacactgacagatacctggtgtgacatcaagagtgcacagaatgctcaaggtaaccctggaaggacctctcaggagagagctgggctgtaggcattcattatgcattcaccctgtatttaaagcaaacctggaaagtccctcactaggggtcttttggggtggcatgagtgaggcacatgctgtgcatgggtaggctgagggaatcacctgtttatggggctctcaagtagtaaaagcgaagagctgggagagggagatcatgggaaagcttcagaatgaacagaagaggttaaaggggttacagaaggttctgggcaggaaggagttaatttctcctgggcaggtttagggctgtgaggcaaatggtactgggaggaagactctgtcggcccctttgttcttgcccttgagttttctgaagttatgggaacaatatttgagggaatacaggagagggtggtagggaggagcagggagagaagtgggcagcttggtatcacgaaagccatctcaccggcttagccactctcggccctagcaagcttgccccccactccccttgagaaatatgttgtgccagcttcctctgaccccgtgtcatcgtctggtgaggcagtctgttgtctgtggcttgttagggtgggggagagaacagccagctgccaaccccagagggcaatgccctcctgcccatggacgctggggaggctcagccagccctccgccacccgctccctgtgctttgcctccttgacctgatgcatctcgccctagtatgggagagagcaaagtccctgtttatgcccatgccaggtgttgactggaggaggaggaggggacaggaagccatgagtagggagggggggaccctggccttttccgttcccaagctcccaggtttcctctctttcaggaaggagcctcttccttacccacctccccgccttccctgacgccgctgcccccctttcccagatggggagcaagagtcaaatgaaggctaagtacagcagactgtacccccaggagagggggctgatgggtgaccctctggccacacacacacacacacacacacacacacacacgcacaccctatcatacccaggactaaagagacgccagtccagagtagagtccgtaggcagccaagctgggcccaagcgtgggggcaaatatgaggctacaatgaacggggtaggtgaggctggcatgggtgactcaggccagtgggcagcagccctgggatctccaggcctcaggcgggggcagcatgctgagaagggcgccagcctccctcatgctggagggcaggcccctcattctgacctgccagctccctttgtttggaggacactgttgggggtgagtgggcgctgtgccctcctggggtcctgggggctgtgcacatttgacaaggtaagttttcacaagttctcatgagtgctggggcgggtagcagaggtggatgaggaatgagtcagtgcccgtcacgggaatgagggaaagacgccaggcccagagctgaaatacctgttctgaaatggcttctatgtttatctctccagagaggaattttaaaagcctctctctgctcctctcttttccccagggtgggggaggggcctggtaagcccagtttgggcgctggcacgctgctgcaaagcctggcctctcaggggtcatgctgattgggcagtgggtgcccacctccgagtcctctctgcctgactccttcctcgccctcccagccgtggccagggctttcagttcgaagcaacttagcgctaattctgctgggtctctagctggcagtgcctgggggaattagagaaactgaccagcttgcggggtcgggggaagcacttttccccctactgggaccccacccaggctggagccaggtgtctggagctggtggggaggggctggtgggcagtcaggctggagccggtggggccagggggaatgaactaggggaggggtgctggctccaccttgggaggaggggagaggaggggagagnnnnnnnnnnnnnnnnnnnnnnnnnnnnnnnnnnnnnnnnnnnnnnnnnnnnnnnnnnnnnnnnnnnnnnnnnnnnnnnnnnnnnnnnnnnnnnnnnnnnnnnnnnnnnnnnnnnnnnnnnnnnnnnnnnnnnnnnnnnnnnnnnnnnnnnnnnnnnnnnnnnnnnnnnnnnnnnnnnnnnnnnnnnnnnnnnnnnnnnnnnnnnnnnnnnnnnnnnnnnnnnnnnnnnnnnnnnnnnnnnnnnnnnnnnnnnnnnnnnnnnnnnnnnnnnnnnnnnnnnnnnnnnnnnnnnnnnnnnnnnnnnnnnnnnnnnnnnnnnnnnnnnnnnnnnnnnnnnnnnnnnnnnnnnnnnnnnnnnnnnnnnnnnnnnnnnnnnnnnnnnnnnnnnnnnnnnnnnnnnnnnnnnnnnnnnnnnnnnnnnnnnnnnnnnnnnnnnnnnnnnnnnnnnnnnnnnnnnnnnnnnnnnnnnnnnnnnnnnnnnnnnnnnnnnnnnnnnnnnnnnnnnnnnnnnnnnnnnnnnnnnnnnnnnnnnnnnnnnnnnnnnnnnnnnnnnnnnnnnnnnnnnnnnnnnnnnnnnnnnnnnnnnnnnnnnnnnnnnnnnnnnnnnnnnnnnnnnnnnnnnnnnnnnnnnnnnnnnnnnnnnnnnnnnnnnnnnnnnnnnnnnnnnnnnnnnnnnnnnnnnnnnnnnnnnnnnnnnnnnnnnnnnnnnnnnnnnnnnnnnnnnnnnnnnnnnnnnnnnnnnnnnnnnnnnnnnnnnnnnnnnnnnnnnnnnnnnnnnnnnnnnnnnnnnnnnnnnnnnnnnnnnnnnnnnnnnnnnnnnnnnnnnnnnnnnnnnnnnnnnnnnnnnnnnnnnnnnnnnnnnnnnnnnnnnnnnnnnnnnnnnnnnnnnnnnnnnnnnnnnnnnnnnnnnnnnnnnnnnnnnnnnnnnnnnnnnnnnnnnnnnnnnnnnnnnnnnnnnnnnnnnnnnnnnnnnnnnnnnnnnnnnnnnnnnnnnnnnnnnnnnnnnnnnnnnnnnnnnnnnnnnnnnnnnnnnnnnnnnnnnnnnnnnnnnnnnnnnnnnnnnnnnnnnnnnnnnnnnnnnnnnnnnnnnnnnnnnnnnnnnnnnnnnnnnnnnnnnnnnnnnnnnnnnnnnnnnnnnnnnnnnnnnnnnnnnnnnnnnnnnnnnnnnnnnnnnnnnnnnnnnnnnnnnnnnnnnnnnnnnnnnnnnnnnnnnnnnnnnnnnnnnnnnnnnnnnnnnnnnnnnnnnnnnnnnnnnnnnnnnnnnnnnnnnnnnnnnnnnnnnnnnnnnnnnnnnnnnnnnnnnnnnnnnnnnnnnnnnnnnnnnnnnnnnnnnnnnnnnnnnnnnnnnnnnnnnnnnnnnnnnnnnnnnnnnnnnnnnnnnnnnnnnnnnnnnnnnnnnnnnnnnnnnnnnnnnnnnnnnnnnnnnnnnnnnnnnnnnnnnnnnnnnnnnnnnnnnnnnnnnnnnnnnnnnnnnnnnnnnnnnnnnnnnnnnnnnnnnnnnnnnnnnnnnnnnnnnnnnnnnnnnnnnnnnnnnnnnnnnnnnnnnnnnnnnnnnnnnnnnnnnnnnnnnnnnnnnnnnnnnnnnnnnnnnnnnnnnnnnnnnnnnnnnnnnnnnnnnnnnnnnnnnnnnnnnnnnnnnnnnnnnnnnnnnnnnnnnnnnnnnnnnnnnnnnnnnnnnnnnnnnnnnnnnnnnnnnnnnnnnnnnnnnnnnnnnnnnnnnnnnnnnnnnnnnnnnnnnnnnnnnnnnnnnnnnnnnnnnnnnnnnnnnnnnnnnnnnnnnnnnnnnnnnnnnnnnnnnnnnnnnnnnnnnnnnnnnnnnnnnnnnnnnnnnnnnnnnnnnnnnnnnnnnnnnnnnnnnnnnnnnnnnnnnnnnnnnnnnnnnnnnnnnnnnnnnnnnnnnnnnnnnnnnnnnnnnnnnnnnnnnnnnnnnnnnnnnnnnnnnnnnnnnnnnnnnnnnnnnnnnnnnnnnnnnnnnnnnnnnnnnnnnnnnnnnnnnnnnnnnnnnnnnnnnnnnnnnnnnnnnnnnnnnnnnnnnnnnnnnnnnnnnnnnnnnnnnnnnnnnnnnnnnnnnnnnnnnnnnnnnnnnnnnnnnnnnnnnnnnnnnnnnnnnnnnnnnnnnnnnnnnnnnnnnnnnnnnnnnnnnnnnnnnnnnnnnnnnnnnnnnnnnnnnnnnnnnnnnnnnnnnnnnnnnnnnnnnnnnnnnnnnnnnnnnnnnnnnnnnnnnnnnnnnnnnnnnnnnnnnnnnnnnnnnnnnnnnnnnnnnnnnnnnnnnnnnnnnnnnnnnnnnnnnnnnnnnnnnnnnnnnnnnnnnnnnnnnnnnnnnnnnnnnnnnnnnnnnnnnnnnnnnnnnnnnnnnnnnnnnnnnnnnnnnnnnnnnnnnnnnnnnnnnnnnnnnnnnnnnnnnnnnnnnnnnnnnnnnnnnnnnnnnnnnnnnnnnnnnnnnnnnnnnnnnnnnnnnnnnnnnnnnnnnnnnnnnnnnnnnnnnnnnnnnnnnnnnnnnnnnnnnnnnnnnnnnnnnnnnnnnnnnnnnnnnnnnnnnnnnnnnnnnnnnnnnnnnnnnnnnnnnnnnnnnnnnnnnnnnnnnnnnnnnnnnnnnnnnnnnnnnnnnnnnnnnnnnnnnnnnnnnnnnnnnnnnnnnnnnnnnnnnnnnnnnnnnnnnnnnnnnnnnnnnnnnnnnnnnnnnnnnnnnnnnnnnnnnnnnnnnnnnnnnnnnnnnnnnnnnnnnnnnnnnnnnnnnnnnnnnnnnnnnnnnnnnnnnnnnnnnnnnnnggtttcaccatattggccaggctggtctcgaactcctgacctcgtgatccgcccacctcggcctctcaaagtgctgggattacatgtgtgagccaccgcgcctggcctaggagtagtattaagtggcccaggcaagaggaacatattcagactcggaggaatgaaggatgaaatgtggggaggggcagtgtctatgctgagggttatttccaaagaatgagaggctgggctgaacattgggcaggaagttagcaaaaactaaggagggtaggaatcaaggttagagggaagagaagaatgaaattgagtagggagctgagaaagcagggcgaggggcatttggacttacattttcttccagcaaaggtttcttatttaacccctgtgggcttatcttgcagccaaacccatccaccagcatgaagaccgctgcttgaggttgaaggtgactgtcagtggcaaaatcagtgagtgtcggagccctgtgggcctccttcctccatctctatgctgggtgcggtctagtgatctaggatggtatagaagtcttgcagcccagcccactcatacttacagccctctgcctctttgatacagtacctgatctactaccactcttgtctttcagctcacagtcctcaggcccatgtcaatccacaggagaagagacttgcagcaggtgggtagctggagcaaactgggcctggggcacaggaaggggtctgcttgaagaggttgggtacaggaggtggctcctttaccaggctgaggctgagggaatcctgttgggctgagagccagtacaaatagtggagccactcacactggtggcctttgccctctcaccttgcagatgacccagaggtgcgggttctacatagcatcggtcacagtgctgccccacgcctcttcccacttgcctggactgtgctgctccttccacttctgctgctgcaaaccccgtgaaggtgtatgccacacctggccttaaagagggacaggctgaagagagggacaggcactccaaacctgtcttggggccactttcagagcccccagccctgggaaccactcccaccacaggcataagctatcacctagcagcctcaaaacgggtcagtattaaggttttcaaccggaaggaggccaaccagcccgacagtgccatccccaccttcacctcggagggatggagaaagaagtggagacagtcctttcccaccattcctgcctttaagccaaagaaacaagctgtgcaggcatggtcccttaaggcacagtgggagctgagctggaaggggccacgtggatgggcaaagcttgtcaaagatgccccctccaggagagagccaggatgcccagatgaactgactgaaggaaaagcaagaaacagtttcttgcttggaagccaggtacaggagaggcagcatgcttgggctgacccagcatctcccagcaagacctcatctgtggagctgccacagagaagtttgtagccaggtactgcattctctcccatcctggggcagcactccccagagctgtgccagcaggggggctgtgccaacctgttcttagagtgtagctgtaagggcagtgcccatgtgtacattctgcctagagtgtagcctaaagggcagggcccacgtgtatagtatctgtatataagttgctgtgtgtctgtcctgatttctacaactggagtttttttatacaatgttctttgtctcaaaataaagcaatgtgttttttcggacatgcttttctgccactccatattaaaacatatgaccattgagtccctgctaagtgcgaggctctctgtgctacaacagtagcaactgggtttgaatttctttctctccaaagaatgtgtgcccctcacgaggccaaaagggtgggatgtttcctcctctgagggctgtccaggaccggagtgctcctgacagctgtctctcgggttctgagctgcactccactctggaagttcttcctatccgacctctaccccactcccactccgtcaccgcagggctttggcatactaccattcaggtactcacgctgtttcggtgagtcagggaagctgggaacgccagctgaggcatgcggccccgccccacagccacactagcagagacgtgtgggaggctgggagggaaagttcccagtaacaagtgggttggaccgggggtcagtgatagaggcgtcagtggattggccacgtcatgtaaagttgacccgagagggagggcaaaagaggaaggcttggtgattcctggtaatgtgttattttgagaaaaagcttcggcagcacactccagaaaaaaacttcccaaaccctgggcaactgaggttctgatgtggagctctggatggaaagcgtgctgaagtcttgttaaactagcaagcttttgtttggaggtccaccgccgaaggcgcacaggcctgtgggaacacgagcgttgagactgggggcgtctagatgatccaaggggtaggcagagtgtgagcagcggcaggtatcggggacacacccgcggagccctaggaaggggactgaccgggacatggaagaggtctggaccaaggtactgggaaggcgctcggaggagaggggcgcgagttccggttcggcgtcggagggagggtggggcttcggcgcagtttccggagggacggcccgagcgtgcgggggcggagccgagtgcgcggggcggggctccagagccgcaggtctgggctgcagtaggtcccggcaaccgcaggctcgcggcgggcgctgggcgcgggatccgactctagtcgtaatggaggcgggcggctttctggactcgctcatttacggagcatgcgtggtcttcacccttggcatgttctccgccggcctgtgagagtgcggccgggctgggttggggaggactaggcagtcaggaaaggagagagaggggacagagacgtggccacagcacctggctcgtccggaaccgggatcaaagtgggatcgggtcgaggggaccggggtacaagggcgaggctggtcactaggcctgaaggagaaggcaggatagctggcgggggggagaggggggcggggtctgcggtggtccggaaaggatgacaggcattgggcatccccctctagcactctgcttctcccttcccacccccacccctcccttcggggccccattacagctcggacctcaggcacatgcgaatgacccggagtgtggacaacgtccagttcnnnnnnnnnnnnnnnnnnnnnnnnnnnnnnnnnnnnnnnnnnnnnnnnnnnnnnnnnnnnnnnnnnnnnnnnnnnnnnnnnnnnnnnnnnnnnnnnnnnnnnnnnnnnnnnnnnnnnnnnnnnnnnnnnnnnnnnnnnnnnnnnnnnnnnnnnnnnnnnnnnnnnnnnnnnnnnnnnnnnnnnnnnnnnnnnnnnnnnnnnnnnnnnnnnnnnnnnnnnnnnnnnnnnnnnnnnnnnnnnnnnnnnnnnnnnnnnnnnnnnnnnnnnnnnnnnnnnnnnnnnnnnnnnnnnnnnnnnnnnnnnnnnnnnnnnnnnnnnnnnnnnnnnnnnnnnnnnnnnnnnnnnnnnnnnnnnnnnnnnnnnnnnnnnnnnnnnnnnnnnnnnnnnnnnnnnnnnnnnnnnnnnnnnnnnnnnnnnnnnnnnnnnnnnnnnnnnnncaggagaatggcgtgaacccaggaggcggagcttgcagtgagccgagatcgtgccaccgcactccagcctgggcgacagagcgagactacgtctcaaaaaaaaaaaaagagtgaaagaccctttgggtcctcctctcacactgaaccctttgagccatgtccatcccctccaccctgcagcaacctgggctggctgagttatggggctttgaagggagacgggatcctcatcgtcgtcaacacagtgggtgctgcgcttcagaccctgtatatcttggcatatctgcattactgccctcggaaggtagaggccctcccttggacccacctatctgctgcacgccctgccttgctggcagggcaaacactatttcctagaagactgtaacagctggcactgccaccttttccaggaaggcctctccagccttgcaggtccccttcctctatgaagccagccttctgagatgaacacattgcccccatttaggcaaggctggtagctctgcctagcctgagatgcctatgctgcctgccctgggcttcagccaacaagctaaggggaaagggcttttgtctctgatatttctttcagagccagggcctgtgggtgagaatgagatgattagctctgcgtccctgctaaatcacacaagcatttatgaagctcctactgtgtgtgccaagcacacagaaaaaaacacatatttatctcccccagaagtctccagtgttgtgggtggataagactttcctatcaagttggtggtgggaaagaagctgtgacagtgcagtgctggaggcctagacagcttggcttccccattggagcactggagaaggcaggatgaattaactctagcagggaagtcagagtgcacatctggaagtaagggtactctctcccctgcagcgtgttgtgctcctacagactgcaaccctgctaggggtccttctcctgggttatggctacttttggctcctggtacccaaccctgaggcccggcttcagcagttgggcctcttctgcagtgtcttcaccatcagcatgtacctctcaccactggctgacttggtgagtgggggtgtccaaggaggtaggagagataagagtcaggctctcatagccaaatactatggcttacagtcccgaggaaggggagatccaaaccctggaagaagacaaggcagtagaagtgggcgagtgggaggcaggaaaggttgggtgacagatcagggagggtgtctgacctttttcttgaggaaattcttaggcaagtgaagctttacgatgtgcttgggccaagagagtcttccattctttcccacaggctaaggtgattcaaactaaatcaacccaatgtctctcctacccactcaccattgctacccttctcacctctgcctcctggtgcctctatgggtttcgactcagagatccctatatcatggtaagcacaactgggatggggtgacaggggtgcaagatggaaaactggctcctctcctcatagcagttcttgtgatttcaggtgtccaactttccaggaatcgtcaccagctttatccgcttctggcttttctggaagtacccccaggagcaagacaggaactactggctcctgcaaacctgaggctgctcatctgaccactgggcaccttagtgccaacctgaaccaaagagacctccttgtttcagctgggcctgctgtccagcttcccaggtgcagtgggttgtgggaacaagagatgactttgaggataaaaggaccaaagaaaaagctttacttagatgattgattggggcctaggagatgaaatcactttttattttttagagatttttttttttaattttggaggttggggtgcaatctttagaatatgccttaaaaggccgggcgcggtggctcacgcctgtaatcccagcactttgggaggccaaggtgggcggatcgcctgaggtcaggagttcaagaccaacctgactaacatggtgaaaccccatctctactaaaaatacaaaattagccaggcatgatggcacatgcctgtaatcccagatacttgggaggctgaggcaggagaattgcttgaacccaggaggtggaggttgcagtgagctgagatcgtgccattgtgatatgaatatgccttatatgctgatatgaatatgccttaaaataaagtgttccccacccctgcccacgatggttcattctctactcataattctaaacctgcctggtttggtgaaggatagatccacagttattctcaggttggtagggtaggctcagaaaaggtatctcaaagaaccaaaaggttggaaagacccaggaaggccttaaaaataacaaaacttggatgttatgaagaatggaacttaggcttcaagaaagtacttctggccgggtaaggtggcttatgtctgtaatcacagcactttgggaggcccaggcaggaggatcacttgagcccaggagtttgagaacagcctgagcaacacagcgagaccctgtcactacaaaaaattaaacattagcctggtggcgtggtggcatatgcctgtagtcccagctactctggaggctgaggtgggagaactgtttgagcctgggagggtgaggctgcagtgagccatgattgcaccactgcactccagcctgggcaacagagtgagaccctgtctcaaaaaaaaaaaaaaaaagaagtagtacgccgggcgcggtgactcacacctgtaatcccagcactttgggaggccgaggcgggcggattacgaggtcaggagatcagaccatcctggccaacacggtgaaaccccgactctactaaaaatacaaaaaattagccaggcgtggtggcaggcgcctgtagtcccagctactcaggaggctgaggcaggagaatggcgtgaacccgggaggcggagcttgcagtgagccgagatcacgccactgcactccagcctggacgacagagcaaggctccgtctcaaaaaaaaaaaaaaagaagtacttcctacagggttgaaaggaccaggaaagtgaaatgtcatttccatcctgagaaatattgagaaggggtctttgcctccttgggagcaaaaatgggaacaccagcaagatgcaaagataaaggctgagatggcctcaagaaggtggttctttcacattcacttctcgaccgttagtacatagaatccccaatacccgttttccatactcaaactaaacgaagttagaaaataaactggctctttaatgggaaatgggaggaagggctgtccgcacaggaatggggttaggctgtcagaagcgcagccccctgcgggctaagtcggctcgggcctcctgtatctggctctgcagctcgcgtgcggcgtcctcgcagtcatgaaaagtggccacacgatagcccacagtgcccagggcatagcagccggcggacaccagcaagtaggcgggcagtggccacaggacttcctggcaggacaagggcagctccaggcccaaggctcccgtggtcagggccacccaggtggagcccaggatcgctagtccccaaagccactgcgctaatttcgtcatggtcactgcgagagaaggaagcaatgctcccctgaggagcagaaaggaaaagcggaccaaactcaaccgaagcccgcccacggagagcattaaaaccagccctggccagaggggaatcgccgatcccagaggtccgaacttgagtgcccacaaaaggtggaagggccccttccaccttgctaccccctctatatttgagacccactccccatctctcgccctccccattcagccttcaacctacacttacctctaccccacgtctccccttccccgcgcggcccggatgttggcgtccggaagtcctccctggttcacgttccgcttccgcgcggccttctgggagttgtagttcacctggcggcgcctggtgtactcctggccagcgcctcaatctaggcgggggtacagtgggctgtgctccgcaaacggggagcaggccgggtctggagaggcctcggcgctgctttcccaccttgggctacgctccaggctggcgtggggcttgaggacatccttaaatgttgcaacaagatgggaatataataccattccccttaaactcaattctccagcgctgaaatccattccttcattcactagttcattcattcgaagatttctttctttccattcttgacagggtctctctatagtgcctaggcgggacagaactccttttttttttttttttttttttttttttgagacaaagtctcgctctgttgcccatgctggagtacagtggctcgatctcagctcactgcaacctctgtctcccgagcagctgggattacaggcgcgcgccaccacgccgggctaatttttttatttttagcagagaacggggatttcactatgttggccaggctggtctcaaactcctgacctcaagtgactggcccacctcagccttccaaagtgctaggattacaggcatgagccacagcgcccggccagaacatttcttgattaccatgatagactttggagatacagagatgtcaagagactcgacccctttcaggtggagggggaaagcaggagtcagtgaagcagttgcattgacaactaaccatgaaggcttgagattattgttagaacagaggtagtcatatttttacaaggacaacaaccaatataacttggagccagaggaagaagggctccaggagtctgggtttcaaaaaaaaagaaaagaaaagaaagaccagaagaattacctgaagtggtgaaggcattgaaagaaagagtataattctttagaacagttttggggatgaatttattatgtatagagagaaagagagagagagaacaaagtaagagaaaaggttaggcaattatcaacttcagaggaaacaaagagttatataagaaaggaaagacaattgataagcctgtcttataaagaccacatctgtagtttgacagttaggtttattaacttgccacaacagagagatcacacactagaagaactgtggggcaactcattaaaaaggaagaaatatggtcattcagatgatatggtttggctgtgtccccacccaaatttcaagttgatgtgtatctcccagaattcccacgtgcgagggacctaaggggaggtaattgaatcacgggggccagactttcccgtgctattttcatgatagtgaataagtctcacaagatctgatgagttcatcaggggtttctgcttttgcttcttcctcatttttctcttgccaccgccatgtaagaagtgcctttgtctcccgccatgattctgaggcctccccagcaatgtggaactgtaagtccaattaaacctctttttgtttgcagtttcgggtatgtctttatcagtaatgtgaaaatgaactaatacaacaggatatgggaaaggcttgactttaaaatttatattttaaaatttatttacttatttatttagagttgaagtctcggtatgttgcccaggcgaagctcaaacttctgggctcaagtgatcctcctgcctcagcctcccaagtggctgatactataggctagctaaaatttaaatgaagcagtgttttgatcggttcgaggtaagcataactttaagtgaagggatcaagaagtccaagctgagggaccacttggaaattacaaagtcaagataaatatagaatatagtgtccaaaaacccactatctaggctgggcacagtggctcgtgcctgtaatcccaacactttgggaggccaaagtaatccacgtggctcagaacttctggcaagagtaggatgttccattcgcactgactgatttcaaatagcaaagtttgtgactatgattttagaaaatgaagtttctcagccgtatgtcctggatgttaattaacaaaagcagtttttacagattcacagtcttagcacaaacacaaatggctcagctgtgaagaaaattttcacagccgtaacgatgtaaacactaagtattgatttaactaaaaattggagctggggacagtggagctgtgatcccagaactttgggaggcctaggtgggagtgttgcttgaagaaatgtacagataagtaccagaagaagcagcctagaaactggagcgtagttgtatatgtaggttgtatatgtaagggttaaagaagaggagcaggggatggttatttttcattaaaagccttgtagagttacagctctttttttttctattctttttctttttttcagacaaggtcttgctctgttgcccagggtggagagcagcggtgcaaacatggcttactgcagcctcgacctcctggactcaagctatcctcccacctcagactctggagtagcagggactacagaagtgggccaccaccaccacgcccatctagtgtgtgtgtgtgtgtgtgtgtgtgtgtgtgtgtgtgtgtgtgtgtagacggggtctccctatgttgcccaggctggtctcaaaatcctgggctcaagcaattcatctcagcccccacaaagtgctgctattgcagtcgtaagccacggcgcccaccgaagttacagctttcagaatttgttgagcaggtttcccggttttcacttgaaaatgccccgccaccccgaaaaatatttgttgaactagttggcttttaaaactatacaaattcctttgttaaagtaaaaattaaaacaaataaaaacttttctttttttttttgagacagagtctcgttctgtggcccaggctagagtacagtggcatgatctcagctcactgcaacctctgcctcccatgttcaagcgattagcctgcctcaacatcccaagtagctgggactacaggcacgcaccaccacacccagcaaatctttgtatttttattaaagacagggtttcaccatgttggtcaggctggtctcgaactcctgagcttgtgatcctcccacctcggactcctaaagtgctgggattacaggcgtgagccaccgcgctcagcccaaactttttttttttttttttttgagccggagttttgctcttgtcgccgagnnnnnnnnnnnnnnnnnnnnnnnnnnnnnnnnnnnnnnnnnnnnnnnnnnnnnnnnnnnnnnnnnnnnnnnnnnnnnnnnnnnnnnnnnnnnnnnnnnnnnnnnnnnnnnnnnnnnnnnnnnnnnnnnnnnnnnnnnnnnnnnnnnnnnnnnnnnnnnnnnnnnnnnnnnnnnnnnnnnnnnnnnnnnnnnnnnnnnnnnnnnnnnnnnnnnnnnnnnnnnnnnnnnnnnnnnnnnnnnnnnnnnnnnnnnnnnnnnnnnnnnnnnnnnnnnnnnnnnnnnnnnnnnnnnnnnnnnnnnnnnnnnnnnnnnnnnnnnnnnnnnnnnnnnnnnnnnnnnnnnnnnnnnnnnnnnnnnnnnnnnnnnnnnnnnnnnnnnnnnnnnnnnnnnnnnnnnnnnnnnnnnnnnnnnnnnnnnnnnnnnnnnnnnnnnnnnnnnnnnnnnnnnnnnnnnnnnnnnnnnnnnnnnnnnnnnnnnnnnnnnnnnnnnnnnnnnnnnnnnnnnnnnnnnnnnnnnnnnnnnnnnnnnnnnnnnnnnnnnnnnnnnnnnnnnnnnnnnnnnnnnnnnnnnnnnnnnnnnnnnnnnnnnnnnnnnnnnnnnnnnnnnnnnnnnnnnnnnnnnnnnnnnnnnnnnnnnnnnnnnnnnnnnnnnnnnnnnnnnnnnnnnnnnnnnnnnnnnnnnnnnnnnnnnnnnnnnnnnnnnnnnnnnnnnnnnnnnnnnnnnnnnnnnnnnnnnnnnnnnnnnnnnnnnnnnnnnnnnnnnnnnnnnnnnnnnnnnnnnnnnnnnnnnnnnnnnnnnnnnnnnnnnnnnnnnnnnnnnnnnnnnnnnnnnnnnnnnnnnnnnnnnnnnnnnnnnnnnnnnnnnnnnnnnnnnnnnnnnnnnnnnnnnnnnnnnnnnnnnnnnnnnnnnnnnnnnnnnnnnnnnnnnnnnnnnnnnnnnnnnnnnnnnnnnnn

SEQ ID NO: 137 - DNA, 1654 bp, Homo sapiens
aacgcgggcgcccgagcctgggcatgcgaggctcagaaaggtgcggggcatgtcaacaacctcgcaccctgcaaggtccgcgcgcggagcagcaaagccgtgtcccgcacccccgcgttcgcagactcgcacttgcgagttcttcccttctcccgcacgcgactgcgcccagggacgcaagcccaccaccgggacaggctcacaaagctccacgcagacccacaagtgagcgaacacacatctctgagcagatctgcgggggcagaggagcgcgcttcgctctttcctgcacccccagcctcctcgcctccccaccccgcccctcctccacctccccagcccccaagcccccgggcagccgcgcgccgggcggggcgagggcggggcggggtgtcgggcggcgccggcccaaaaggcggagtcgctaggcgaaggggccagatctgtgagcccagcgctgactgcgccgcggagaaagccagtgggaacccagacccataggagacccgcgtccccgctcggcctggccaggccccgcgctatggagttcctctgggcccctctcttgggtctgtgctgcagtctggccgctgctgatcgccacaccgtcttctggaacagttcaaatcccaagtccaaacccatccaccagcatgaagaccgctgcttgaggttgaaggtgactgtcagtggcaaaatcactcacagtcctcaggcccatgtcaatccacaggagaagagacttgcagcagatgacccagaggtgcgggttctacatagcatcggtcacagtgctgccccacgcctcttcccacttgcctggactgtgctgctccttccacttctgctgctgcaaaccccgtgaaggtgtatgccacacctggccttaaagagggacaggctgaagagagggacaggcactccaaacctgtcttggggccactttcagagcccccagccctgggaaccactcccaccacaggcataagctatcacctagcagcctcaaaacgggtcagtattaaggttttcaaccggaaggaggccaaccagcccgacagtgccatccccaccttcacctcggagggatggagaaagaagtggagacagtcctttcccaccattcctgcctttaagccaaagaaacaagctgtgcaggcatggtcccttaaggcacagtgggagctgagctggaaggggccacgtggatgggcaaagcttgtcaaagatgccccctccaggagagagccaggatgcccagatgaactgactgaaggaaaagcaagaaacagtttcttgcttggaagccaggtacaggagaggcagcatgcttgggctgacccagcatctcccagcaagacctcatctgtggagctgccacagagaagtttgtagccaggtactgcattctctcccatcctggggcagcactccccagagctgtgccagcaggggggctgtgccaacctgttcttagagtgtagctgtaagggcagtgcccatgtgtacattctgcctagagtgtagcctaaagggcagggcccacgtgtatagtatctgtatataagttgctgtgtgtctgtcctgatttctacaactggagtttttttatacaatgttctttgtctcaaaataaagcaatgtgttttttcgg

SEQ ID NO: 138 - protein, 76 aa, Homo sapiens
SKPIHQHEDRCLRLKVTVSGKITHSPQAHVNPQEKRLAADDPEVRVLHSIGHSAAPRLFPLAWTVLLLPLLLLQTP
